United States Patent Application Publication US 2008/0114160 A1 - sequence listing, part 35

SEQ ID NO: 9130 - DNA, 10148 bp, Oryza sativa
ggcgccgtggtgagccaggtggggatgcttccttacgaggcgcgtgaggtggcgatggggatccatcgggacgcggtggcgcaggcgcaggcgctgagggtggcggcggcgagcgcgatcgagtcggtgacggcgagggcgccgccgttcgggccgccggcggcgcggcacccgggggaggcagggcgtgggaacccgccgcccccgtgcgcggcgtgcggcctccccgagaaccccggggggaccatcgtctgcgactcctgcgagcgcgggttccacctcgcctgggtccgcgttggccgccgctcatgccgccgccgccgccgccgccggccccccccggcgcgcgtcggccccgcgccaccgccaacgaggactggatatgccccgagtgcgagatgcgtggcgcccgcaccaacaggtggaagctcggccccgtgccgctcgacatcaacgtgcccccgccgagcaccccggacgcggaggaccccgtcgccgtcgccaccagagacgtcaccaggcagttatctcagctctcatttcctcaactccttttgcttacggctgacttgatccgttggtctaaaaagtgctgaaaattcatgccgccttgcgatgaaatgctggtgctctgcagatggtattcttggtgggactaagccacacccgttagcgtgggatgacgctatgaacccttttttgttatggttgatgttttaattcattgtttgccatggttacagacttaatatgtgtgttacgtttatctgctctgtttgactgttgatgcatttggatcttagtcctgttgcatgattgatgccgaaatgactgggtttcaattctatagttagcactatgtggcagtggccttagtctttttatagcttcttgttatagtgattactaaatttaggtgccacactgttgcttgtctcttttcttcccaatacgctacgaaccagatatattgcactgtgcagatgatttgatgcttttaccctttgcttggtatggtcaatggtattatattctgttgaagtcttaggatcttgcctatgtcatttgtaatttgcattctcagttgattcaagtaggaacctacatgttctcttcatggcagattggcaggtccatgtagtcaatttgtagtttacttatagtccatattgattttctgttgtagtcttaggatctttcctatgtcatttgtaatttgcattctcagttgattcatgtaggaacctacatgttctcttcatggcatattggcaggtccatgtattatagtcaatttgtagtttacttatagtccatattggttttggtctagactatgggtcctcgtgtgttttgtgtacttggcttctggtctatccatgaatgcattagcttgactacatatgctccctactaacatggtaacacagcatagttctgaaaacctctagttggcttcaccaatttgctcttgccagttgccacaaacaaataaggcatgggaagagaactagagcactagtttgtattagttcccttctgttaccatattgcttttggtctagactgagtcctcatgaatccctattttcctagcatgttacaagagatggacggcatcaaagaaactctgtacttctccaccaatccgtagttggcatggaatgaatcaatgcttttgtttttttgggggttgctgctatcagaatgaatcagtgctttggtttttcaggggagagcccatgtaattgacacacttacacctagtaagctccctgtggtgtttgaattgcaatgccacttttggctaccttttcatcctccattttggatctaaagcgtgcaccatcttgtcgctgttgtgcattgatgacctctatcgcaccatttggacctacatggaaagcgataccagttgcgttgcattatcttgtgttggtgtttctagcctcattgcaatgaccattcaggtttccttgctgcatcttgtgctgtcgagttactgtttcatgggcagacttgtatcacttgctttccctcatgatatcacattctcagcttttctccattgaccttattctacatcctttggatttttatgtttaaaggatttttttagtttaatcaaagttacatggccttctatttttttttgaagccattccaaatttagaacatttggtgattatttccttggtttggcacttgccattcttatctgatctaatgatgtgtaccatgctcgttcttcttttaggttgatcacagtccatcttggaccgagttcaatctccactcttctgccgcatttatcatggcctgttatcatcgattcagtttttcacttgagtcctctttttttagccttcttctgatttgttgcctttgttgtgacttgactatcttagtcttcttttcatcaccatcttgctaattgttgccaccattgctgcttacaatcatcaccaccttttttttttttgcaattgttcggtgaatccttttatgcctatactagccagtgtgattgtctttgtctctatgctattggttttatataatagatttatgcatctttttttctacatttccaccaactttttagatagtatgatgtgaaagtgactgtcctttgtttgcgtacgaagacttccgttttggaaggctaacatcatgtagagaggatgttgtttgctcttccaacatgtgcatttgatcaaatagcagcatagtatggcttgctgcataattttgtagcttataggttttatgtaagagtacataccatttaattttaacttttaaggctacttggacatgggcaccttcgttagaaatcaacacttggatttaggtgttcgatttggcaattaaacatgcatattactaattagaaatggacatgattcaatttggattcaggtgtttaatttggtaattttttttttgacatgggtgtttgagtggaatagcacttcatatttttttataatttactaagggaggccatctttggtcctattattgtagtctaatgatctcatgatagtgatttgacgataaaatgttactgttgttgggctcgtaggcatatgggcctattagaaccaatcataattggcatatttgtcttgaatgaatgccaacagatacatgtcttctgtttatgtataggagatgttgggaaaatgtttgataagaacatggaataggagatgttggggaaatgtttataagaacatggaaaccattaaggaattggaagacataggttatcgtggcagccgaggtggtcaatcccaaagattaaaagttgcttttttagatgtctaatttcctttttccatgttatgtacttatgtagactgatatcttttgtagttatttctgcctcttataagctcttggtaggaggtattttctatcagggccccatgtttgagatagaacaatcaacaaagtagtactcccgcaaagtctatagtttctctccccatgtgcttctctccttcaagccaatattgtatgatctccacctagtacttaccatgttatgagccaaggctcaagtcagattaccgagtatccatattagaggagagtgtagattgtatacccattttctgtttctatctcattttgatgatctcttgtaccggtatattggctagggtcctagttggctatatatatcacaactgcccccctccccaaccctgcaacaggtgtgagccgttttccctaattctatctttctacatggtattagattcagagttcttaccttttccggtgccctagcgctgctgcgtcctcttggccatgcgatctcgcacaccttctgtacgttgacgacatgtctgcactccgagttcgccatgacagaccttggcgacctccatcacttcttcctctgcatctccgtcaagtgctcctccgacggcctattcctgtctcaatgacaatgcaccgtggatctacttcaacgagcaggcatggtcgagttctactctactgcgacaccaacggatgcacatgctaagctgtatgtcagagacagtccacctcttgataacccagtggagtatataggagtctcgccgatgctttgcactacctcaagtcgactcaaccggatctggtgtatgtcgttcaacaggtgagcctcttcatgcatgatccttgacaagcggattctccgctacgtgaagggcactctctccatcggccttcacattggcaccgacaaagtccaggcttacaccgacgtggactgggctagttgtcctaactcatgccgctccacatcaagctactacatcttccttggagataatctagttgcttggtcttcgaagcaccagaccactgtctccctttctagtgctgaggcaaatatcatgctgcaacccacgtcgccgtcgagtgttgttggttgtggcaattacttaagaaacttcatattcggccatcattgtctactacgataacgttagtgctgtctatatgacaaccaatccggttcatcgtcgcgcgaagcatatcgagattgacattcactttgtttctgagaaggttgctttggggcaggttcatgtgctacatgtcctgtcttctcaccagtttgcgtacatcatgaccaaaagcctacctatttagttatttactgattttaggtcgagtctttgcgtttgtgatcctcccgttgcaaatgcgggcgggtattggaggaaagtgtatattgtataactttttttttgtttctatctcctcttttcgaggatctcttgtaactaccggtatattggctatatatataacaaccgcccccactgttgggggaatggctccggatgacggagccggcctccgtcagtagggaaactctgcccggagccatccaccaagggagaatgaccgaaggcaacagctaccccgatgatcgagtccgactaaaggcttcagagccgaccaagggctccgaagcacatcaccaactccgaagctgaccaaccgccccagtgcctaccataggcttcggagcagaccaacggctccggagcagaccaacaactctggagcagatcaatgactccagagcgaatcaatgactctagagccaatcactggcttcggagctaaccaatggctccgaagcagatcgaaggcccgaagtgtccggggagctaaaatactcgagcgtggagaaatggttcacgagcgtagtggggcaccattaatacgcactacgcatccgccaaccacctctgacatcctaacaagggcaagatggcatccgctattatccgggggcatgcctttacctggataatagccatcaccctcgggaagcgtcatcgcttccttaatgggcgcagccctccctgtctctaggggttttaccgactgccctagggctggcccaccggccagccgctctacatcttatctagctagggtaaagatgtaacttcctcttgtaccccatgtataaatatgtaagcattgtccacagttagggacagattgagtacaaaatacacattgaatacactgtttggactttgttccaacacccaccatatatgtgaagagttttccctaattctatctttctacaatccacacttttaacgtcacaacaaccattgacaacatgaacaaccaccttcaataacattgcgtctatggtagatgatattatatcatcattggtcaagtgggttatgttgttttctgtggcattttaatagttgtgctgacacccatgccaactccatctcaaacgatcgtcttcggctccatcactggccttgtcaaagaaaaagaagactcttatcttgagttctcttggtgttgacattggcagtggccaatgggacatgccttatgtcatgttgagcgcaacatattgccaattgttaccaagtcccgcgattagtcgtaaagttggtcaagccacacgactagagtgccacgacttgactgaatagcaagccacacgattaatcgtggttagttgtaaatttagtaagagatgatcgtgcatatctctacttgtaaatgatggtaagacgaccatatatagaattaatcaataacataccacaaacacaaaacgtttctcacatcactgaagaacgtatagatttagacatattgaaatagctaatctttatttccttgatggacaaacaatgtcgaaccatattttagatagctacaataacataaaatcaggaagtaaaacacatacggatgaatgattggaatgtaaagcaaagtttccactacttgattggagtaaaaaatcggattggacagattgaagaaagtattttcttacttgttttgcgtatggagtttggcacgtgagaattgtagctctccgcacaacggcttttttagaattgttcaactagatccctgcaatttatttttttagaattgttcaattggcaagtgagatgttttgtcagattatatgtgctggaattatgacatcaaatttattagtatatatatatatatatatatttattttaatgatgtcacaattttcgcgtgccttttcatggagttggtagacttagtctatactccctagaccttaccctttatatatggcctatcatcctagactccttgcaatccatctcctcaattgaagtattgaaaaaataggtggaaaagaggaagggttaggaagagatcatctaagagagggaagggggaagggtgagggagagatcatctctaacttgcttcttcagcgctcttttgcaatcaatgctgaatctctcttgaactgataggacagcgagcgattcgcaaatctgtccatctggaggtatagatctaggcctgagtctaatttttttcgttttctgttggtggtacaggtggttccgtgaggattttggaggggttaatggtttgttgctctgttcatctggtgctttgcatctagggtatcaacaattatagatctgcaattctttgaggcgtttaaggccttctttggaacataggaattttggaggacttttgtgggtgttgaattagtttggtgaaaatcgtgtaaaatccttgtgatccataggagccctaaaccttcagcacatcgtgcctactggttttgacataacatcggaatttgtgtcttgctatgttgatccttctctggaactgttctgttcatggccttaaccatctgctttaatatgcttgttttaggttttttttttcatgtagtgctgtttggtatcagtggagaaaagtagggggagaataatatcagatgattgaaatctaggaatttgagttttgggaagatgattcaaatctatgttgattgcatagctacaataaaatgatttacctgatccatgtgttccaaccatggtcttattgtttgaatcttgtttatgtgctatactgaaagcgtgctgtattctctatagttcattgtgctgcaatccttccatagttacacatgaataatgatatttgtgttttttttgtcaagtggacctgttttgatcactattcacttgaaaaatctgtacaaaggaaaacacctctgatctcttgaaattctggtttgttgcaaagcaaaatgaaactgcaagtaacccagagtgtttttggctgctctgactaacattatctgaagtttttggaagttttctaatgatgtttgtcatacgaacactattatcactaattaatatatccttttgatctgcagaacaaatgctgcagatggagcgcatttgactgagtttgctgtgcagctgccacattttgaggggcttcacttaaagaacactgctctttatggtaaggattagagaacaatcatatctaggcaagagagatgtgtagaagcttttggctggaaatttactatgccttcaaagccctgtaacttttttaagaacatttttttgtgttaagtgataaccatcaacatcaaatcctgctagctgctatactcagtgcatagttgctcaagaaattcatcgtatgttgttttgctcagttaggcataacacgtgcttgtctgtaaacttcaacttcatgataattcccagaaatttgtgagccttaccaatatttgaattctcctgcatggtgttttatgctgtgtatcttatacctgtgtggcttcaaaggtgactattattggtgcagcttatgacaactccactactttcttgttgcagatgggaatcagtttatgccagcatttggtcttgctcattgtctgagcatgagacaacaatttacttccatggaccgtgatatcatggctgatggaaacatagtgcaaaggtcaattcatttgcgcagaaagagaagggatcttccacagacatcatcattacccaagtttgctgagaaccacgagcttggaagtgccaatatctttatggatccatctttttacacaaaagcaacagagtctagttctacagaaaacaaaagttcatcaaagcctccaaaatttcttggggaaaatagtagccgtcgaccacatcatcgtactgtgagtatcttattgtccattttatatagttctctatccactgtccactttagaaattgcagaaccacatgtacatgtaccatactaccatcctaaatatttactccctcagtcccctaatataagggattttgacattttacttgcattgtttgatcactcgtcttattcaaaaaatttgtgcaaatataaataatgaaaagttgtgcttaaagtactttggataataaagtaagtaaaaaaaataataattccaaaattttttgaataagacgaatggtcaaacagtataagcaaaatgtcaaaatcccttatattaggggacggagggagtatatgacaaatgtatagaagacatgatggctggtttaaattctgaaaggtttgatcaattttgacttttcgaggattaattgatggcaggctgtgttcgcctcccgcacacgcaaaacggagtgactcattttcttataaataattaagtactccctccatttacttttgatagtcatatttccaaatctgaaaaatttatttttgataggcatatttcaatccaacaacctattctcttaatgactttctcggatttaatgcgtgactctctattcttccacacaagattagctacatgggcatcgagaaatgtaaatattaacgaatcgcttgtttgcgaggaataactagtagcatgtttaaatggatgataagtagaattacttatccttggtctatgtgtcaagatgaaatatgactatcaaaagtagatggagggagcatttattattattattattttaaaaatggattaatatggttttttaaaagcaactttcgtatatattttttttgcaaaaaaacgcaccgtttagcagtttgaaaagcgtgtgcgcggaaaacgagggaggtgagttgggaaagttggggaaagaactcagcctaaatggatctacatgtacatgtgggaaatctattctcatatgttattttccaaaggcacagacttgtagtttctggaattgcatatttatatgttgactcctatactgaatttgacaatattgctttgttgtgtatctctaggttggcctacctgttcaatatagtgatttctttatcaccagtttgggagaaatcgataaaaggccaagctaccataattcctaccagatatggccagttggttttacgtcttactggcatgacagaattactggttcactgttcgagtgtgaggtgtgtgacggagggaattttgggcctttgtttaaggtgagaaggatatcatgttcagtgttccctcttccagatgcatcaacaattctctctcaaaatagtacaagaaaggctgagacaatagaaacaaatgaaaacaacactttgcttgaagatactgctaatgatacagatgataatatcttaatgctcctatcagactcttctgagaccaatcaagatttgttatcatgttttagcaatgatatggagagcaaaatgacttctttaggttgcaatgatttgcatagttcaaataggtcggtaccaacagtaccgtcacactctgggactgacaaaattggcgagtttacgtttgagg

SEQ ID NO: 9131 - DNA, 16144 bp, Oryza sativa
catccagatccccatgttaaacgagcgcgaggtaccctctccctcccgccgccattgccgccaccttcccttgcttgctttgctttctctctctctttttttttgagttcttttgcttcgagatgtggaggggtttacttactcacgatgagattatacggaattattattcattattattattatactttttggtttacttactcatgatagttattaaattatatatatttttgttttacttactcacgatggaattataatgattatattttagtgtttttcggtttacttactcattctgatttacttactcttcataagtattaattattttttggtttacttactcacgatgggaatattgtaatcgtggtaatattaatcagttaattactgtgtgttgtgtacgtgttggggggtgtaggtgtaccagctgtcgatcggggcggtgtgcgggctatcgtggccgtcggatcggctggtggtgcaggtgctcgacgactccactgaccccgtcatcaaggtacgtactaaaaacacactcctcctaataattcactcctctgtaattaaattactaatctactcctgtcctactatacacttaattactgaaaggcctagcctacatagcagcagcgtaattaatctcaaccccatcgccatgtgtacctgtcggtgaggaagactgaagaaaaagaaaaaaaaaaacctcttgctgtcggtgagtgagagtcaaatcgtcaatggagtgaggctgtctctttttgctcttttggtgaaaaggaagggaggaagggcaaaaaaaagccgtgaagctggggcactctgccgctgtagcctccgaccaactttctctctttcctcctctcgccacgctaccattacagttggtatgcaagcgaaccgaacccggcaatctacttatacgataaataagtggtaacctatgaatttttacatcatgattggatttaccacacctagagatataagtagtttgacctataaatctatttataagttaaattagtaggcaacctacgagtaattttgcctataaacaggttcatgggttagcccgcttgccgtccctacatcacagtacggacgccacagtacagtgtgtggctagctgctagtagctctcacactcttcatcactgctttagcttgagaatttgggtggaagctgtggccataggattcgattcgtcaggggggtggatggatcactgcatatgaaggatttttgggggcgttttttggttctttattctgtggattttagtggggggcgtattgtctttatttgtgctggtttttagtgcaaaatggcgggaactctgcgagtttgttatttccaaaatggtttaaatatgaagccggcatgttttttaggtttatttggaatatgtggattttttttggggtgtgaattctcattttcagctaggcctttatattgtgtatagatggccggaagagcaagaaaagtaggtttacttcaggggaggataaacagtacactagctatggcatttttttaaccgaaaaattaaagattatctcttactgaatcctgacagcagaagaatcatgtcactaggcagtagtttactcctgcctgtcattactgctaatcacttgccatcaccgggatcaatgggtaagcggcgtgcaggccacgttgtacactgaaacggccatgttatcgctggctattttcccagtactagcactagataggtgtagtagtagtagtagtagtagtacaattgggtaacagtgtgcataagtatgtgctgttactgtcgataaacaagacaagatacttggcctagaagagctatattaaacaacttgtgtcaattagtactataagctaagctaggatagccatcatcatcagcttatttctaggttggcccatgcatgctagtaatttgtccatttggtcccatgcagaagctgcaattggcttgcaacttaccatgtatcattctcatgttaagccaagcagtaataagtactaaattcaccttgttgttaatatcatattgatgtgattaaattgttgttgggtggagatcagtatgtggctgacaagtggggccattttctttttgcaggagatggtgaggatagagtgtgagaggtgggcccacaagggggtgaacataacgtaccagatccgggagaaccgcaaggggtacaaggctggtgcactcaaggaggggatgaagcatggctacgtccgcgaatgcgagtacgtggccatcttcgacgccgacttccagccggaccctgatttcctccgccgcaccatccccttcctcgtccacaactccgacatcgccctcgtccaggcccgctggcgtttcggtaagtatagtataatcgatatctatcccgactctacatgtcatccccctatatctcgtgttgactagacatttgcgtgtggtgtcggttggtgagtgattgggggtaaataagggatctcatattccgcgaattttatatagtcggaatattgtccagttgatctgggccatttatgggtgatctaatggctgggccgtgcgatcgagttgttggttgggcgagtgagagtgagtgtcacttactgacggggcatgtgcagggtacgttgcacatttctgacagctactagagtatataagcttaagatcctcgtgcccttgtctcatactagcattgtactggcaactaccagcatcttgctagatcttctcatcaatcgtatcgagccggatctctcaatccgatcatgatgattatcaactacctcattcgttcaaaaatatggttattaggatctcatcgtttggcttattcatgccaaacgaaatatttgaaaacgaaaaataatttataaataaattttttatatacatatttttagcgataaaaaagcaaatgctgaaaaataaactttgacgaaaaaactccgaaatcaactacaaatttaagattaaaaattgaaattaactaataaacataagcataaacgaaatgatgtgaccgatagatttaggtgatgttaaatccaatactaaataattatattttaagatggaatatatgcgcgtgtcgccgacgatcgccggcggtgctggctccaccggctgggccaggggtgttgctatcgccgtcggtgatcacggcggcatggagggtcgtcggtgattgcgtctggcaattatgcgtcccatttcttccgggatgcaaattgtgttcacatattattttttagggtttagttggtacttgttggtagggtatgtggcagtgtggacttcattaagtaaagatgatggagaagatccacgtgcctcgtacttctatgacgactcgcgatagcccgaccgacagttagtaagagctgaactttggtcatatgacctaaaatatcattttttatttataataaattaaaatccgatctctatatctaacatgattgtacaaggtcagacctaaattaacaattggtttataaaatataaaatattataggattatggtcttataaacgttttctcactatatgattcatcaaattgtctggtgctattcgtttaaaaaaaagatatcagttggttcatataaacaccttcttctatttggttcctataaaatcctctaaagtaagcatagttaacaaggtaaaggcaaagatcttcttcacttaattagaactaattatatttccattagcattgatccaatcgctagcacaaacacgagtacacaaggaaagtaaagtacaagccccattccttccttggcttccatgcagtagaggagctgtgcgtcccagggcggctacgtcagcacagcagcagcttgtcctgacactgaagctgagctgagctgagctgacccatctcgctgcagtcactgtgacgtggggcccacccgtgctgccactgccgccaccatgtggcgtgtacgtgacgggtgggcccatctcgtcggtgatccttgagccctaggtccggccatgtcctgctgtcaaatgctgcagcgattagtgtagtaattaattaggggccgtgccctctgaagctccagcttaattggtccttctctccaacagtggtgtgatcaagttgcaattattatcaaagcatagcagtacagtgacagtggcatgtgagatctccagagttttggcacgagcagaaattgtgctgcgatgtgcattggatcctgcagctaaattcagagattagtgtggagtagtttgggtccaattgattattagtattggccactgcccaaggttactgtttagtagtagtggtagtagtactagtcttaatacagtagtagtagaagaaacaggacaaaacctgccaaaaataaagaaacaagcaaataaataattactacagaggacagtgcagtgcaggcatccacagttgcacaatttcttcacaacagtgtagcagtagtaaaatgtttgctactagtctggttagctgagaactgtttccaggtctctttgttttaatgatgtatatagtacagttgttacctgtcaagtatttctcatggagctatgatgttgatcttgtctttgaactatatgatgttgacattgtctttgaactacaatgatattgatactgtcttttgtttctaccagtgaatgcagatgagtgcttgatgacaaggatgcaggagatgtccttggattaccacttcacagtggagcaggaagtgagctcctctgtctgcgcattcttcggcttcaatggtaagcttcaaccttcagtaatttcatctgttcttcaccaagaactttgtctctgaagattctaggatatagaatatgcattctatgttatgatttttatacataagggctgattgattcggtgaattttcaatcaggaactgctggtgtgtggcgcgtttccgcggtaaacgaggcgggaggatggaaggaccggaccacagtggaggacatggatctggcaatcagggcgagtcttaagggatggaagtttgtctaccttggagatgttcaggtacacaccaatcatggatatcctacacatgatcagcttgagatagcatccaatgcatcctttgtcattgctcttgctaagttgctattgcatttcccttctttttctttttcttgaggaaatagtacattgattcatgttgcctaagagagaaaaaaaatgagtttaacaagaattgcgtcgttttcaggtcaaaagtgagctgccaagtactttcaaagcctttcggtttcagcagcacaggtggtcatgtgggccggcaaacctgttcaggaagatgctgatggagattgtgagaaataaggtctccccaaacatagtgccaagaaatccagaaaaatttaagccatgcagcttcttgggttggcatctaacatgctattattgacattgttgcagaaagtgacaatctggaagaagattcatgtcatctacaacttctttttgatccgcaaaatcatcgcgcacatcgtgacctttgcgttctactgcttgattatcccggcaactatctttgtccctgaggtcaggataccaaagtggggctgtgtgtacattcccacaatcatcacccttctcaattccgttggaactcccaggtaagattttcttttgattttattataatcctagttgaatatgatcaacagtaatgctcctttggtgaatcaacagttcatgattgattgcatgtttagttaacccaaggaattgaactgtttgcaggtcttttcacttgcttttcttctggatcctctttgagaatgtcatgtcactgcatagaacaaaggccactctcatcggcctgttagaagccggtagggcgaacgaatgggtcgtcaccgagaagctcggcaacgctctgaagatgaaatcatcaagcaaatcatcagccaagaaatcgttcatgagggtatgggacaggtaagaaaaattgatcagaacaaaaactctgccaaatctttataactgttttctcagctcatgattcactgatttcgagtgacaatttcttcccttttttcaggctaaacgtcacggagctcggcgtggcggcattcctcttctcctgtggatggtatgatcttgcattcgggaaggaccatttcttcatctacctcttcttccaaggcgcggcgttcttcatcgtcggtatcggatacgttggcacaattgttcctcaatcataacagaagagaagcaaatatatatattttcgagatcggccgccttcaaattcaccatgtcttcagcaagagtctagtagttatataaatcagtttgaagtaaagatcatgcagcatttttttactctcatttttctctgtttcttttcttttctttttcttttcttctttgcctttttctctgttatgtgctattgtaaaaaatagtgcagtgtaaggtcactgcaggaagaaaaaactagggcaattggtgtgatctgggcaaggaggaggtgaggaggatatcgtgatgtgtttttgcttgtagcaaagtacgtgagtggtatgcttaaagaggagcaggatgactctgcttccgttgtactgtaataacatacagaaaaaaaaaaggtcagacaagtgctggacaaaaccaaaatgttcagccttctctcgcattccactacatcttttattttgtttccttcgcatgtgttcttaccacttgagctaaaatgacatcaaagtagtaatatttatttatttttttgtcgggaagagaagtacagtaacaacattgtaaaaaaaaggggggaaatgtacagtaacataatacacaaggtactactatacatctcttaatgaaaaatactcacgtgcttccttctcaaagacatgaaacaaaaagcaatagtctcccaaacagagaggctacatcaagtaccagagcaccgtgtccgtgcaccacagcaacgtctactacatctaagaagacatggagatgcgtccaaaaaaaggacacgaaaacgtagcaaacatgccacataccaacatactttttttatgcagttaggagttagaaccttcattcgctattttttttaattaaggaaaaatacattcttgggctagaaaattacaaagaagttaaaagagtagcaacaataaacaatatcagaagcagatgatttttcatcattcgttcctttcccatcctgacaatctccgtttttcactaaaatgaaccagaagaagatttcacaggatgggatttttcgttaccataagcaaaacagaatttgcagaattagaaaccagtgagatattacgaccactcgctcaggcagccgaatcattgttgactaatcattattggtttcagttcagtttagttacaatcaaaattatatctgtcgcaagatgaatctacattcctatcagatgttgcaaacttgccagaaacatcaaacaaatgatcaatacaacgccccagagcgccccccctaaacacgacataagtacagaccatgagaatgagaaactaacacccgctacactacccactgcggctaatagagtgaaagtgggtagaaaatgagacatatcctccctacctgacatgtctcctctatctcctatggaataacctctacaatgaatagggttagtccaacagagaaaattgcaccgggtactcctggcggatcagatcaaaatgccagcacttgcaggtgcctcaaacaatttacatggtggcatcaagatcgaatgctcgcacatggagtaccaattcttccttctggaacctaaaaccacaacagaagtcgaaaaacggtaggctggtagatacgaggtaaaagaaaacacagtcagggttgaactcttgcaggggtaccggaacgatgtctaccacgctaccctccttaagcgacgacataacagaagactttgtatcatctatcatcgatctacttgacagcaggataatattcttttgctgcccgagaggcttctaactttggagtctacaacggagagtcctacattatgatgctaaggattcaagctctctcctcctcctcccacctctgtttccagaccttgtattgtcagctggctcaacgcttggaacttgatccttactgtagatgatacaatcatctagagtgtagaccctgagcgcgagtgaggatacagttgatgtcttcatagctgctgtgaaggaagaccagtaccaccaatcgttcttcaagaactcagcttttatcatgccctccaacaagttagccgccaaaaccatctaaaagaggatggatgtcattaatcaggaaattggataatgcaaaagagctctcaagtaataatttatactgcatcttcacataatgaagttaaaaaaagaaagggctaaattatagctcaggtcttggtggcccataattcctgtatcctgtttacttgtgtatctagacttacaacttaggaactaaccacttgaatctagacttactgctaaaaattttaaataaatggatcctgtataagtaattttacagttaaattgaactgttgcagacacaaacaaagacatggtaaattaacgctgcatgcttgagagtatatcttagaatttcggaacactatcaatttgatgaacgtaagccaaatgcagtatgccaagattacacattaagctacatagatatatttctgtaacaaacagtgaatagatagattaaggtacctgggatattgattctgcatctttgacaaatgcacgccatgaacgccttcttatttgctgacactttgaggctctcagtgcctcctcaggcaaggctgcttcgatgtcaagcaagtttatcttttgctgcttaagtatgtgagagtttcgtcctataagaggcctcaaggatgactctggaaccaaccccccattaacagctagcaatcgtgttggcttgcctgttgtagaatgtgcttcctcaccagaagtattatcaggggtgggctttttagatttttgcaccttctcatcacccacattgccaggacaactttgaccagatttggaaacctcttgaactagcttttgagcagacattgcattgcattcctctaaagaggaggtccaatccttgagttcatcatcttttctgttttgactttgtacaattgcaggttcaagaaaaaatgcaggtgaaggcacaaatgatggaactccattggacccattaagtccaatctgctttactgtctccttgttcgaatcatttgtgacgaactttctgcaaatttcttcaaagtcatatgggcattgcatcaattttctgtcactggacggttcaatgacagagctacattcaagggaatctttttccttcgtatcagatttggtaaccttcacttttggctcatcattttctctgctttcatcaggagactggtggattttactgcattttccatcattatgcccctcaaactctgtagatatgagataagtctcatgacatgttaaacaatggtatcgagaaggccatacaggttccaaacagtcgcagcgatatgttctatcttcagaacttaactttatcttctttcctcgctttttcggtagatcacttgtgtcctggtccaattgcagaccatacttttgttccaaaattactgcagccttggtatttggaagctccataagctgttcaccctttggaccagaaattggaggatcaacgagaggagaactgctttgatgacagaaatgtctttgccactgcaagatagagtctttcagttccttctcccttgggtcatagtctcttaaccagtcaagaaggcactggatttcctcatcagattcataaatgaaaatagatgctgaattccaacctttgcaatcaaaagcagatgggggataactgttaaccatactgatatctctctccttgggtttcagcatgcttccatcagccaccaaccaaggacgtttacccggtcttcctataacccagtataatcgaccaatggaatccttacccagacactctcttctcgatgatgccatattaatctgtgactctagtaagctaattgaatcctgcaattttgaaatgtcatccgataaagtatccatttcattattatcagcatcaagctcaattgatttagttgatgatgcttcaagattatcttggaatgatgtgctggctctttcatcaggcaactctcttccaggtgtgctaaattcagtgtctttcaagttcaagttatcacatgtactgctcttggcacctaatgacctcttctcacaactctgggacccttcatcaatagcatccccatcaatctggtcaatagccattcctgatggttgttcagaaagtcctgaagatttgcgttcttcaaccatagatgcactggatatgtctttgtcacttttgtaaggcttgcctacattcaattgcccatcaggaaccccatcagctgggttgtttaggttaactccaacattaccctgttcagcctcttccagatggtccaatgctgtgggcgtgcactgctgttgattttccacgggtccagaactgttgttaaaatgctgttcagttttactagatctactttgtctagcatatgaagtcctcatctcctccttatatttcaaatctttcaattcaaaatttgaagcacggaacttctgctgaagatcgcctaacttatctgaacattgatctagatgttctctaattagagcagtgttgagcatttcgtcgcatagaaatttcagtaaatatatcctctgcatttcaaagatcacaataaaatattaaaacaaatatgtaggtcactttgtcaactatggaaatcagcataccagcaaatgcttaggcaatcatagtattgtacagtacaataatagagggcaggactcttaagtaaaaaatcaaaccagactaaaattgtatgcaatgtccatgaaatagacatacttataacaaggtatatttgaaatggtaacaagaactgtatccagcagtatatatttaccactgagaaataagaaaaacacatcaattccttacgtgttgcttaacttggatgtccaaagcaacaaaacattgtagctactatactattccatggatgacaaaattaacttcaagctccaaattattgacctgaccttaagtccttataggtttaggggcctatagcaggtccaactttgtcttgtatcactcaaaactctaagaagcttattttgagtcattattttgggattgaggagcctcttggtttataccacacattaacaacagagaagcttacttcaaatacaaaggaaaaaagaaaaacaaacctcttgcatgttaaggtcccaatattccttctcttccattgctgtagctaatttattaagttcctcttgaaaggcatgggcttcctccccaacaaatttcttttgctgccgtttcacatcttgaacaccctgatcatgatgtgctttcgtttgacctaacatacatgatggacagtaccagttcccttctggtatacgggctagtgggggattcaagcagtaagtgtggtattctgagtcacatttgtcacatagcagaacactatcatcgtccctatcaataccacatactttgcaaacgccatcttcccatggagctttaggtaagctgttcgctgcagttagaatatcatgtagctcctcgtgcatttctgaaccagcattcttgtccgagaggtatttgtcaaatttctcaacaaggtcaagcacctgcaccagccaagtagaagggaaatgagaagataaaagacttctacataaccctgactataatgttttaaaatatgaaactataaaaaggatctatatattcgaatcagcattagcaatcacatgagataacacacaaagaggtggttttttttttcaagtaacaataacattgtttccatcattagattatgaaactaaattggataggtaaactaaactgataatcgtttacaacaatggtctgaccaatgtagctcaagggtgcaatgaatggtgacaaaacccatgaatggaaaatgtaatggctattggtattttgtacaatatctagttattgtgatggcatttggaggaacaataaagctgaacagaaaagcaaagatgcaacagaaaaataggattaaccaacctctgtcttgtacaatgactcaaaactctgagacaatgcaacaaccatttcaagcacatcagggcgatcaccaaatgcagtgtgcaggttgcgtattacctacaggaaagcataatggcagcataatttgaccagggaacttcttgcagtcgaagacagaatattaattagaatatgtttcagtatttttgcactgctcaattagttatgcaaatgaacagctcaattttacatgtaaatgagcaagaattactatagtaggttcacaaaatatcaccataaaaaattcacaaaataaactaactgctgttccaagttgttacaacagtgcaaacagaattcattggatccacattagcaaaacatacatgaaaaatcttgcaaaatatatcatgtgcatcataattgaataatattataaatgttaaagtaaaacatacttcctggacatcctcaagaaaagcctcccatgatccatagtaagctcccatagccaaccttatatcaattgtgcggaagtccaaagggcgggacaccataccagggaatcctagtatgccttcatcctcattttcattggaattcactagagtagttccgagcaaattcccaaaaagtttggattcatctgaggaaatagcagagcgcagggcaatacggcacttcttcaagatagcctctgagatggaaatagcatttctctcttttcttggcttttctggattatgtggtacttttacacgacatgcttctgtcaacacagatagaactgctttctgtaacaaaaaaaaaaggtatgcaaccaaacaatattttaggcatagggataggaacttcttaagaacaaaagaaacacaaaatatcagcatggacatcaaatttaatctaatgccagatccatttcttttgaatgatgtttaagcatggccttgccattagatcactttttggcatatacactactccctccatctcaaaatacaactacttatgccctttttttttatgagattaaggtaggggtgaggaatggttgtgataagttgagatgagaaagtaggtaaaaaattaatgggaaaaggttgtgattggttgagaggtaggcggagaagtagcaatattgtgagacggagggagcatattagtagaaatgcaatttcaacacagagctaatgtcaacatttttccagctaaactaagccatggaagcatcaagcatcatcacatcagcagaaaatccgacacagtcatgagggaaggcatgtgagctgaaattaagaaagttaaaacgtatgacctacagctacaagagctattaaaccttgactaaccaactagataaacataaaaaactcattggaccaccaaagcctctcatcaaaatcaaaggtcacagtgattgttctcatggggctcccttttttcatcacatcttttttagggaatacaatagacatagtaaaagcacaaactattggggagatacggaactatcatgcaatatgtattacatgatgtatgacaggaactcaacagatgaattaatgttgtatgccaacttggcaagagccaaacatatagggtacatgaggactcccaagtcctaatataagcagaaaaacacatggtaataaacctaaactaatatgagaccatgctttaaatactcttaacataaagcagtatgtgaaaatcattattttgcagaagattgagccatagttgcagggagcacactaaccttagttggtccagatgcattacccttgtagacctctttactgattgaatgctccaaaattttccttgcccattccggaggttttctctccaaagattcataaacgcattttctaattcgtgtccccacatttgttggtaattttctcacaggctccagtgattttgcccagtcaggcaatgttttattatcagtagcagacacctcaggagaatctaccatgtcagtatccttttgatccatcataaaaaccttactttcttcattcaccgaagatttgcatatcaaattttcagcctccacaagcagctgaaaatacaagaagattagtgtataaagtacagcataagaaaaattatattttctccttagagaacacaaggctacttaacatggagattgtatttgtagttttctttacacaactgcagatggaaatgaagtagaaaaagttacagataagttatatgacagacagtaacacattaacgcatccttccaggtcagatttatattcagaatgatgtagctggacatgtaattgctgtagctaggaaatctcaatttcagctttgttattcggaacatgaaaaaaaattctctagtaacataagagaaaaataagaattttgtcgccataggcatcatttaacagcaaaaatctctaaaaacaggtaaaggggctccctatagaaccataggaaatatcttcctagatttggttaactgattatcctgcactgataggcaacatcctttcatctattattcatagaacaacaaacataaagaattatacaagcagaataaggggttctactgttctccctcaagataaggtaaaagtgttgatatggttggtaacagagaatgttctatagaattataataatgataaacagtgcagaaagttcacagcatattatgagatatcaaaattttttgtccagctagctagttttgctagcatatatcttttcctcacaacttaaaagaagacaaaatcgtataagggtagaaatataagtaaaaaacttgataatgtttaaatgaatgagtggaaaataaaaaattgaagaaaaacacgaagagaagatagcaaataccatcttatatgaccgaagcaagctaaaagttacatcggcgctactaaaaaaagccaacattccatatatgatacataaaaaactagatatattcatcataaacagaagttcagctaaaccaagaagcgattccttaccaacgcatccttttccatgccagcaaccccaggtagtgcaccacacagaataccaccatcaccttgtagacagcggaataatttcactccttctcgacttgaaatatcagataaatccatgcacccacttatggacgaaatggctaaaatataccttcttgccaattccggccaagtcaacttgttagctgttagcatgtcaaatttaaattcttttgctgaaatgagattctcagtgtctttctttcttccacgcctagtttttgattctttaggatcaatgtttggatctacaaaaattgcaaccttagataatagctcaccaaaaagaaccctaaagagtgtaaggtgaaccccaggcaacactacgccactgcatcttccaagcgtctgagctgccgatttatcttgagcagctttcttcatagaagaagtttcaacagggatgaacaaagatacaatctcttcattactggttagacccgattcaccatttgaatatgatgtagaaacatttgcaggggaattaatcggcgaagtgtgatccctgtgaatgtcatttgataacttctctttctgatctgcacaaattggccatgggtcaataagttcatcttctagctgctcatatgaaggaatttctttcaggccaattatttcagagaaacgtcccaggaattcccatatctacaagaagattgcaaggaatcagatgcaataattagtagatttggacaagtgtgtacaggtacattcgatcaaatagaagagaaatggaaaacatatgcatagagttatacctggagaacctctcctgccaactctggcggaagcttattgctaataggacgtcccagaggaagttcacggattctaaaacccactaggctgggtatgatcctgtagcccagtcaccacagacccatgtctgccatatgacatga

SEQ ID NO: 9132 - DNA, 2296 bp, Oryza sativa
gaatgcattaattgcataaatgagagtaaggtggtgtttgaatctcctgaagatgaagatgaagataacgattaagtgttttacgcaaaatgaggtggtaataatgtgtgattaattgagttttaattattacaaatttgaaaaatggattaatctgattttgtagagcaactttcatatagaaaatttttgcacgaaacgcaccgtttagtagtttgaaaagcatgccacaagtatccaaaatttcatccaactcttgttggagaaacgaacgcagcctaagagagaggagatgaaaaatttagccaaccttatagctaatctattatacatgttaactctaatgtgggtttataactagcagttagctctactattaaacttgctctaaacttattcttacatagtttttaggttgttgggttacagctggaagaaagtatgaagtttgtccaatgctgaacttattgatgtgctattaataacatactgtgctttgattttaaccttttactatagtcaaatttctccttttctgtaccaacaggttgctccatttaatacctactacccacaattgggtgaacatctggcaaaagttggtgtggatcctgcaatcaataaatgggaccagccttttgtgttgggagttgttgatccgcacgattcattatcccatcccgcgggggtttctgatgttcaggctgaatctgcagctcgtctagatcctgatctattcacaaactttatggtacatcatgtatattttgggccttctgctttgctaaacttcatgaatataggaagacagatagacgaatttattcaatctgcaccatattattttctgctggctgtcttgatgggattggtgcataacatggcatacattaaaactcattcattcatcttgcttgcattgtccatcttatccactgcacttgaatagagaggccattttgcaaacacatgctagtagtggtggtagggagctgctactttgttaaagtaggagctggtgtttttcttttataatacagctaactttttttttctagtacagtgttgtatcatgactgttttcctcctgcagattcctagttggtttgggactgaagtgcaagaacctacaaaatgctgtccttttccattgcctgaaatttattgtgcatcccagagcaaaaaggtatggtgcattgttaaattcatcaaagcttggtcttcaggtgctcttgctctgacttgattaattctaattatgtcccctactgttcttaaaaaaaactctttaaaggtcattgttcagacttcggactacctgcatgtgcattgctaatttgtctatacttgcgctggtgcctactttagaatgaaccctcgaattttttcccactccatgactttgtgggcttgtggctttatgtacaaattgaacaataccattgaaataattggtgcttcgatattcttccacaattcgcatgtctaaattgtagtagcttagtgtgtacgaatctagctgcattagggatgctggagttatggagcacaagatctggttattatttgtgaagtaggagaaaaatttgtcctgttgtttttaccactgacatttgcctcatttagatttttctaattcaactctgtgtttacaccattcatattcagcttgctgcactggaagatattaggaggactattcgggagctgcaaattgatgacaataggaagaaggaattgacaaatgccctccatgcacagttcaaagattggttatatggtaagttttcatctgtacattcagttgctaatgcattcatatctcctttatgcttgttttagtgccatttgcctatgatggttttgcctaagtcattagaattgcaccttgctttctgaaatttagtctcttcaaagaaacagtgtcaagaatcaaattgtttgctttgaccatacaaacaaatttgcatgaatggagcgctcagtaatgagtaattactgctcagcatgaggattcttatgtactgttgggtagctacaatcaaatgtgcacactaatacagtacaaacctgtcacaagaatatatgattgggtcaacctagtagcttcaataagtgttttttttccaatataggtgtagtatagagtatgacggccatacataatgaacttgaaccattattctgggcttccaattccacatgattctgaatccgttttattcagcatgtcagctggagtattaagtacaacatacctacatctatactactttaaaagcctcttgtggtggtg

SEQ ID NO: 9133 - DNA, 8614 bp, Oryza sativa
tccgggttgataatattagtcgttttgaatagggcaaagtcaaactttaaaatctttgactataaataatttctaaaatatttatcttaaaaatatggaaaccatatgtgtagattagtcttaaaaagtacttcagtaaaatcatatatttgttgatattcctatatatattataatagaaaatagttgccaaagttactttttggagaccgtgcacttgtccaaaacgacaagtattatcaatccggagggagtggttctgaagaaataactagaggaacatccctgcattgccactcaatttataatattttatcttaatacaggtttttactgctgctgctgctgatgatcgaaaaagtattgtgctgttggcatttgaaaccatggaaaagattgttcgggactattttccatacataactgagactgaaaccacaacatttactgattgtgttaaatgtcttattacattcacgagcagtaaatttagcagtgatgccagtctcaatgctattgcatttcttcggttctgtgctgttaaacttgccgaggaaggatttgtttgtcatgaaaaggatacagatcaccagtcaaataacttagatgtttctgatgggaatgccactctgcacaaggacgatcatgtttatttctgggttcctctgcttgccggtgagttattttttctgtcacaaaactagattggtctttctgcgttagtcgattttgaagtgctttgcgcttgtaacatagttattgctttatgccttcaggtctagctaggttgacaactgacacaagaccaacaatcagaaaaggtgcagtagaggtactctttgacattttgaaggatcatgggcaccttttctcgcagtccttttggagaaatatctttgaatctgttgtttattctctatttagcactggtagctctacaccaaatgggcacattaatctaactgaggatgactcttggaattctgaaactaaaacagtagcagtcaagtgtttagtggatttgtacattaccttttttgatgagatgcggacagaactttctagagttacttctgttgtcacaaactttatcagaagtccttataaacagtctgctagcacaggtttatctgtttttcagcgtttaacagaaggacttgaaagcagactctccaaggaggaatggaaagagatcttgttatgttttaaagactcagcaatgcaaacatttgtcgtgtttgacaagatagttaggatgatgcaagatatagaaattccagatagaaatgaatcttatcctgaagttgaacgatattcagataatgacatatacaatgatgatgaagaggaagctaatatggaaacaacatcatacgctattattaaattgaagaatcatatggcgcagcagctcttagttgttcaggtacttacagtttttgttacttctgtcaataattcccttatgtaacatgccctatatttaatttaatactatactttcctttggccatccaactaaaacagtaatataacaaataaaaaatagtcttcccacatgttctacatgccaacaattgttctaagatcaaactcaccactggtttcttttcagggcatagttaaattgtatgagacacacaggtggtctttttatgctgagcatatgggaataattttagagacactatcagccattgcgtcacatgcaagtgaagtgagctccgaatctaccttgctcatgaaattccataaagcatgttcccttttggaggtgtctgagccagcagtcattcatttcgagaatgagtcttaccagagctatctcaaacttctgcaagctttggttcatgaccacccatcaatctcagaagatatgaaaattgagtcacatattatgcttgtttctgagaaaatactacggaagtatctcaaatgtgcagggcgtgaacgatctaacgattcatctggtagagatccagcattacgctggaaactgcctttgggcactgctaagaaggaggaactgtctgctagaacttcattggtccttcatgtgatgcagttattgggtggcctagagagggactgctttaggagaaacctgcccctgtttttccccttattaactaacctcattcgctgtgagcatagctctggagaagttcagcttgcactgtatgatatattccagtcatcgataggccctataatatcaacatagtatatatatcatttgttcagcggttgtacaatttttccattccaatttcataaggtatagcttattgatagtggttacatgagaatataagataagaaaaaggtaccagcttggcactgctgtaaatgactggcagttggaacctgcgccttcagaattctgtttgaaggtgaaatcttttttctggttcttcacaacttaatatgttgaaactttcaactaaaatgtgggattaatcgtacaccatttgttgcagcatcatttaacatcgacccaggtgcctggagatggtcttttgaggctcatttgacattctttttctaacatacatttcaattcgatgggggttcagacttcagaggcaactgaatattggaagttagaacaagtctttctgacttccaggtctgctgaggttttacaaagaaatggtttgctcacgaatgacaaaaattttggcatgtagcattttgtcctttgtattacttgtcttttgtatagtattttcttcagaaaagagactttaaagtcgtccatcaagttgttctttttttccgctttaaatttatatactcgaattgcaggcaacatgtatttgtcattcttagtggaaatggatcaataaatgaaagttgattggtaacagataactctttgttttacagaccagtgtggaaataatctgttggtttatttccctttgtcaggaaaggataacatattatttttagtttagacaaggataacgtattgcctagcattactaagttacttatcatttataggccccattgaagcatgatcatccctacccctagtggtagttgaactattttctactacattcgttccaaaatacaaaaaaatttagggttatacacggaaattgctcagactcatgaactttgcgagctaaatctcaaatactaattcgtaagcttgcatatgtatgcaaatttctactgatatcctagtagactagcactggatttttcataattcggtcctcttgagaaacttatttcgcaaatagactgctagaaaaacttatcccagaaacggtcatttttagggcgctgagtcattggcgccgtggtccaatggcacagcgtaatcatctctgccgtcgtccccatgccactatggagggtcggcgctagggatggcaacgggtcaggtcaggcacgggtagagcaaaaccatgcttgaccccatgcccgtcttgcccgtccaaatcctacccactagggttagcgggcaaaactctgtgcccatacccatgcttgatgggcacgggtatgtccggcgggtacccaatgaatctcacgtaaataataactctaaagatatataatttaacaaagagaaataaaattaacaatttaccaaattatcagttatcaacaataatttgaattacattacaacttattattagttagtatcacaaatgaaccaagagaaaggggtataagaattaagagataagtcaaaattagctaatacatatgtatcaggtcgggcgtgggttacccacacgtaaaaaatgaaacccagccgttacccacgatatcttcgggtctcgggtgggcgtgcccatagataaaaaatcgacgcccgtacccattgggtcgggtatccacagatacccgaacccatgggcaaaattgccatccctagtcggcgctgacgtggcaggggaagcgcgccaatgtctctgcccccccaccccccacccccaccccccttttttttcctttcctctctactgtagaagagagatgtgcaactttttttttctttccttccccgttagaccacggtgccaatgactctggtgctcaaaaaggaccatttctagaataagtttttttaaaggtctatttatgaaataagttttttagaaggaccaaattatgaaaaatccagtagactagcaggtatccaaatgataaaacaatatgaggtgtatcaaatattcttcttatccctcattatttgttaatgccaataaaattacaacttcttaaagtaaattttatataacctcagaaattatggtcctagatacacggtgacgtacaatctgagctcgagcctgatcaagctttagctgagctgagctcaaatccatcccaattgagtttcgaggttgaaatgctcaaacttgtgccaagttcgagcctaaataattggggtttgcctaagctcggctcgttgacatccctagtttgagggatgtagtatatgtaccgcccatcaccacaaaaataaggagtgggttcctcatagccaatcaagaatcacccatgatataataacaacaatggtcaatgctgataaacatgtatcatgtatgtcactagaagccatcatcctctactttttgttttgtaccatgcaagggcccaaccactcttttgtcaaactaatctttgataccttcgaagtcacaatccatgacaaaaacatcacctaattcctaagttgaaaatcaccgcctaaccatgcatcaacacgcaattttcaagacccccaagaaattgacatctatctttctttccaacatggccagtaggccatcactaccagcaaacataattatattactatgtaattttattcatcaaaattaacatcatttttgtacattcttgatggaaagcattacgcaacaaaagctagcaaaactgagatatacagattaatttaagctactgcacatcacaggatgagtgaacttcgtaacttaattgatccactaattttttgcgaacgcgcaaaaggattgcacgtcaatattagttgatccactaattaatcgatgaaaattcactagcaagctgatgctgtagtaggctgcaggtatgatctcttgatgaactccaagcagtcggcaatggcctccgcctggaaagagctctcgccgccggcctccgccggcgccgccagccgccggcgccggcagtcctggctcagccgctgtgccctcatcacggtggtcgccgccgccgccgccgtcgccggcgaccacctcctcgggcagcaattgagctcctccaggcaccggagcagcagcccgacgacgccgaacagcctcacccgcagccggagcaccgagcccagccggacatgccgcacccgccgtccccggcggccggtcgccggccggcagctgatgctgatcacctgatgtgtcattacgcaagaagaagaagatgatgatggagaagaagaagaagaagctacatctcttttcagtttcactgacctgaaactgaaactgaactgaaaatgtgcagaagatagctagctgtggtctactgcttggccatggatggcctcttatatagcagcaaagctgcaacctgtcactctgaagttatttttttgtgaaaaaaatatattaaaattatgtgatctagaggtagtacacaagtacacaacacacttggtgtgggcccaagctggcagccattgtgcttctttaatacattatcacctggagaaaccacttgtcagttgtcatgctgtgtaggatggatttctctctcttttttttctctcttctcatggccttacctgccctttgcaatgttttttcttagttgaatatatagacatatagttgatgtccttcactagtaatatagtatggctacttctgccctctgaagatttggacattcaggttttgtggatggagttgtctatcagacgatgttaaatctgcgtgcccctaatggtttcgcgcattgttaattcgacaaaatggagattacaatagtgaggattaagagctcaacaatatgattttgctcagatgtttaccaaccttgtacttgtgagttgggaattctgaatatttttgtgcctttgttttgtgaggttgagactttgtctgatcactctcagcctcacacctctgttgcatcactatccttctggaaattgaatctgaaaaatggcaactattgctatgtgatttcgtcatgtcctgcactttatgctggcaatggggaccttgatgagacatgaacaaaatttaagcatttttagttccatggcaaacatgttttcgccatgtcggcaaaacaaggttgtaactaaaatacgtgatcttgggcccacttgcatgacagttttcaatcacgttttggtgtttgtgacctgatgggattaatatttaaaaaaaaacagtgtgaattatttggagaatctatttcatttatgattatttatttgaaacaaaatacttttaggattattcaattccaagtttagtttgtttgtatgtcgattcaggaaaagaaaaaaaaaccatagctccactaaaatttagcaaatgatcagatcaccactaacatgagcatatgcaaccaaattaagaacttcttattgctttttgataataccgaaggtcaccgcaatccacatcgaggagttatagtcaaaccagagtacaagattacaacattcaaactctcaaagcaaagcctaataaggctctgcttcttgtctaagctttagaggtttaaagcttattttggcaaaatgtcgcatcgttcaaacaagtcagtaaaagaaatgcagcattgcaccatatgaatactgcttaacaaaggctgcttaaaagggaagttgtgcagcggatttttccattagcagttcagcttccctgttaaaaaaaaaagtgtgattaaaaaaaaactgacaaagaaacagaacctgtggtaacataataagttaaagtattcttactgcgtggggtttctgcgtgttgctttcctaagctttaggatagatggttttgaactctttggcacttggggagctggttccctaaaattaacgaaaaaggaaggtatattgaaagtcgtgctccctccgtttcaaactattagtaattttaattttggtcaaagtcaaaccacttcaattttaactaaatttgtagataaatatggtaatatctataacaccaaattagttccattaaatctatagttaaatatattttcataatatatttctcttgggttaaaaatgttactcttttttttctacaaacttagttaaacttgaaacagtttcactataatttgaaacggagggagtacgttataaagttattttttaaaaaaaaaactattcaaaatcattaacaagtccttgaacgaaaaaaaaaatctcaagtgatgtccatttaggaggcctcacttagtaactttcttccgatatgcttgtgttccaagggtatatatggcaggtgtttatataaatttcaacatcaattctagaatttttgcatcagtatcaccacagtcaagaacctccaggttcatatagatttctatttttttatatatatcgattacatgttagtcggtaaaaccattatctaaaaaaaatgttagtgggtaaaaaataatagcctttttgcattttaaccctaggtttgctttccttaccagaaaaaaaagcgagggaatttaccgtagtagtatacccaatcaccccacacttagcaataaactaacaaatcctgatttttgtgtgttttcggtcaactaaaattagtcatataatgaagccctgcctgagcaaaatccgttgtagtctagctggttaggatactcggctctcacccgagagacccgggttcgagtcccggcaacggaattgtttttgtttttcatcctttcgctttttttccccacaactttttacgctattctaatcatacaaacgaataagcatatacataggaccgctttctttaaaaaataaaatatacatgtgaggaaaatggattgttattatggattcactccatctctaactacaaacattgacatacccgagttaatattcatgttcataactagaatttgatttttttttctccgattgagagagtactaagtaaagaacaccagctttcgctttttctttccaaaactttttacgctattctaatcatacaaacgaataagcacatacatagggcagctttctttatgaaaataaaatatacatgtgaggaaaatggattgttattatgtattcactccatctctaactacaaactttgacatacccgagttaatattcaggttcataactagaatttgattttttttttctccgattgagagagtactaagtaaagaacatcagctttcgcttttttttccaaaactttttacgctattctaatcatacaaacgaataagcacatacatagggcagctttctttataaaaataaaatatacatgtgaggaaaatggattgttattatgtattgactccatctctaactacaaactttgacatacccgagttaatattcaggttcataactagaatttgattttttttctccgat

SEQ ID NO: 9134 - DNA, 14750 bp, Oryza sativa
cttgcctgcatcagctgttggcacaacagttggctctggaataaacttgacaaccaaaccaaagaaaagaactccagcaaaaaactgcaaaatattattattagttaacaatggttgctgcttattgtatgagatagatcggcattacattggcatggatactataagtataggcaaagcatgactgacccaaaggttgcccttcaagaaaccaatagaattcaatgcattgtgtgccaaatctagaaaggaaatgctcaacataagtccagcggcaaaaccctgtattcagtaacagcaagagatcaatctaccaagaaccaatagcaaaaccagaacttgcttaaaagatagtgaagttgctccattactatagagaacaaagcttatcacctgtagaagcccaagcatcttaagattaggcgtcggattcaaaatcacaaacagcgcacctgaaaaacagaaaattggagcttctaaagtgggaaaatggcacaaagaagccttgctggaaaccctccacatagtattagggacagttttaaaagagagtactcatcgctcaatgtcctgagatcattcacggtcgcaaattgttaaccaaacataaggaagtacaatgttgaaccctaggggttaaaagtttttgaccatgcaacgacatttattacttatcctgttatacatagtacacataagagaaaaccacaccctgccactaaacctgtccagttatgccacttatttacaaattacaacaccccattgctgaccttaaaacaaaaaaatctgatgaatcattgtgatcaattaattttcatattcagaggcctaaatagcaaaacattcatcactcacaagccaaaatggtacaaaagggagatactcactggattctgaactctctttcttaacaaaaatcctaaacactaattttcgatttgctaataaaggatgcatctgaattcgcatggaagtcacctatacgagcggtagcaagacagaattcgctatcgacacctgaaactcaccagaaacacagaaattcccaggaacgcgagattgcgagatgctcagccacttggcgattccttcaagcagcgagcccgcaagctacacaaaacggccttaaatccacccgcggaaccctaggaaaccgcgcccgaccgcaggcagagcagcatccaaacccccgaaacgaaactgttgagaggggaagaggcgcgagggggcggggccataccgatggacgtgctgaggccgccgacgagcgagagggcgagcgccaccagcacctgcgactccattggcggcgagagagagctagggcttgcagggtatcgaggcggggggaggcggggaggagaggagaggagagggagatgggggaagggaagcttttgctgcggcggcgtctcacggcgtgcgtacgtcagcagtttgatgagagagagagtacggcgtcttttgctaatcacatgcttatgtgctttgggtttgggttagtcaatagataggggaattttgtcttggtaattttttttttcttctgttcttttttttgttgtctttgtcagggcatattggcaacttgtgttcttggaattttgtattttttaaaaaaatatatatatcgcgaatttgatatcgtggatcgtgcagattcgacggtcgagatctaactggatgagcagatatagcaggtcgaatttagatttggttgagatgaagttaagccaccaaaaacaaaagaaaaagtcattaccatgtgattgattagttgagttttaatattctaaatcaacttctatatgttacgtccgtcccataatataagcgattctggaggaatatattttctagtattacgaatctgaaccgtctcttagtctagattcgtagtattatgaagtgtcacatctctttatgattttagtaatgtgacgcggataacatgatgtagattttttaaggagaaacaatgtactatactccattcgaactggtaatacttatcattttgaagcagagtaaagtcaaaccttcaaatctttgactataaataatttataaaatatttatcttagaaatatgaaaactatatgtatatattagttttaaaaatgtacttcaataaaattatatatttgtgatatttctatatatattataatagaaaatagtggtcaaatatgtttcttagactatatttttaaaacgacaaatattatcaactcggagggagtagtaatatcaatattatttatcagtttcataaaagctaactgaaacaatgtagttgggctaatacaatagccagccacatgaatcatgccatccacccacctactcctgcgtccattctataagcttgagcggcagatggttctccatgccacaaaacgacttgtgttaaagatgtttaccgttttcgataaatctataacgatctgaatgtattttaaacaaaaaaaacaattaaaaaggaacaaatcaattcatatgctatatttaaattgccataaaataacggttacaagcttacaagtgtggatttgagcaggtacaacgtcagaaaacaaattaagcaacatgatatatatatatatatatatatatatatatatatatatatatatatatatatatatatatatatatatatatatatatatatatatattcaaccacaattcacaaacacgtagatttaaaatataaaccaaaaacaatcaaattagccaacgaattagatcatatatttttaaaaaaaaacacaaataaaccagccgcgccgccttctcccacgtgagacaccctctctctcactctctctctcctcgtcatcaatgcaggcagtaggcgaggaaggagagcacgacggcggcggcggcggcgggcgcggccgcgacggcggtggcgccgctggcggacccggggcccggcgcggacgccggggactcggaggcctcgaccgcggaggcggacgccgccacggcgagcagcacggcgcaggcgatcttcttcatctccatcccgggcggcggcggcgaagtgctgggctctgcggggtgggggaggagacgggtgatgttgtcgatcgacggcttctcgggctgcaggcgcgcggtggtggcgttgagctgcgaggcgaggcgaggcgcgcgggggattttaatggcggggcgagcggccatgagcgaagctcggggtggagcttcgccaaaaatgggggtggtgattagtgggtttgccaagataggggtggtggtgattagtggaggtgattgctcgatgaagttctaatctaatggcgtttgccaaatttcaatcgaattttgctgtttaaaccctaaaattttcaaataccattcgaacccccccccccccccttctcaaaaatatgatttctagcctatctcgaaatcacagaaaatttcgcaaaaaccaaccagtttttatcaagattgttcatgcgaattttattcgagcttcccaaaccattcagttttatgaatagttccgtttgaaatttcatcagaatttagtgaaaatagtgctgtgcctcacaattcaaccccaaaacgagattgcaaacccgcctctcgtccctgttgatgatgcattcttgtttatatcgtttacaggcgtaaaaactcaagacagctactggattaacttatacagaaactagatcacaagttcacatccaggaaacatttaagattttgattatacacatatgcagtgatgctaaagatcggccccagtttcagcaaaagagcaggaagttcagattccagcctgaacttgcaccacaacagaagcagccaatctcacatagatactagggatcagaatatcagacaatctgatctgtcaaagataggcctggttaacaaactcgatgaaacagaattgcacaagccacaagggaggctgcaaggcgaatcatttgcggttcttggaacgctttttctcgagcctctgacgagcttgctcaaactcctcttccgtgggctccgagctgctgctcccctttgggtcacatttggacatgatggatgagagcaccgagtcgaaccggtccttccgctgcgccctgcgctgtgagatcgcgaggatcagatcgttctcctcgctcttcttcttgttcttcctgtgacgaggtttgaggcaaatgcagtagtgagcaactgatggtagacaacatctcggaaggcggattacttgggagataagagaatgagagcttacttcactcttctctctaatgggtttgtgggaggttcaatctcggagatcttcttggcccatttatcatatgcttttgttgacttcagctcacctacaaaagggaaggaaatggaaaggagtttaaccattagagaagtttcagggaatagattgagttagcatgataagctaaacactttgccagcgcttcattgtagaaaaggaatagaaaaaggtattcaatattatatgataaaattatatggcaacagcatataatcatttaccttcagcaattgcctcatcaattatatctttaaagcgatgggaatcaagctttggatctgagcaaatcattgaacaaaaaagcctgcatacaagggcaccaaattaaaatagaaatggaacccaattattcacttgcaattcattgccttctgtatagaaaattaatcaacactaaattttgtaagccacctgttcatgttgcctttaaattttgtatatagatccttcaagtcctttttttcagaatctgaccctctgtacttagcttcaaattcttcaatatcagcctcagtaacctgcagaagtgtaggtcatcaccgatcattgtataggtgaacagatagcacaagtttttttgttgatatggaccaaaaagatacctttttgtaaacagctctgaagtactcttgaagattgtctgcagcttctccaaccagtgcctacaggaaaagacaaaacttcagaaaatctactgggagtgaaaggttggaaatcacactacttggaatcaggtgctcacatcatcatcagcaattccagtctcatcatataatgcccttttctcctcatccccaagaatagatatcaccttctgaagctgctgaaatttctccttggcttcctgacatcacataacagctcaattgagacaaatggcacttaatccatggaaaaaatttggaaacaagatcctacctcatctccaggattcttgtctggatgaagacgtaaggccaacttgtgataagccttctttatttcctgctgtgaagctgtcctctcaacccctaagatcttcagaatgaagaaaggaaacatcaaatgagttacttgtgttataaagaaagacaaaactgaagcataacaattgtttctgattgcatatgtactttaggttcctttctacagcttcgcttaaaaataaataatttaggccgattccactgagctagctgcacctgcaccacagacaactgctgcaggaagccagcaatgccctttgctaggggtcactgctagggaggtagcagcacaataagtctcattggttgcccatattctctaataagccatataaaaattaatttataggtaaaacttttatatatttgttcatagcaacttaaaatccaacactaaaagaaactacattgaaaatatcttaaaatcaagttcgaaaattcaaattttggcttttgctttggcttattaggccaaccgatggggctcttaagttgcaggcttgcagctagctcagcctataggagccactgtttctggttgcaatcttatgatttgtggcctttttaaagtcaattacatgaatttccatgaactctttcagctcttctttggcacttcattaagcttaggtttcagcaacatttccttcagtctagaatttttttaaaacgcgctaaacagtctagtagtgtgcgccaattaattacaatttttcagcacagatcaagacaaaaaaaaaatactgatgtctgaacagctgggacatatataaggtttattgaattaagttatgcaagtaaggtaatgctattgtacttgcttttaaaactaatagtggtatagcttgagatcaaccgccaatcacaacctcttgtacctcttggctcttgcacactttacccagtcattggtgttttctgattgatcagatgatatgagaaaccctttttatttgacaatataaatttttaacgagacaagctagcaaggattgaactatgtcctcaatgtatgtgcatagtagagagttagaggccctatcacacccagccacgtaactgtttgattgtttgacatttactccagattccagaacatgataaaaattagatttaaacatcagttgaccttcataaattctgtggcagtaatacttaagaggaacaggtatagctcaaaggcaagaatgccataccatcaaagagcaattggcaggaaggccagcaagatttaaagaagattaagtcactataaaatccttggagaggtactactactgcgaagcccaaaactagagctgaaagttaaggccaaaccaataagcactctcccatatcagtcataaggcttcacaagtgaaatgtgagccttcaagcaactgcctccatgtttgggatacaaaatgtttttcctattgcataagtacgcacttcgtactttgggttcatcagtagcataatcttgcccaattgtttttgcacattgaaatggtacacacagttgcttcaattcgaggtaatctggtatgcaaatatgggttatacttgtacactagtactaacacacgatcaatccgcgcagcgaaccacgaaattccccaacgggcggaacctgacgcgacaccggataaacaagaaaacgaaagctatcccgctatcgcatcgaacaatcagatgcgctcctcaccctcgaatcccggaaaaaaaagaaaaagaacaaaaaaacatcgatccaggcatccagcacacgattcgatcagaccaacaccaccccgccgcaaaatcaaccgctacccgtacgggtaacacctcgtaagccatagacctagggtttggagttggggatttacctcgtagaggctcttgctctctgcggcgaccggcgcgggctcctcctcctcctcgccgtcgccgtcgcgggaaaccctagccctcctcttgcggcccatctggtggaagcggcggggtgaagaggactagtagtgtagaggagaaggcggctgcggcggcgagatctttataggtggagatggcgcgggtgcggggaaatttttcccgcgctttttggttcgcgccgggatttggcgttggcggcgtctcgtcgaatgaaccacccgccatggggatggagggttcgatggaaaatgcttgtacaccggaggtgagagatcacttcacggtgcagttgtaaagagcgtgtggtttccattttaaaatctcgtgtttaatttttgacatgtttatcaattcattttacaaaaaaaagtttagaggggtatctctcccttcaaatctcgtttttatacaatggatgtgtagtagagaggagagatcagccacacgagcatacataattttgcaaaattcctttagcatgtgtgctgggtagaatcggtacaatttgggtagatagaatttgtctttaaaactagggctcgaataaatgtctaagtttatttagggcacatacatagttaaaagaaatatatgcgatgtggcataagattggctagagatctccaacaccatcatatatgttacaagaaagcttggtacggttcgaccgggtagtatatcaaatgttacatactaaaccgagttttgtcctaaagaaaatgataattataacggatgagtaatgagttagagctcctccacagtagacgaagatgggaaataacatgaggaatttggttaagacagtactccctccatcccataatataagggattttgatattttgtgtgcactgttcaaccactcgtcttatttaaaaaaaattgtgcaaatataaaaacgaaaagttatacttaaaatactttggataataaagtaagtcacaaataaaataaataataattctaaatttttttaaataagacgaatggtcaaacagtacaggcaaaaagttaaaatccttatattagggacggagggagtacaatgttgtaggaatcttctttttctctacgtattaaagcttgttagttaggttttatcaacaactcaaacaataccttataaatagtttacttatgaaatttagacctaagagatcaatatcatctgctcaattgagatcccctgcagagcatgtgcggtacttcaggctgacatgtgggcccgagggctgtgggcccacatgtcagcctgcagtactgcagacgacttgtgtccatcatctgctctatactctatgctatttaaacaaaatatgtagagctaggtaacaattatctgcgcactggggcggaaaacaaacatggagcaactagggttgaaaccctatacctagctccgtaatccttattatatttttaaaaaaatgctatataatttgtgaaaaaaatagctcttatttgtttaggctgaaatcgctccgtaattcttattatattttttaaaaaaatgctatattattcgtgaaaaaatagctcttcattagtttagccctatgcgtgaaaattttcgagctctgataccgtttacacattcttctttgcaaaatagaatggaataaatggtgcatatttcaggttctatatatgcaaggatcataaaatttatcagatactctcatacatgtaattgtccatttgctgcttctcacaggagtatgctgaaatgactcataccaacatatattagttcacccgggtatctaacgttttgatgaatactactctctccgtcccataatataagggattttgagtttttgcttgtagtgtttgaccactcgtcttattcaaataatttatgcaaatataaaaaacgaaaagttatgtgtaaagtattttggataataaagtaagtcacaaaaaagtaaataatgattccaattttttttaataagacgagtggtcaaaccgtataagtaaaaactcaaaatcacttatattatgggacggagggagtacaatacaagatcttacaagcgttggttaagaaaaagacaaggagaaagtacatatgctgacatgtgagtctctttccatgtgtcagtggctcaattacacaacagttaagtcagatgatcccttttcattggagaaaattgacatttagccatcgtcaggatggggtttcgccagaatgccactccggattgtggcttcgttataatgccattttcgaacgacgccacattgctactttgccatttcgaccaaattagctgatttgcaaatgatttccaccgtggtgtgacaaaattgcccctgtgaccatttagttgacttgcgtggaggagatggatccctgccctggcaccggcgcggctggggacggatcgacgcctccctcctcgccgacaacccaaactccaagctcactgtcacctacttctccccgctcgcctccgtctccctcgccccgtcctcccccatcgcttctccccgctcgcctccgtctccctcgccccgtcctcccccatcgccgtcgccacgctcccgcccttcgcgcagccgccgcggaacatcaccacgctcgccttccgcctcgaggtggatggcgcatacgtgggtcccgacgacgccgcgccgctcaagggcgggggcgttggtaccatggaggtccaggtcaggctcgccgccgtcgccgtcttcgatcgcggtggctggcgcacgcgccggaggttgggggcagccttccccacccacgccggcgtcgtccccttccccgtccccgtccccagcttagctggcgtcgtccccgtccacagccacgccatcgagccgtgctgtgtatatgcaacggagaggaagaagagagagatgagataggataaagggtattttagtcatctcagcaagaaaaaacactacaaaaatcattaaattgagaagaaatggataaaatggcattacaacatgttgcccctgtttgaggatggcattttaacgaaaccacttttgggagtggcattctggcgaaaccccatcctgacgatggctaaatgtcaattttctcttttcattgagcacctatattactaagtgcatgtatgctatgccaaatgtttatacctagcatacctaattagctggtacgaaatcaacgacttaatccaaacccttatgattgaactaaatcctaaaaatgtattcttacccctatatcaatactaccaatcatccatagttaaaagcaagttggtctgaccatattctttatttttattgttttgtacatgataaggtatatacatgacgcaataaggtagagtgctatgtcacaataggtcgtctcttgcttaccatgagaataggtttatggtcctctagtttttcatctactccacatgtggctctcttcttctttttatttggctccgcttataaattttattgttcttaatacataggtgcgcaactcttttgtgtattaaaaaaaataattttcatgaacacaagagtgtcaagcaggcaaaaattgttttatatctaggacaacctatatgtttcatttataaggcaatatgattttatagggaatggttatgaacatgttgttcttttcatctacaaaagttagcaacaatttatacgattatcatatgaacacgttatctttttattttataccggttcatattatttcacagtattactgcaatagaaaaaaactaaattccagcactataataagaaaggatttaataattaaacacaagtatcacaccaacaataaagagaaggaaaagggacacgctctccctctcctccatcttcttccccagcaagaaagaaaaagcccctactttttataaccccacatctcccagggacccaaccgcaaaaccccacaccctccctccgattcccatccgtccaaccacgatccaacggcccacaaccccaccacgtggcgtaaatacacgtcgaggcgaggggcaaaccggtaatttccccgtcgccatcgggggctttcttttttatcagtgtctctctctccccccacccccaccttcccctgaagagagagagtgagagagagagagagagagagagaggagacgccaccacgcgcaccgagctcgcgattccaatccccgcacgcctcctccgccaccgccgcctcggcctccgccgccgccgcgaccagggttagggtttgccctcttgctccccctgcctgattccacccccccccttgagtttgtgggtgacccgtttgatctgtgggcttctttttcttttttttgtttttttcttggggtcgattcgattcgatcgatcgatccgcgtggtgctggtgttggggaggggggatcggttttgggttggtgcggggatctgatgtggggggtcgttgtttgatttggtatttgatgtggttggttattggttattgggctcgaggggaaagcgtttatgtttgattttttttttcggttgtgtattaggctatgtgatctttcaggttgaaatgattagattcgcgtgagtttcctgatctttttttggggttgatttgttgtagaaccgtgggcgattaatcattactcggggtaaatgtgagtgggtaaaacgtgttacagcagatttacggtgtttgaatttgatttcgtcgaaatggataggcgcgtttggttgataagatgaggaatccacttttgtgatggcgatttcgttgcgcctcatagaaattaggatcttgtttcataaagtgtaagctcgccgcagtgggttataggttattttaaaagtcacaattatatggaaatttcgataggaaaattgtagcaactaggtgcttcttggattatcttaccgcccgatttaattggacactagttgatttatccgtatgttaaattttaaatttgtttcttatacgcatttcggtattgagttttgcattgtttgtttgatgaacagatcacagttgcgatggaacacaaggaggctggctgccagcagcccgagggcccaatcctttgcatcaataactgcggcttctttggcagcgcggcgaccatgaacatgtgctccaagtgccacaaggagatgatcatgaaggaggagcaggccaagcttgctgcctcctccatcgatagcattgtcaatggttgtgacggtgggaaggagcatattgttgctgccagtggtagcacggcggtggcggtggctcaggtcgaggcgaagacgctcgttgtgcagcctaccgatgtcgcgggcaccagcgaggaggttgctgtagtccccaaggtcaaggaagggccgaaccggtgcgctacctgtaggaagagggttgggctgacgggattcaactgccggtgcggtaacatgtactgtgcgttgcaccgctactccgacaagcatgaatgccagttcgactaccggactgcggctagggatgccatcgccaaggccaacccagtggtgaaggctgagaagctcgacaagatctaaggcggctaggggcgtggaatggattgcaacctacaagatttcaacatccacctttgctgctctatcctcacacttcttcttgtcggctgctacatttcttaaattgttcaactttgtgatgcacactgcatcctggcagccgaaagaattcatcctctcagtcaagtcaagtggtttgcgtgttgggtatgttgtgtaatctttattcttggtggttttcggtcagtattgtggtgtctcatttagctagctctgtgatgtactatgtcccatgcttgctacatttcaatcagtaatagttatcagcaatggtccatcatattgccaacatgtccattattcatttttccttaaagattatttatgtatgcacctttatctggtgcgcattcaaattcatgtatgttcaaagaagtttgccggattgtgcttggttggctgggtctactctagattgaaaatcggatctgagaggaaattgtgacaaatgacaagttagttctcaggttattactctatccccaaatggtcattctttaatgctactgagaatagttgggattagatctgcaacatgtaacactgaaagttcagcatgtgaagctgttctgtttcagtaatctgggatgtagttaataatctgccttaaagttcaaacatctattaacttgtgatctgaaccagcatacatattgttgtcacgaagataaccattttgttcgattaatttcctggtgcaaggcagctgcagttctgattcgattgataatttcacagattctgacatctgctaccaaattctgccccccttatattatccaattgaaatccttaggtggataatttcacagatgcttacattttgttatatcacttgattggcatgactatggattggcatgactatggattgcagaataaaccaagttgtgccaaaaaattctttgcagaggatgacttcttttcccccttgatttgtgccattgtggttgggtgggtttctttaggcatgatgggtacattgatcaactcctttgccgggtgttaagccgaaatgcattaaacaatgcaggcactaatggtgagctctgatcagctgagattcctcagtagtttattgaattggatagaatctccagtttgtcgtcctctcagtcgctggagatgtattttatgagacttaaactgctgttacctgctctgatcttatattgttatactaatgccattatagtgtatatcacgcaatcctgataagaacagatgatttttttccctcttgtgtttaccggacaaaagccagaacaatggagataaatgatacttcctctgttttatattataaatttatcctaagttaaaccttttcaagtttgatcaaatttataaaaaaaatatagcaatattttcaacacaaaattaaaaatatactataaaaacatattcaataataaatttagtggaactaatttagtgttgtaattttttctataaactcggttaaacttagaaatgtttgagttaggacaaatctaaaatgacttagaatatgaaacagaggaagtagcatctactgcatcatatatgttgcagaatggctgtatttcaggctttcagcagcattttcaattaccaagatacgaaaatgccacagaaaaaaaactcataattgcacaacattgcactgaactcagtaaaaattatcctacaatttcagaagaaacaaaacgtttcctctttggctgcatattctaaattacagtatagtaaggacaaccattattctgaattcttgattctttctactaatgagtaacctctttcaaggttcaagccccaaggttgaagtaaaccgtgtagaattcgtctctcaggctgtacaatggttcaagcaggaagttcctcttcaccccctttgcaatgaagctgataggatggtactgcctcaatggagcagcctgcacaaagctcgcggcctgctcgaaaatcccgttaaccatcgggaaatctgcgactgacctgatctttgtacccacggagtaatccacgcctatcaccaggaagcat

SEQ ID NO: 9135 - DNA, 17483 bp, Oryza sativa
atgcaccctgaagctgttacaacactcactaatcattgatatctgaacagttatgtgcacaccagcatatgttttgccaataatacaagtatacaacaatcaatgtgatggaatcacagaagcagtctaagtaagtgccaagcacatgtattagagagcagagctggtaccttcttccttgctgatgttgatagaagaatcagtctcgctggcacttatatcaacctgggactgtgcagaaatagctgcttgccctgcagctacagcaacatctgaaccaacaatggctgacaagaacgcaacctgggaaaacaatgctattagtcagtttgccgcatcaattgttacccatattcaaaaacctgctacataagaaaagcacatagcaactattgacttgaatataggattaactgtgatgttccagccgaagtgacattcttagataatagatgtcacgtctctcagttagaatttacaaatatagttttcttggcaactatggttgcaagcttgcacgttgcagtctttgttccaagtataagctacaagtgtatcgcataatcaagaagtcaagatataacaacaattaacttcaaatggataattactgatacagacctgggccatgattggattgctagcatcagccagtggcgtgaggcgtagtcgttttgagatatgtgatccagattcttcattgagatcacaatcattcccaaactgaattttgtcctccttgggtcccatgaactgttccccaaaaggtaatcgggtgaatctagcaatgcagtccttttctgatcgactaccaacatgatgagaaacctttttccagtcttccccataatgcaggacggcctcaagaaggtgaagagtttctttatctgtccaatctgattttgcgtcctcagtaatttcaattcgcttgaagtctgccgaagtaagacctggccggtaattggcacggacatagcatctagcacagaggcttatatctgcctggtcataagcagaatttaaggagtttagtagtgtttccaattaaaagatacaaggaattaatgagactttcaaaatacaccaggatgatatatgacgacagtatctcaactgacgtataaagtttgcgtgactagcaatgaacttcccagacttaaaagtgtcactaagttattataatcgtttgcaaatacttttcttaatggtaattggtaaaacacgactgcaaagagtatacttgttcaaaatgagttactggccacctccttaacaagcaatggacaaatgagctgtcgtgcacgcttttgtgagagactggcgcttgcatgctagatcaccgcagcaagcagcaaagttgtgcttgattgtccttggccacaagaaagaaggcaaagagataagttggttgctagtattatctaacatgctctgttaggcagtcaatccatatagttggaatttattgcctctggtaaactttgctaggaaggtgcctaagaaaataccaaacaaaataacaaaggttgcaagaacacggatacccagaactgcctttcacagggaacaagactattgttggtttcaagaacaactgctcagagccgcagatatccccttttctcaatacccaaaccacatcatggagtttcaacaaaacataggtaaagccaaatggactgttgttccggtaagaagggcaagctctgaactgaataagtgcaatctggaaatatttgcactcttactgtctaattgaaaccatgagttttacaaacctaaagacctcaatttgtgtagaaatttgcagcacacatgtttgattaccctctcaatttataatttcataagaaactaaacacaatagttaccaaaacaaagtatatatcagactatttgtcaacaactttgtctgctcatctgtcctgcccttcctacgggacatgccaaaactagctaaaccaaatcattgcagccgaaaacatctccacacccaccaaatatatttgtttacaaatgcgtaaactcataactgcaaaagaagagaccctttgttccattccataagaaactaaacatctgaatatttacaacactgcgcagtaggtgggaggcttggatgctcccaccacccaagttcaaatactcttaagcttaactttggtgtttctttcttttctactaattagataccaaggtttttgctgcttctttcttttctactaattagataccaagttctgccttggtatcctcttttttttttccattcgaaaaaatatttaccacttcccgtatcaacagccaagcgctgtcatagcttatcagaaataattcgtgaaaaacagctaagataattctacagtggtaaacgatgcatacacattgacaaacttgtaatacaactgtacacagcactgcataaataactcatccgcaaatcaaaacaagagcaaatcactcaccttctcacaagagaaataagcaagcccgcacacggtgcggcacccggtgcaaagcttactgggcattgttgccccaatcggcaaagaggactgcgataacgctgcctcctctttcttatctctcccctgcttcgctcccgacggcgaagctccatagtttatcagcccccattcctcaaggaagtcgaacacgcgacgcacggagccgacatctccgacgagcccacgcctggcctcggtgagcgtcagccgccgccccggccgcgcccggaacctcctcacgagggtgtcacggtagtacttgtaagcctccgggcccctggacccggacgccgccgccgcctccccttcgaagaactccggcatgaggcggcgctcggtctcgtggatggagtcgtaggagaaccacgctggcgaagagggaagctagggtttcaggtctcagttcagcctcgtcacaacaaggtgggggcgatggagggggttacctgaatagctcgggatggtgatggtgcagggcgactcctcggccgcggcggcggcggcggcggcggcaggggcgggggcggcggcggaggcggctgaggaagccgaggtggatggcggcggaggggcctccgtcttgacggtgcctgccgtcgaggggggctgggagaacggcgcccccgaggacggcggctgcggcggagcgagaggcatggagttcgccgtcgccgtagtcgccgccgccgccgcctcggccgccggcgctggcatcgacggcgtggccatgagagctcgagacagccgcgtctcgtgttcgtcttgggcttcacccgcagtggagcctatcaagccgcggcccaccaagaggattgggcccaaccgaccaacgcggcagagagcgggagggcggtttcgtggtctcggtttagtaccacctcgccgattctgagcgggaggaggcggggagcgggtataagaagacgaccgggggctgagataagattaatgtatgttctgatcttattcttgaataagttcagaacatactggaataagttcactttgagtccctcaactttatatcgagtttaatatcggatatgtgggccatgttcgcatggcctgcttctgtatccaaatatttttttatggggaaaggcccattagtggttctgccactagggcccttgcgcgttgccgaggtgttgcactgctgcccgggccggcgcaccccaaccaaaactcagttccaatgtttgtaattactagaaaattccaatgtttgtaattactagaaaaaatacggtgaagtttattttaatcttattgttattaagatgaaatttaacatggttaactgagtatatggtttagttaagatgaaatttaacgtgggatactatatagagagaattacactttggaccaatttttattaccttgcttacatattggaccgggtataggtaaatattttcacttagggctagattttgttaccaaattttgcatttgaggctattggtccacatgtcagtaaccaacacatcatcttcttcctgagcagtcttccaggctttattccgtgcatgtctccagtgagcttatttcgtcctcacacagacaagctcctcttccccaatctctagccacctcgaactgcactccgctacttgacaagcctgagcacataggctttgaactaccaaaaatttgaactcatggtttgatgtcaggagcatggagaaagagacggggctggagtttgaggcgatggagaatataagggattgacggagctcgagttaaaggtggtggagttggactgttggagctcgagctcaagcagcagaggaggtatagctcgagctttgaggcagaaaaagagttgaagctcgagttgggaataatggaggaggcaaagcttgatattggggagcatggagatcgaaacctgcgaggagaccttattctttctttttttccaagcatcagcaagaagagctttgtatgtatgggcatggcaaagcttgagctcgacctgccttgctctgactcagtggttcacagtggctcttggaggagagacgcaggagagagaagctagaggttgaaagtaaaataccccctccttccctaaatatttgacgccgttgatttttttaaatatgtttaaccgttcgtcttatccaaaaacttttgtggaatgtgtaaaactatatatatacataaaagtatatttaacaataaatcaaatgataggaaaataattaataattacttaaattttttgaataagacgaacggtcaaacatatttaaaaaagtcaatggcgtcaaacattttgggatagagggaatattttgcaaagatatctagcccaaagtaaaaaaatggatgtttaacccttgtccaacttgtaactttggtaaatgcaattcactcaatatatatatatttaaaaaaacatgagctgcagttaggtgtccgatcgtcttaagttaacatgcgagtttttttaaacatatttcttatatgattcctttggtattatcaaaagtgaacgatcttaaaactgactcaaatatggatatctatttccaaaagcaaacgaacgtaaaaaccgactcatatatggatgacgtaccaaaataccggtaaaaacattttagtttttataatagtagagataaagagtagcaataatgcccgtgctttgccatgggataaaaaagaattatagataaaagcgttgccatgtgtacttttctttaaaaactgaacaaaatgaaatctttgattgaactcagcaatgattatgcaagacaaatgataactatatgtatgtgttatctatggcaacatatcatatacacacaggtcctcacgtgtacacacgtgcacaccaactaaaaaatatcaccaaaaaatctagaaaaaatcatacacatactttcaattgtattacacctagggttaaaatcttaacgtcaaattcattatattttagccgtaacaaaaaaaacaaaaaatctaaccgttttaaggttgcaattttgtcagaattttatcttttttgttattctctatgtagaataaatttgaagatgcgactttgcacgtaaatgtaatactattgaaagtacatgtatgaattttcctagaattttttttgataatttttaattggtgtatacggtgtgtacacgcgagggcttgtgtgcataggatacgctcccgttatctataacatatcaaaagaaaacaattaacctccgtgtgctttcattatgtccatgaatgccaaattgtctagctaagattttgtaatttacaaaaggcatttaaatttaaattgacaaatagaatctggactccacctcaccactacccctccccccctcccccaaaaaaaaaatctacaggtcatctaaggctgagttgaactacaacttcaaacaattttctcgatttccttcagcacaactgctaagggcacctacaaaagtagagaccggtatgatctctacgttaattagatgctatcatgttacaatagttaagataatacggtctctaatcattaatgtaccaaaatactttcttactagttatcttttctttattagactcaatgcaacgaaaaatttcctaataaatgctaagagtcgactctatgccgttgtcatgcgtagcaaccatctttctatttccttcttcctctctcttccacgtcactaaatatgtttgcatgacaataaagagagaccgctaataaaaactattgtatatgccttaagggcagtcccaaccctccacctaggatggtgtctatggcattaactacattgccatgtaggacttttagcttatgtggcactatattaattaagagagagagtaaagagagaaagaaactgggtctcatgcaagacatagcttcaacatgagaacctatgcactagacactatcaagttttgtattgggagagaatagtgtcttcataatagatgaagaatgaatatgattggtagagaagagagatgatgtatttattaatggcccactttaagaaaccataggttgtagagtgtagtttctattgtgatgtggcaccatagacactgcttacggatactatgggttgggactaccctaaacggtggttttgtggacgagccaaccagttgctgctaagttgcaatttggagttgtcagcctaagaaccactccttgccaatggaaaggagacttgtctaccggtgcacaacgaattcataaaagggtcatcgtcgggaaagcctactaaattatgaacgctcaacctcaccaaaaataggatctgtatgaggaagaaaaataagatcacatggctcattttcaacttcacaaagtcatttttcatcaataagcagttatgactaactgaataaaaaaactaaagctccaagttatttatctagctcattttgtacctgagtttgttttagttcttttagctctattgttatagcataagaagagcagccctcaggattctatttacaatagaaagtattaaagaacagtgcattgtttcagcattttagattaactggcagtacctctttattctccacggctcctgatctttcatttagcaaaactatatgatatatttggttcggaaagcttcagaaatataacaattgttaagactgataagttggttcaacccggcaaatatttaacacaatgggtgctatgagaatctgagttgctgtccctatataaagttttatattacatcctaatgctctcacctagttctgcaaatactttaacctgcatgtaattggtaatcaaacagaaaacaatccaaggcaaaaaggaggataatctttgtaccatacaattttccagatcacaagttctacctatgaaaccaagaatattcagaaacaccatcgtatatcatactcctacatgaatgcagcttctgtttcgaacattacaagctccgctgaaattggctgttgttctgagtccagatgactgtgaaaagacacagaggattcaatacaaagagcaaagagcattttcatgaacaaccgtcaaccctctccaacgagctcctcatgcacatacaaattcaagacctcagcgtcgatggaagtaggcggcggcacctcgatcgcactgtggctccgtttgagaagaagattgcgtcggctcgcgtcagcggccgttgccgaggccgcgagaggagggcgatgcggttgcatgagggatctgtacttatggatacagctgcatgtattctctcagccaagtcaaactcagtatgtatgagagatgcgtgccaggctaggaggacatgagcaaccaaacacactctttctgattctcttgcgataacaacaacgatcgaacgaacgatagcgtgtgttcttgtgcacgccaaatcacacaacgtgttcccgaatcggccatggagaggatggacgaaacaatcggtgagtacggaattgtcttcaaattttataattggtaactgatatatcgtagtttagttacaatgtaattacatttcgattatactatagttatagttacaatgccctttttttagatattttatttttaggttcactaataaattaggtcaatggattgattgacttaggttgtatgaaacagataaagtggtttacaattatttgatatgtcatcagataattcaattgagatatcagaaattttttgaattggtttgttcgtttccttttgcagaaaatctgctaaagataaagataaagataaatattaattgtttcacgtaaaatgaggtagtaataacgtgtgattaattgagttttaattattacaaacttgaaaaatggattaatatgatattttagaacaactttcacatataaagttttcgcacaaatatcccgtttagcaatttgaaaagcatagccaccagtatatatttttgttggagaaaagaacatggtatatacttttgtcggctatgcattgcattgcattctgatttctgacatggagatgataattgcctggcttataaactgtcataactgatatgcacttcattagatcaaattctgtaagtatagttgatatgtcttttcatgcacactccaattgaacaaactgaattccctaatccacgagatgctaacaagtaaccacatatatatatgagacgtaagaaaaagtaaagaaaaactacgagatcccaacgttgtcagttgtcacgtcaggctcacgagaagctccggcttttattttctgacccttatgaaaactaaagcaaagccgtgaccgccggcatggagtccgccgtcgccggcaacgacggcgccgcgatctgggttcgaggcggccgcgtctcgtgctccaacaaggccgatgctgagagtagaggcccatctaatacattggcccacccagaaggcttcggcccaacatgccacggagcagagagcaagaacagcttcgtctcttcggtttagtaccacctcgcggattctgaggggagggaaggaggaggagcgggtataagaggagggcctgggtaacaatgcaactcatacctttctcggccttttggctaagatcaagtgtagtatctgttcttatcagtttaatatctgatatgtgggccatgtgcccacttcgatattaaatttattttttgtgggggagggcctatcacagtggcttgccactggggccctcgcgcgtcgcccaggcgttgcactgctgcccgggcctggcgcaccccaaccaaagcatcaattaaatttttaccatacaatccgaagctgcagtttcagtgaaagccttttgaagtatattgatccatataaaaaacatattttcaacatctgaatttccaatgctgtatgatgagcaaatacattaggagttagattatatttgttgttcagatcggttaactcacatgagattcatctctcgagattatattttttatatgatgctcaactttcttccaaaagattgagagttgagactccatgattattaactgaaattctagctaaacagaatgttggtattatcattcacagtgtaggtccagctatgtacactcgatgctttccatatcataaatcaccaggcaaatgaggaatagggatcccaaagaaatctgaggaagaagatgcatgtaaactgtaaaggagctggagctggaagagcaggaggagatggcacttcatcctgcactgagcatcaggatgagttgatctcgtcaagttgtcagcaacctagctctctcccctcctctctagttactccggctttgtttcgttttgcagcaacttttaggaagatcagttgtcattgagatactttgttgactatgcaagtaatgcatgcagtgtattctgatttctggtaacttgactgctagacttacataataactagagaaaatagtttgatgcacactaattaactagagaaaaactactgggcaattgaacgtcccaaaccatgagatccttaccacgtatgtgacctaaattaaagtaaacaaagctaccatcaaatatattgtcaggatcatgacaaactccagctatcagtctaccaccaatatcgtcaagctttcccagcattcagtttccactcttcagtaaaagcaagcaatgatcagtgttcatttaccagtctccaaagcaaggtaggcagcatttagcatgtcattacaagaaaaaccatggtgctactgactaaaagttacagaactaaagatggcaacaatgttttaagtgggatggtcaatggagatcatcatggcattgcagccaacacatatgaccgatcacaacgttttaccaccaccaccaccaccacttgacatgagtgaggcggcagcagcgcctgcagtcgggacgattccagtcgaattgcctggtttagagagatgcagaagcctgcagtgtgttttgcagtcaaaagtgagaaaattcgtttatgccagtctagtaataatcttgagatagctaaggaacacttagttacttacggtgctagatattcacagaacgaagtgacggctgaaacgacatcgttgtaattgtcagcagcagcaggggccgtgatttccactagctgtattgcaggagtgattggcacagcttcgttggtagcatggagttttgtcatcttgctaacagaggtaacggtcacagttatctgggcacctcggtggaaacgaaatgcaaatcctcccttcagaacttcatgatctaacttgtaccctataccgtagaagtaacgcaatacattgttgctggctttgctctctacaattgaccgcacaaggactgagatttgctctgcaccagcacctctcatggcacctccaacatgtcttatggtcctacatgaatactactggattcagaatatcatcaaatatcacaaaaatgtaaattttagcagctgaaagaaaagttaccaggatggcgtggactgagctaagtcacacaataaacgaacctctgatgggacaactcctgtatgattggaagatgtatatgagtaacaatggcatatgatcagaataatgaaaaagttgcaaactgacctagatttggcccacttttaagacagagctcatgcactctgacacgttcttttgggacaccagagaggccctggagaagaacctcaagagcatcaacatgctgcataacaagaagatcaaccaaaagttacactgatgtcaaagcaatgaaaactaaaaaaggttaaatggtgttctaagcacaagacattgacatgtgtatataaattaatccctttattgtaaaattacaaaccatataagtgatatgattcctccaattgtatataaaatagaaccatatcaacatattgaaaagagaatcaaaaaaagtctgcaagtggcagaagtagtgccctcagagtggagaaacatggttgaccatatagtggtcagcatgatcaactgtatactttttttttattatcctgaagggaagtgttgatatgctgacaagaggaagctataagagactaacaaaaggtcatatagagacaatggatcgacgacaaagtcttaatgctggcatgaattattattctctattccctgatgtgtttcgttcaagaaaaaagaaattctctatggacataaagttccaatactacttcatgctatatggagtgaaaaaataactttgttcctaagtaggactattgagatgtaatttgacattggggctatgcagttgatagatttgctacctgggatagcttaagtgttacctttcaaaaggttttatcacaattacatttacagaggtctgttttcaggcaattgacacctccaacaacaaaaatgctatcttaaatcaagtgatagaaagttcatttagtaaacgtcgaaattctacattccaactcctttggataaggttactacaaagcgaaaggccaaataaccttatgccaaaaattaaataaaattcagaattctagatacaacatacaagtaaggagcgcaaatgtcagatcagcaaacttgactagtaccgatttcccagaaaggcctaccatcatacaaaaatcaagaatccatgaagaacatcacatctaccatcactccggcttatgttacgggccatgtatgattttccgggtaaaagttcaaattggtcatgttttacagcataaacagacaaatcagtttcatatgaacaaaaatgcatcgttgcatagctacagatcactcattctcggaagaaactaccgttcacttcaacaaccgctcacacagtcaccactcatacaagtctactggcgaagtgagaaagaagaacaataacctgggtctcgatgatcccctgcaccacgcactccatcaaccccaccgcttctcgctaccacaatccctgcaagagagacaaaccctgaaaccacgctgcggaatttcgtcgaacagctacctcgcagcaacaaaaattcacccccacctttaacctaacagcaataatccgcggcgcggcgggggctgaggcgtcgggaagtgagccgatccgaggcgcaagagctccccccacctcgcaaaccccgcgtccccgaacactcccctctccgccactgaccgctcgccgtcctccgccgcctcctcctcctgcagcgatggagacgagaagaaagaattccgagaaaccgaggggggtaaagtgataaaatgcctcacccccgcgcgaagggtcgcggcgtttttgcatctaggcccctggaagaatctgaaatttcagtcatacccttcctctgacttctcctcttcctcttcctcccccacgcgctcgtctcgtcttcctctcgaattcccattttcttccacctcctcctcgtctcgaggtctcagatccaatggccgcgacggcgacggcgacgaccaccgcgtagagcgcgtgagagtctgcgtggacggctaactatggcctcgccggcgggggcaatcggcggcgcgtcgccgtcggggcgggtgctgggccctgcgctggaccggatcatcaagaacgcggcgtggcggaagcactcgggcctcgtggcggccgccaaggcggcgctcgacctgctctcctcgtcggcgtacgcgtcggcgtcggcgccgtcgccgccgtcgctgctgctcgggttgccggcggccgccgcggacgcgtgcatccacgcgctcctcctcgcgctcgagtcggcgtcccccaaggtcgccgacccggcgctcgactgcgtcgccaagttgctctaccaccgcctcctcgtcggtgatctcggcggtggcggcggcgacgacgactccccgtcctccaagctgctcgccgccgtgctctcctgcggcgcgctcgccgacgacgccatggagctctccaccctccgcgtcctcgtggccgccgcgcggtgcccctccgtcgccatccgcggggaagggctcggccagatgctcaagacctgctacaacatatacctcagtagcagcagcggcgccaaccagctctgcgctaagctggcgctggcgcaggtgctggtgatcgtgttcgcgcgcgtggaggtggactccatggatgtgcgcgtgcgcacggtgtcgatcaccgacatgatggacatgtctgaccgcaacctgaatgactccagcattgtccatgcggcgcagagcttcataaacgagacgatggagggaagcgatgtccctgagccggggtccccggttgagccggccgagacggatgggaaggaggatgttgtcatgagcaagatcagggaggatgggttgacactgttcaagaacctgtgcaagctgtccatgaagttctcgacgccggataatcccgaagatcaggtcctgctgcgcgggaaggtgttgtctcttgagttgctcaagatggttatcgacaatgctggggcattctggagaacgaatgaaaagtatgatatgatactcattattgtcttacttctgtgcattttaacagctcaacttgctgtgttgcctatctatataaatattgttgttgcagtgatttagaagaatgcagatggcttaaatgactaagggaaggaaggcataaaatgttcagtatagtaattgatatggaggcttcatgtttgcctagtagtaactcagaaattatggatacacatttttctgatactaatacattattttcacaatccaggcacgctttactattatctgcttggatgtgtcaacattttggctatatttttttaatgtattatgatggatgaaaatttttctagggaaaaaagtgcagagtttaatctatggtggtagatacatgtttacgtgacctactattctgtatttgaattgccattggttcttttaaaatgtttcaaatgatgtcctgatgataatctgcatttgtatgttgttctcttaatttgtttaagtctcttcactaactaaaaaaagaaaataattaatgagctaacaatacactggaaagggaataaaaacatgaagtgttgatttatgagctccagatgtaacatgatggccaggagagggcacaagcatcacgatattttatttataacattaggagtgactgaactttattccgttctttttttccttcaaaatatgctcatccatctaatttgctatgctgaaaaatatgattattgttcaccaagcttcctgcaagtatacggttacaatttaaaaccttttatgtttagggtattccataaagagcattctgtttactctgactccaatgggtaataaaactcttatactgaagtgttcttttctcttttttttttcaatgcaggtaccttggagcaatcaagcagtatctttgtttgtccttgttgaagaacagtgccttgtcagcaatgagtatttaccaactgttatgctccatatttttgggtttgctgtcaagatttagatctgggctgaaagaggaaattggaatattttttcccatgcttgttctgagggttcttgagaatgtccatcaacctagctttctgcagaaaatgactgtactaaaccttttggagaagatctgtaaagactcccaggttattattgatgtctttgtgaactatgattgtgatgttgatgcaccaaatatctttgaaaggtatgtagttttgttcttgatgaatggcaaccttaagttttgttgtcacagattattagcagcaggtatgcatctatttagtggcctgtaagtgctgcatgagaatcgatgcattgaactgattacagttctgcaaaaattaagttcactctctcttcatcatagttaaaacaaccctttaattccaacagatctttgcaggattgtcaatgggcttttaaagactgctctaggggttcctcctggatctgcaacaacattaacccctgcacaagaccagacatttcggattgagtcagtcaagtgtcttgcaaccataataaaatcaatgggttcatggatggaccaacagctgaaaattggtgaattttcacccaaaccttctgaaatatctttaaattcgatagacattcctaacatccttgttggagaagatgggggtgctgttgattatgaactgcaaacagactctggtaacccagacctatctgacgcttcctcacttgagcagcgtcgtacttataaaatagaacttcaggtatgttaatatttgcatgctttctatttaaattaactccaatgttagacattttataaagggttaacatttggtttactgaactgcaaaattccttctgcagaaaggaatttccttgtttaacaggaagccttccaagggtattgattttctcattaaaagcaagaaaataggtcattccccagaagatgttgcttctttcttgagagatactgctggtttaaacgcaacaatgatcggggactatttgggtgaaagagatgaattccctatcaaagtaatgcatgcatatgcagatgcactgaacttcgaaggtatggactttggtgaagccattaggtattacttgcgaggtttcaggttgcctggagaagcgcaaaaaattgatcgaatcatggaaaagtttgctgaacgatactgcaaatgcaatccaaattcttttaccagtgcagatactgcatatgttcttgcttattctgtaattatgctcaataccgatgctcataatacgatggtcaaagataaggttagctatatcactgatcccctctgttatatgtcaataacagaagttttgatcattaaatggattttcgttacgcagatgtcgaagtctgatttcattcgcaataaccgaggaattgatgatgggaaggatttgctgaacattatctgagtacattgtatgatcaaattgtcaaaaatgagataaaaatgagtgctgattcgtcagttccacaaagcaagcagcctagtagtgtaattaagctcttaggcttggataacattatcaaccttgtcaactggaaacaggctgaagacaaggcacttggagcaaacgacttactcattaagaacatacaggagaaattcaaagcaaagagtgggaaatcagagtaagagagagttactcatagacaaataacttgcgtcagctaacactttataataattaaagctcttgtattcgcagatctatatttcatgttattactgattctaccattttaagattcatgatggaggtttgttgggcccctatgatggctgcattcagtgtgacacttgaccaaagtgatgataaggctgccacatcacagtgtttgcaaggattcagatctgcagtgcatgtaaccgctgtaatgtgtatgcagacacagcgagatgcctttgtgacatctgttgccaaattcacttacctccattgtgctgcggacatgaaacaaaagaatgtggatgctgtgaaggtaggaacttagaaaagccaaacttggttctcttttgttttcttgaaataaaaaatgattctcatgatttaaatgcaaatgcacacatactattgcattttcctattgatattatgtagacaaaattcccaagcttatatggtcccttggtctatttatggtgaggacacttagatggcttcacagtacattagagcttgaactattcaaagcatttacacttgtactggattaaaatacttgattctattttttgtcaaaaccatatcgactaatatatatatctatatttgttagacatagtcctattcgtcaatattagaacaagtaatgatgtgtgttttcttaatgtctttttacaggctataatatccatcgcaattgaagatggtgactatttgcaggattcctgggagcatgtactaacatgtctttcacggtttgagcatctacatctccttggagagggggcacctactgatgcttcatttttgacagtgcctctggttgagtcagaagataaaacacagaagtcaagtagcactacagcttcga

SEQ ID NO: 9136 - DNA, 25987 bp, Oryza sativa
tagccctagggtttgtggcggcggccacctacagcaacacagtaccggggagggaggagaagtgaatcagtaagagggagaggaaatgggtttttatatctagggttagacacttagacttagatgcttagatttgttgttgggccttgggctgcttgtattttctgggctgaggcatatgggtatttttaacccacgggttaatgggttcgggtggatggagaacgttccaggacccggcccacccgatgggtgacgttttagcccgataagagacccatgggtgcaatatttggaatacatttgactcctaatagagtaaaaacctatcgggtcgcgggttatgggtccccgttgctatccctagtcgagggcacccattgtggatggcctcaggatcagttaagccaacagctttgcatatgatggggatatgacattggggcttttgcttcagctttgttggttttgcccctatcctataaagccatggataaaggtgaagggaaaaagaaagcaaatagttcagtggagtatgactaggaattatgaccctagtgcttggaagttgtttgctgaaaatgatccctttgatactgtttattgcaaactgtggaggacacttcagcatgaaagcctgacagttcttgatggcctttccttgagaagacataaatcaaaccctcgtgcctatgttgatggagattgtttggtggcctttgctgtacatacatgtgttcacgatcacaagttcaaatgtttggtcgagtttctgcacgtacatattaacatagacagcgtttagttccctttaaacttccaaaagttacgtcacatcaaatatttagacacatgcataaaatattaaatatggaaaaaaaaacaattgtacagtttgcatgtaaattgcgagacgaatctttttagcctaattacgtaatgatttgacgatgtaatgctacagtaaacatttactaatgacggattagttaggcttaataaattcatctcgtagtttataggcggaatctgcaatttattttgttattagtctatatttaatacttcaaatatgtgttcgtatactttaaacacgaccatacatgtgaagataacataacctaacaaagtacacaaatgctgtaaaggtcataattttcaagaaaattccgaccgatgatttccatttctagaaaagttctgacaggcggagactttccaaaccgtttttttcacctagaagtctatttcttctactgatgtgcaatatttttacgcgttctcgaaaaaaacttttcaaaccttttttaaccctgatttctatttttttgtctatttacgttgactaaaattcttcgtaaccaaatattacctccgtcctaaaatatagctattttagcacagtgacttgttccaaaatgaagctatttttttacctaccattttctctcaaccaatcacaaccgttctcttcacctactttctcttctttatcaatcacaacccttctctaatcatttgtatctacttttttcatatacgtgtctattttaaaaatgtttacattttagaacagatgaaatagtaagatcaggtacaatagcaggttataaatcagctataaacatattttaagaagatgatagacgagagagaacagctgtagcacggactctaagatacagtgtgtgtatgacaggtgggaccatgtattaatagtgtaacatgtaactattgtataaattgattattaagttgactagagattatttagggctaatagttagctatactaatgttattactctaatcctcaagattcacatgttgcagcgcgagttcctgggatgaaccctttttttcatcacattcacgcatatggtcagcagggtgagcgagcgagcgagcaagcagcagggggatccatcgatccgtccgaatatgctctgctctgctttgctttgcggtgggcatcgggaggcgcgccgccttttggggtttttggtggcgcgcacatcgccgtgcccgactgcccgtgcagtgcatgcaaagcgacagaaaaaccacagcgggggggtactcccccttttcgctggagccgcgggactcatggcatgggcgggcgcccgcggcgagcggagcggagcggggaccaaaacaccggaggaaaacgtcgcgctcgcgctcgcgctactgcaactgcacgatcatcgtcagttcccccacacggccacacccgcgcacgcgcgcggtcctactcctcctgcaccgcacccaggaaggagccactgctcggctaccccgggcggctcaccgacgaaaatttcattaaacttctatattgttataaataaatttatgatgaaatttctataacaaattacttatatattgttatagaaatttaattagttataatgtagttttgtccgcactcaaaaatctttctagctccatcacttactgtgccccgtttttgttgcacctccattctgaaatagtgttttcttttttcccttagtaacttctactctcttatttttcatgcacatattttacaaaacactagatgatagcatgttttcttaaaaaaatattgaaaaaataattttataaattatattaatccattgttaagtttttaagctaatacttaattattcacgtactaatctaccgctccattttaaggtcgaggaaaaggattcccaacttactcaaaggaaaacaaccataataccctactttattaaaacccaatacaactattctcaactttatctactcttagagtccaagtgcatttgttccctgctttcacaattgctactgcctttgtttcgggttataaaacgttttgactctgcttcaagtttgactaagtttgtaggaaaaaataataacattttcatcccaagacttattctacaacggaggggtagccttttagctacacgtgaaacaaataaatcattaacgaatgattaattgagtagtacaacctccgtttcatacaataaactgtttcatttttttctaagtcaaaagtttttaggtttaactaaatttaagaaaaatataatattaattttaacagaacaaagaaaattgtttctatattagatgtaataaaactaatttagtactataaagtgcttctatttttttataaacttagtcaaacttttaagaagttttgacttataaatgtcaaagcgacttataaaatgaaacgaagggattattagctgctcccttcatctaaaaatataggtctcggattggacacaaaataagtggcgtgggttcaatccgatataacgatactaggttgctatatatattttagaataggtgaaatattacaaattcaaaaaataagtttattcttttagaaagaaaacatttatataaaaagttcttgaaaagaatacactggctagaacttcaggaagagtgctcatggaaaacgagaaaattgctaaatcctagtaattcagtacccaacaggcaataagactaagaccgagttcttttcagcaactcgaaacggtgtttttttaaaaaaaaattatatagtacaacacatacactcacaatacacgcacactcacccctatgaacgcacgcatgtaatccctacctctataaacatcttcgaatactgggctgataaatcctttgggattgacgaagtcaaccgaacttaacgtaccgttttgtgaaataaatatagtataatgtattatctctatcctaaaatataacaacttttggctatgaatctggtcacacatttagccagattcataactaaaaatacttatatttgggacggagggagtatatattttaaaaattataattgttacccttgctaatcaccccgtctcatttcgcgtgcgagctgaacggctcaaacgaacgtgcctaaatcaagtttaaaccaagctcaaaataaatatagattcaccgccgttcgtcggcaaccgtttaattatcacggttactgataaatttgatagggatatgcctttcgactatcgttcgcattttgaaaccctggtctgagttgtcattttctcacagtgctaaagtcaacaccaaatgtccaatgctgtccatctatttttattcggaatatatgtgttttgaatactaccttcgtcccaaaatactcgtcgctttgggttggtttggtttgtggcctaaataggccttaccaaattttgtcaatgccaaattctggtaagttttggcatgactaattttggtaaggtaaaattatgtttggattgaagtaaaaatagcctaagttcactattgaaatggcctattttattaggcatgccaaaatttggcttcaaaccaaatagacactaaacactattgaaattgccaaatattggtaagtctaatttaggcctcaaacaaaaccagccctttaagtttttgtttgtaacttttgattattcgtcttattcaaaaaattacgaaattattatttattttttggctttattatcaaaagcactttaagtataacttatctttttttatatttataatatttttttaaataagacgaatgataaaaaaaaagttagagtgataactaatttaggacggaggtaatacatacgaaatatgagccagaaaaggccagccaaatttgtgggcagggatatgggggaatcttcttgagattgcccatcatctataagcatctagagacatcctatccaaatttgtaccaccataacctttccttttacataaggcatacgaatgcatattattgagagcaccacaccaactaggctacttatataggtcactgcataagaggagataaaggcatgagcttttgttaagcaccttcattcgttttcaatctacatgaaattttggtcaggtgggtcgagccatggtgtatgttgacgtgccaaatcagtgggagcaatgcgcattaactgagccgattacaaaatatatttaaaaatactcaatatatttttatttatctcctatccatttcaaaatgtaagacttggtcccgttcgtttctgtactgaaaaaagtggatcaaaatttggatatgtgtgacactcttttcaaattgctaaacggtgtgtttcgtaaaaagctttcaatatgaaagttactctaaaatatcatattaatttatttcaagtttgtttggtacgtaaatattaagattaagaaaaaaaatcacgtttcagatcccagtgatcaaattcttctcacggactgattggctaaaaaacgtatggatttttacgcgttgaaataagtacactagaaatgcttatactatgatacaaattttaaataacagaaatacttatattttggaacactaaactaagacatactaatatgcattgtttaggggcttatatgagaaatttcaaaaaacgagggcaaaacaacgaagcaacgaaaacgataaacatggagcggagaaagcgagcgcgcatcggcgccaccccgacaaatggcgatagagcccaaatccaaaccaaactcaaactaaaaaaacaaatcccaccgaaaacgatataaaattcgagcgagggccaaagcgaaaagccgccgaatccacgccatttcccacccaaattccacccgaattccaaaccccaccaaatataaatcaaatcccaacgtgacctcccccgcggccgcggcctgcttcacgcctccctcctcctcgccgcctcgccgcctcgcctcgcctcgcctcgcctccaccgcctctactaaaccctccgccgccgccgccgccgcggtgatcaccggcggccgaggtaagccgccgctctgacgctccctcttgacggacggcgcgtttggtctcgccgcctttggcgttccgtgtttttatcttcgcccggattccggatggattttgattttgattttttttttgtttctgtttcccccaaatacccggggccttgtttgggttcgtggagataaacgcgtagtaggcggagttgctgcgggcgccgcctcttttttttcttgttcctcttttgtcaaatggacagttcgttggttgtcgttggcgcggtggagttggatttgtgggatttttttttctcgggcttaatgcaagtggtggttaaacaatttgcttcaacgctatcactgaacttagaatgtaccaaaaagatccaaacagtttgatttaatgttattttactaacaatttgggggggaggctgcacctgttagtgcttaccaggactatacttttggggatttttaaggagtttacatctgtactgagttcataattatctgtactgagttcataattatctgtaccgagttcataattcatagttcaagttgtacttgcagtacagaagtttgtgctggattatgagaagctattattatatcttaccaattggctgtaaaatatagcatggacatatgaccatctaaatttatgttggtttttggttgttcctgggacagggatggagcagaatggagagaaccatctcaaagatccacttcttcaggcagatggaggcggctccggtgcttctcccgccggggcgtcgccgcggaaggagaggaagacgaggaaggtcatgttcaatgtccgggggatctcgtgtgcttcgtgcgccgtgtcgatagagacggtggtggctggcctcaagggagtcgagagcgtctcggtttcgccgcttcagggccaagctgttgtccagtacagaccagaggaagccgatgtaagattgccttgagctgacggtcttgttctcaactgcactagatttccccagcatgggagggacaattttgggtgtttctcatcatggggcaaaataggatttaggattcaatgcatatctatattgtccttattcaagttattgtgggccagttctctatttgactaggagtatatgtctgcaactctgcatgaatttaattccagcaatatggtggttttgaattccaggagctgaattttatcctgtagatgtcatgatttaggtaattaggatacatgaaaattttgatttcagctttatattggtcattcatataaggtccacgagtaagtactacgaaccagtgactatcttaacaatcttttttgtcagcgtgggccaaacccttgacaatgactgtgcaatcatatgatgacctttatacctcatcgagttcatgttctccaggcctggaatattgaattacttcgcaatcatatgatcttttttacctcttactcagaaatttttactagcagtttggttcgaatcagtatttatcaaggttctaaaaattggtaactggtacttgacagttagtgaccatatagcctgtgatgtcaagttcaggctcatgtagtctcatgttctttgtatacagttgccatcatgcaattgccagttaggctgtatagtcactaatgagtgcaccaactggtaacttttgtctgcatggacatgctttcagttcactaaactcatgtatatttcaagttgcactcatgaagtaatgacaggatattttacggtttggcattattttccatctgttctcagtttggattcttattcttccaggcaagaaccataaaagaagctatcgaaggcctcaatttcgaggtcgatgaacttcaagaacaggaaattgctgtatgcagactccagataaaaggaatggcatgtacaagctgctcggaatctgtggagcgagcacttcagatggtacctggagtgaagaaagctgcagtgggacttgccctagaggaagctaaagtccattttgatccaaatatcacaagtcgtgatcttataattgaggctattgaagatgctggatttggagctgatctcattagttccggggatgatgtgaacaaagtccacctaaaactagagggtgtgagttccccagaagacatcaaactcattcagtcaagactggaatctgtcgaaggtgtgaataacgtggaatgtgacacagcgggacagacaataatagttgcatatgatcctgatgtcactggcccacgattacttattcagtgcattcaggatgctgcacagccccctaaatacttcaatgctagcttgtattcaccaccaaagcaaagagaggcagagcgccatcatgaaattaggaattacaggaatcaatttctttggagttgcctgttttctgtgcctgtattcatgttctccatggttctgccaatgatttctccttttggggattggctgttttacaaagtatgcaataacatgacgataggtatgctattacggtggttgctgtgttctccagttcagttcattattggttggaggtacaatcccatctctcgaacagcttcttcttgatgttgtttcatgttccttatctcaagtcttttgtttattgtatttagcctaaatataatgttgccttcgtttgtttccttcattgcacacatgcactataaatcatgtgtggttattcactatgtgttattttactgacagattttatgttggagcttatcatgcgctaaaacgaggatactcgaacatggacgtgcttgttgctttggggacaaatgctgcatacttctattctgtgtatatagttctgaaggcactaacatcagagtcatttgaaggacaggatttcttcgaaactagtgctatgttgatatcttttatattgctggggaaatatctggaggtggtggccaaaggaaagacatcagatgctttgtcgaagttgactgaacttgcaccagaaacagcttgtcttcttactttggacaaagatggaaatgccatttcagaaacggagatcagcactcagttacttcagagaaatgatgtcattaagattgtccctggggaaaaagtccctgttgatggtgttgtcatcaaaggccaaagtcatgtgaatgaaagtatgataactggtgaagcaaggcccattgcaaagaaaccaggagacaaggttggtattttttggatcctgattgtatttgctcttgttatgaactagtatcctgatggttcaattgacttgtttttaacaggttattggtggtactgtaaatgacaatggttgtataattgttaaggtcactcatgttgggtcagaaacagctttgtcacagatagttcagttagttgaagctgctcaacttgcaagggctccagttcagaagttggcagataggatttcacggttttttgtcccaacggtaggttcgcttgttttctcctgcaaattcccttcgtgctatttcccaccagcgtttacaaaattgcaacattgctatattctacctgcctagctactggttaataacaactggctacggaggtaatcgaggtatttatcctagacagtagacacatagtcaactgcactggaaactttacctgtactggtcactagttatcgcactaataatttcttggtatttctaccctagacttagtcagcattcatctggaaactttcttgaacctaccccagcttctactgtagaatcgtagagcaaattatattcaatttagtggagtagcagttttaactctactccttaccaagttcacctcctctgtaaacagctggttacttatgagaaatgttaccctgattgatacttgcaaatgtttcctaactacttttgatgcttctcatgcatactttctgtgagatcgtctctttcttcatctcatattggtccctctcattttaaggttgtggtggctgcatttcttacatggcttggctggttcgtagctgggcaattcgacatataccctcgagaatggattccaaaggcaatggatagctttgagcttgctctgcagtttggaatatctgttcttgttgttgcatgcccgtgtgctcttggactggctaccccgactgctgttatggttgccactggaaaaggtgcttctcaaggtgttcttattaagggtggcaatgcacttgagaaagctcacaaggtaactgagatgatttctatgtcatgtattattttttctcacatcaaatgtattctattttttttatattgtgacactaaactattccttgtatttctttatgtgcaggttaaagctatcatatttgataaaactggaacgctgactgtcggtaaaccttctgttgttcaaacaaaggtgttctccaagataccgctactagagctgtgtgatttggctgctggtgcagaggttggcttcttagatgcaaatgctaataatttttgttgaatgtcgtgtgatgttcctagtttgctgtctcatgtcatctaaccttaacttttttctaactttgtcaggcgaacagtgagcatcctctatcaaaggctattgtagagtacacaaagaagctcagggaacaatatggatctcacagtgaccatataatggagtccaaggactttgaggtgcatccaggggcaggggtgagtgccaatgttgaaggcaagctggtgctggttggaaacaaaaggcttatgcaagaatttgaagttccaataagttctgaagtagagggacacatgtctgaaacagaagagcttgctaggacctgtgtgcttgttgctatcgacagaaccatctgcggagctctttctgtgtcagatcctctgaaacctgaggcaggccgtgccatttcatacctcagctcaatgggtatctcgagtatcatggtgacgggcgacaattgggctacagctaaatccatagctaaagaggtcgggatcggcacagtatttgccgagatcgatccagttggtaaagccgaaaagatcaaggacttgcaggtgcaatcttttctccttgcagcaaaaacaaagttggaatagatcacagattttaccaccattattccaacttacatcacatcatttgttcacagatgaaagggttgacggtggccatggtcggcgacgggataaacgactcgccggctctagccgctgcagacgtaggcctggcgattggggctggaaccgacgtcgccatcgaagctgccgacattgtcctgatgaggagcagcctcgaggatgtgatcactgccatcgatctctccaggaagaccctctcaagaatccggctcaactacgtctgggctctgggctacaacgtcctgggcatgccggtcgccgcgggcgtcctgttcccgttcaccggcatccggctgccgccatggctcgccggagcttgcatggcggcctcgtcggtgagcgtcgtctgctcgtcgctgctgctccagctctacaagaagccattgcacgtcgaggaggtggctgctggacccaagaatgacccggatttggtgtgaagactgaagaagcgtcggtcttgctgtgctgactgaaactgagcatgaagcaaacgccttgtttgcagtggccctcctgactgatttctgtacagtagtcatgttttgggattctctgtttttttttgggtacttctgattgattcaataataatttggggagcttaattgctatccagtgatatatagatgtgaaattgtgtttaaacagtggagaacagttgttgtattttctggcaagtgaccattgcgacgttgtagcattggactagttagtaactagttgaactgtaaactcattgcaaaagtaatctactctttagttatcctttggaacactgcatgcttatcttgcggaaaccgaactgaatcctctgaaaatcctataacatttcatctcaaatttgtaggaatatgttcgtcgatacgcgctatttcaaacaataaattcaaaagagcactgctacaccaattaaaattttcttactaaactcttaccctcaatgatctcaaccctcaattatctcaaccgattgatttaactatatgggattataaaaaatctaggatatattaatagcatgacacatcaatgctaataagagttcagtaagaaaaacgtagtaggtatagtcttttccaatcaaaaactttctgctctaaaatcatgtgaaaattcgtcgagatgtcaggacgggaacggaaggaaaatgatcggtaggcaacgacgaggaggaagaagcagcagcagcagccgcgcgtcccgttggttcgcgccaaaaatagcagaaaaaacccgcgcgcgcgacacccgcgtcgtcgtccgctcgccgtgtctaaacatagctaagctccccttcccgccgtatatataatccggcggcgcgcccctcctcgacatcgccgtacctacaaagatatcaacatggtttcctccacgagaaggacgacctcgtctctatccgccaccaccgccgccgccatcgcggcggcggcggcggcgctgatggtgtccgtggcgttcgccacagcgcagtacacgccggccacgccggcagcgccgggggctgcagcggcgggtgcggcggcgggggcgacgccggcggcgccgtacacgccggccacgccgggggcggcgggggcggcgccgtcggtgccggcggggccgctggacatcgcgcagctgggggcgaagggcgacgggacgagcgacagcacggcgttcgtgctgcaggcgtggaagaacgcgtgcaacgcgacggggacgcagaagatcgtgatcccgccggggaactacctcaccggcgcgctcaacctcaaggggccgtgcaccagcagcatcatcctccgcctcgacggcaacctcctcggcaccggcgacctcaacgcctacaagaccaactggatcgaggtggagcacgtcgacaacttcgccatcaacggccacggcatcatcgacggccagggccccctcgtctggacccacaaccagtgcaacaagaactacaactgcaagatcctccccaatgtaagcaacccacacccccatcgtctctctctatagctacctcctcctccgtttcatatcataaagtagttctatttttctattcaaacttatttaaattcagctaaatttgtatatacaaaaaagtaacacctataacatcgaattaattagtttcgaataaatcttatactctctcgtttttcatgcgcacgctttacaaactgttaaacgttgtgtttttttataaaaaatataaaatagttgtttttttaaaaaaattatattaatatatttttaaagtttattttagctaacgtttaattaatcaaatgctaatagatcactccattttgcctttgggaaggtggagtttccaacctccacatctgaatatagcctaagctggtcttttaaccagcaaacactattgagtatcacagtccatttataattaattgacatgggcaaaataaccaatgctgtgatagtaatttgtattgttatcttcttgcttctctgtatgactaataatgggcaattaattaaaacaatggatggatgcagagcttggtgatcgactactcgacgaacgtgacagtgagggggataacgctgaagaacagcaagttcttccacctcaacatatacgagagcaagaacgtggtgatcgacaaggtgaccatcacgtcgccgggggacagcccaaacacggacggcatccacgtcggcgactccaccaacatcaccatcagctccaccaccatcgccgccggcgacgactgcatctccatcggccccggcaccaagatggtccgcgtcaacggcgtccgctgtggccccggtcacggcatctccgtcggcagcctcggccggtacatacatacatacatacaactgcccctttccttccctatagctaagctagctagcacctgtttagatcgtgaaaagaaaattttttaatgtcacatcagacgtttgaccggatacgaatgaaaaaactaatttcataactcgcctggaaaccgcgagacgaatcttctgagcctaattaatctgtcattagcacatgtgggttactgtagcatcattcgtagtattttgaatatctatttaactattcgtcttattaaaaaatacgtaattcatatttattttgttctaagttgttttatcactaaaatagtactttaagcatcttatgcaattgcataatttttttaataaaacaaatgatcaatatgtgtctaaaagtcaatgacatcatctattaaaaaaccagagatagttaataactacttagtagataatttgtatgtatagaacccgataatattaacttctgttgtgtgtggttggccatctctgcaggtacaaggacgagaaggacgtggaggacatcatcgtcaccaactgcacgataaagggcaccacgaacggcctccggatcaagtcgtacgaggactccaagtcgcagctgagggcgaccaagttcctgtacgacggcatcaccatggacaacgtgagctacccgatcatcatcgaccagaagtactgccccaacaacatctgctccgcgtccggcacgtccaaggtcgccgtcaccgacatcgtcttcaagaacatcgtcggcacgtcggcgacgcccgaggccgtcacgctcaactgcgccaacaacctgccgtgccagggcatccagctgcacaacgtcgacctcaagtacgccggccaagggaacaccaccctctccgtctgcaagaacgtcgccggcaagtccagcaacgtcgccaaggagctcgcctgcgtctgattttcatcttattatactactcttccgtttcatattacaaagtcatttgtttttttttaaagccaattttttcaaagtttgaccaaagttttttaaaaaatatagtagtattttcaatatgaaaagaacatattatcagaatatatttcatattggatttaattagactaatttaatattttatatgttgctatattttttttataaatttgtttaaactaaataaaaattgactagaaaaagtcaaacaacttataatatgaaatggagatagggggagtaattgtcgtctgattatatagttgtaagttaatcatcgttccctccgctacattcccctcacttgtattcttcatctaattattttcctctctctccctcttcggatttttttaattattttcttctatttatttttatgtttgcttcttcttcgtttggaatatatgattcttgtcctgatttcatttcatttagtttactcgttaattgattaattaattaattgttatccgtttagttgtcgtagtttaatctcttcagttcaattatttttttgtttgattcttatttgtttggaatatatgtttttctttttctgattctgattcggatggaaactgatctgattcgtacaaaatataaaaataaccataccataagccgtataaggaacaaacaaagaatgatcacatgagctctgtctaaatctagcttaattcatcatggccatcttgaattttgcaaatcaacgttctcggtgcttgtttgagaccatacaaggctttcttcaatcggcaaacaagaggaattgctatgagattcgtgcgtacaaaaggtgatttgcaccagggtttcccaaaccgccggggccggggttaccgcgcggtaaccacagttaaccgtgaaaaaccatgcaaaatttatcaaaaattcaaattattttttaaatttatttgaatttaagaaggttaccgcggtatttatattaccatacacccgcggtaaacctagtaaccgcgcggttaccgacggtaagtcgaaccctgatttgcacccagtaaaacattttgttgtgtttttacttttgcttttaccagatagcttgctaccacgtactagcatagccctgcaatacatgcagcatgcacgagtggtttcaccagctcacctccaaaatccaaaccaaaattttggcctcaacgttctgaaccgttcgatcatgcgaccaacattacatcgattttcacatccagcattgcatgccaaaatcactgagacaatgacgacttcaaataagttcttattgtaactggagaacattaattacatcccttctgtaaagctcagggaagcataccttattagtatttttaccatcactaagcactaaaatatagatgtaactagctagatacattgcctcattgcatgctttcttcagagattattgacacactgatgagatgaaagcaggctatcctctatatgttggatcatggaagtgcaggcagaaccttcccagtgcaggttccgaatccgacattgtagccttcaccctgtaaaaacatgtagatggatggcatcaagatagagcatggaatcttcaaagatatttgttttagacgaaaagagctctaaatttggtttgatcaagacttatgagattgctgtaccttgcaacaagctgtcaagatgacctcatccccatcttctaggaacttgcgggtcgagtttccaactgatatctccttctgcccattccatgttagctccagcaaacatcccaaagattctgtctcctgaaagaaggcagatgtttagttgtaaacatgcacgataacttctagattggtatgtttatggtgatatttgaaatggttattccatacaggtccgcttagtgtgccagttgcaaacatatcccctggtctcagattgcatccattaacagtgtggtgtgctagttgctgtgttaaagtccaatacctgggaaaaaatagttacagtaaggacaaagctaacaaatacatatggtaatgaaacggcaatcggaaaacaggaagcatccttacagatgcttgaagttactctttgcaaccattgatggttcactttgctccttgggcttaatccagaccttacagaaaatgaaatgcagtaataatcatcagtttatgttttaatcaaatatctattaatataaaaatataaaagaagaaatgccatgagaaaatcctacctcaagaggaatatcgtagtttacgtggttcttttcagctaagtaaggcaaaggttcaggttcctgccacgcaaagcaatttaatttatccatagaacaataaaatgatgattctcaaggaaaatatggttaactatatactataatactaagacatgctcacctgcttaggagcttcacaggtgaaaggctttagggcatccatagtaacgatccagggtgatactgtggtacctaaaaatcacaaagtaggaaggaaacatgttacattgacgaaagataaaagcatagtccattgcggaaatcatggaagaatccactcaagtaattgtcgaggccacagtagaaatatgatcatgagcatttgtaaaaactaagcaataaatgtgcaggaaacttttcaacagagagtggtgtattagtgaacatggcataagtataactgaaaaggcatcaggtgtcttactgaaacttttcccaaggaaaggtccaagaggtatagtttcccaagcttggatatctctggctgcaatattatacaaaactcagtttaaccaaagtatgcaactgatctgaacgaaaactgaaaagaatacctaccactccaatcattcattatcattaggccaaagatatgttcttcagcatcattaatatcgataggttttcccaattcattccctggtccaacaatggctgcctgaaagcaacaagccaacaaagcgttatgatatatttgatccaggggaaatgaaaatatctataactaattacatacggccagattttataccacaatgacaaccaacagctcaaatttaacaaacatgcaacaggtatgtcaataacagttcaagaataccaaatactgtgagtcaagaggtttgtaagaaactaaccatctcaagttcaaaatcaagcttcttagaaggaccaaaataaggtcgagaatctcctgttggatggccttgccctctaaaaggcagagaaagaggacattattgacatatcaattggatattatgacaaaaataaaatgtaatatactacacatatgtatccatctacaatacatcactgcatgcaacaaaaagttgaatgcagcaaacatcatcgaatatagtgaattatttgaaagagggcattgagagcaataattaagcaaaatagacacttcagacttcagaggttatgtaaaactagaaacagctacccgctatccaataacactaatatattcaatcattcaaacaatagtaataaaactatctcgtaatctgacaggaatttgataactatccgaatctatgggatgcgtacttgggtcgaatgatgtctgttccagatacaatcacagaggatgcacgaccatgataacctactggaagctgaaacctgatgaagcaaacatacattgcagattagtgtttatgtcaaaacccaagtctcaagtctcagcacaaggcatggtcaagaaaatacattaccaatttgggttgactggggtctgtggcccacggaagatgaacccacaattccttgcatggtgcacagaacaaaagaagtcggtgtagtctcctaccgtgattggcagaagcatctctgtgtcgctctaaatgataaaaacagagaagttagtgatttcataaatggtcatcctgtttctcgtaacaaagaaaagagtagttgatcaagctcaccatgggaacaaggcacttcttcttcaaggcctcgttgtcacgcaaaaccggctcatcagctgcaaagattagagaacccattaaaaaaaagtgtaagtctacctcaggatctcataattcttggatagttttgaacataggcggttaatcgatactttcagttttgaacataggcggttaatcgatactttcttgcatcatgatacattggcacaacatagtactaacaacacaactacaggtagaattactcatcagcatcagaatttggggggcagaagccgcgctactcatcgtgcattactaacagcatagtagactactacaagatattgggaatttgaagtgagcagctaaagtgtgaaacctgagaggatcttctgcagcgtggcgcgcgcctccttccaggccggacgccccatccccaggaacatgttgagcgtttcctgcatgcacacgaaacaaatctaaaaattactactacttgtaaccaccaaaaatcacagtggaatcaaccacccaaatctccaatctccgcgccgcgcaaattgctgctaagcttagctcaccaccagcagatcaaccgcaacacaagacgagtaggtaaggtaaggtaggtaaggtaggcagggtgcggacctggcggaagcagggggaggcggagaggaggggcccgtggaagaggcccgcgtcggagacggcggcgaggtcgagcgcgaagtccccgatggcgacggccgggcgcggcggctccggctccggcgagcccctgcggcggaagaccccgaaggggaggttctggatggggaagtgcgaccccggcgccacctccacgaacgacctcagcggcgaccgcgacccctccgccattgccgactcctctctcgtctcgtgtcgtgtcgtgtcgtgtcgtggcgcagatgaacagtggaagagcgaggcgaggcgaggagaggaggaagaagaggccgcaataaataggcgcagatgaacggaagcggcgccggatactagcacaacgatatgaagtgtcctacactcctactactggtaaaaaagaaaaagaaaaattagctgcgtgatttatccaaaaaaaaaaaaggagccatgtacgatcaggtctctttctatggactctataaagtattaaggctgcgcccccacactcgcaccctttttaaactactaaacggtatatttttttacaaaaaatttctatacgaaagttgcttaaaaaatcatattaatctatttttgaaaaaaattagcaaatacttaattaatcacgtgctaatcgctgctccgttccgaacgcagcctaaagcctcatcgattatccacattttctctaataattttaaacggtttattgagaaatacaaattaattcataggtgaaactttgatatatttgtttgtagctaaaaaggaattacgttgaaaatattttaagatcaactttaaaattaagttcgaaaattcaaactttggtttttttctttagcttattagatcaaccgatgaagctcttactctctccatccaaaagtttagaacttaagtatttctattgccattcattaagactaagaaaaaaagttatcatgcatataagagcaagtttaataagggacttattgtttaggttatgcttatacttatggttataagccaaaattttaattttagaacttgattttgaatttgatctttttgttttctcatcgtagtttattttacaacatttggttttgaattgttaagaacacacaaataaaacttttactcataaatgatttatatttgcaaataagtgattcgaataagcatatgaataagcgaaacaatgggattgtaagtaaagctaactattggttattagttcatattagagctatcatgcataatagattaactataagtttcactttatttttttctctcgctataattttaatgtgatattttggagcatgtgtagaactagcttttgcattagagccaacacccatcatttttctttacctctttcacattagcttatagttggtttatatagcccactattatccttgctctaacaaagatcaagagctatactatgtatgtaaccaatgggcattaaaaatgttgcttgggttccgatcaacaatttaatctagtattgtaaaaagaaaagacaatctcttcatttcagtcttatgtacttaaagtctataaatatgtctattttatttagaaaaactaaacaaatagaatatgtataaaacttttggatggagggagtagtaatagatttaaatgcttttggatatagtcacggtaaaaatatagcaccatattctttaatttgatttcagcttggtttcccccgtgtgatcacttttatgtatgttttgaaactctcctatcttctctttcgagcacataattgattggtttttacaagactaactataatataagtataatataagtattaaaatttacatgtaactatagtgtaaatacatataatttgtaccgtaaaagaattaattatatttggtgccacaaatagagttagcctacatggttatgtttcgatgaaggcatgacgagggtctaaatagagacatggtcttgtaggatttttttttctggtttatctaaaacgtttgtgtggatttttgtggtgtcaaaactcaaaactatccaaggattatgaagcttaatttaaccgtctctaaacttttgaattttaatttaacttcgataaatttacacagtgtcatgtagagccgttgtaaacaaaggattttcctattaataattcggccaaccaatcaaataatagtaggatttttcgcaccgaacgaaaataggtctctccgtctaggaaaagcaaaagctgacgatcgacgatcgagagaaagtaggcgcatattccggttcaagtaaagtaatttacggtacaactgctgtgctcatacttctaggttagttatctctttggtaaaaaaaagctcatcatacatgcatagtgtaataaaaatcacttgagttttttttttcagaaaaggttgaagtacagaagaatggaagtagagttcaattcagataattcttgttgacgcacacgaatacacggtcgttgctactgagaaaaggacacaaagagtagaattcttgttatgctcttgtgcgctagctaggaacacatttatctttttgttaacttattggcaacaaccaaaatttaaaatttacaacactcccttataatatttgacgttggtttgaactagccaacatcttcaaatataacgaaacaaagagggctttttaaaaccatcaatgacaagtttttttttctatgaatcacttttgatcgctacacagatttttttcccactacctgcttaattcaaacggttttgaagaattttaagaatttaactgatttctatgagaatttgtaaaaccttttcgtttaaaaaggggtcatcatgaactgttttagaaggaaaagaaaaacaatttcttctcccatgcttggagagagaaatcgcggctacatgtgagggctcagcacgaatgagtgacgtgccaggttgccaaccgcccggcaccacacgcaccggcgatccgatccatccatccatccagccagccagcctacgtgtccagattcttctagaagatatcatcatccacacaacaaaccaaaccaaaatttccttttagggctcccttcaattggaggatttgcatagaaattttggaggatttaattttctaagaattttttcctatgaaaccctttgattcataggaaagtataggaaattttccttaggattgtattcatatagctcaatttcataggaaaataagcaagaggttcaacctcttgaaaactatcctttgctttgtttgtttcctatggtgctatcaaagggaccctcttcatatttcctgtgttttccattcctgtaggattaggaaaacacgccacttcaattcctacgtttttcctatttctgtgtttttcctatcctgcgtttcaaaagggcccttaaccaaacgagccccagcaacaaactctgatctagtcttgtatggttggcaaggcacgctctatagccaacttcaacttatagcctgttacttcctccgttgcacaacataagtcataatgtgggaaatgctagaatgacttacattgtgaaacggaggaagtaagatggacgtcgttttgaaccatatcattttttcaaaaaaaatgacaaatatatggatgtatttagtttgttaccaaacgttggtaatgcctacagaattttgacaataacacatttaatctattctactgaaatttgataatgttaacttacaaaaattttgtcattgccaaattttgaaaaagtttattttgcatcaatctagcccttaaacacttctgtcatccagtctgcctgttgcaaaatcagtctcaggcattttcagcctcacatgtaaaacaaaattacaaatacatcatctctatgtacgaggtaattcacaatccagcgagacaatatatgaatttatgatttaacttaagataaaattgaaaacaaaaaaaaaaagatactcctccgagtcacaaaattagcaaacacaagaacaatggggcatgccgcacacagggtgaaaaaatgactgaaatctcagcttctgctcagtgcacgcggatggtgcctcccggtgtttgtgcagggaaaaaaaaaatctctgtggatgttcagctacagctcttcaggcaaaacagacagggtgctgttagaaacaactaaggagggcacgagaacagcagcgacgtgttggttccaccaaacccaaaggaattcgagatggcagctcggataggcatcttctttggggaagatagaggcatgaacgcgccttcaaacagcgtgtctggtttttctagattaagtgtcggtggagcgatgccctgaaaatcgaagataaaatgttatgcagagaactcctgaactcaaactgttggtggtcagtaactgtagacaacatacatggtggatggctaatacggtgaagattgcttccactgacccagctgccccaagcagatgaccaattgctccctgaagaatgttgtgccatttgtcgtgaatgggagacgaaggaattgtgatgaattagttgcacatgagtgtgggggctatacctttgttgaggacaatgcaagaccacctgatgttgcatggtcaccaaagacagatttgattgcattagcctctacagcatcacctaattgtggttcaaatcaaaccatcaccttttatcattatagctacagatgacgtagaaccaagaacatggcttataatgaaaaatatatatatgaaaaaacagaagtgctgtcagtccagatgaggctttgtcagtctgactgtgccacttaccaagaggagttgaggtcgcatgtgcattcagataatcgatttgatctgcctgaaggcctgactagaataagaggaagaacattatcagaatgtaccataaatagccatgatgcattttacagttccttaacaacaatgtcaaatttctaaaatgtgccacacaaaaaatcacaaaggtgtatgacattgcacctgatccaaagctcgtttcatggctaaggtagcacctctaccatcattttgtggctgagttatgtggtgtgcgtcacctgaaagagtcattcacaatgaaaggcatcctaacgacagaataaacaaaactctttgtggaataggaggataccagacattccatagcctctcacttctgcataaatttttgccccacgttcttttgcatgatcaagtgcctacagaagagtatatggttaaccctcttaaggtcaaataagatgaactaaatgacactttccagacatagaaaaaaatgcatacacgatagagaaaaagaattagaatattaagggatcaataagtggatatgtgagtcaaactgatcataagacagatcaaagtattaaatggctgatattaaactacactcaaccagaaacttcagaacgaaggtgtaaaataccaacatttttctgaactcacctccaacaccataactccacaaccttcaccaatcctattaattattttgaaacaaagataagaatagccacacatgaaaaaggaaaaaaagaaagggggtatgatttgataaaggatgacatacacaaatccatctctaccacaatcaaatggcctggaagccgcttgaggaagagagttatattttgtagacaatgctcttaatctgaaaaacaaataacatcacaatgaaataagataaggttggccacactaatcagaggagcagacgcaatagggaatagggaacactgaaaaattagagataaagtttgcatatggatatttatggaccatgggtgttttgtgtacatagttggttgaggtcccctattacttcctacagccataatgtgaaaggtataccatataacctaaataaagcattgaaaaaacttacagcatttgcataaagagagcatataaaagagtattatggaacattagtaaacaaaacaagaacaaagatgcttacctagaaaatccagctatagacaaagcatcaatgctggactctgttccaccagccaccattacatccgcgtctccaaattgaatcatccgtgtagcatcaccaatagagtgggcacctgtggcacaagctgtcacagcagcatggtttggaccctaagtttgaaccattaattatctgaattagcatccatgtacgaaatgaattatagaatgaaaagcctgaactatggcatatgacaattcacctggaaaccatatctcatgctgacatgaccggatgccatgttaatcaaaatcttgggaatgaaatatggactgaggcgacgtagacgctgtgccataataaaaataaatttcaaatttcagtgctgaagttactggaagattgtcgtttacattgcaagtcacctatggcactgcttagcaaaagcataaaagaatgatgacgagtagagagttcagcacgtagaaacacaatagcggtcaagataaatcatctagaaatatagaaatccaactgccatatctgccacaatagctaataataccaatagaaaaaaaaataaaagagtgtggatacaaacattttcaagtatcatctgcgatgcatctaaaatgtctgagatgcttccaatccctccaccgattgagactccctgatacaactccaatcagacaccgcaattcagaaacacataaaaaaaatatatagttcataccaacagcagtttgtaccgttct

SEQ ID NO: 9137 - DNA, 28034 bp, Oryza sativa
ggccaccgccaccgggtggtccaggtgcggaggtcgtcgtaccacaacgtggtgcgcgtgtcggagctggagcgcacgctggacctgacgcgggtgcagacctacgtcatcaaccgcgacagggtcgtcttcctcaacgagcgcccgcaggcgccgcgcaacggccggtgcgccgccgccgccgccgtggcgtgcgccgcctgcgaggcgtgcggccgcggcctcctcgacgtcgccttccgcttctgctccctcggctgcaaggtcagagctccggccgccggccgccggccacgctcctttccttttccggccgtctccgccaccgtctttgccgtttttgggcctcgtccgaggagacgcgtctcgtatcatcagtgggttttgcgcttcatctggaccgttggattgggaaccaacggcccagatagatctagacgtgaggaagaaatgggaacgtccgtatgctgggccggtcagtcttgcatgggcctactcagcccaattaggaaattagcagctctctctttttttttttgggaaaaattcaaatctcccttttcaatttacttccacgcagtatgctccctatatagagcatcaccaacagtctatacctatctgattcccaaaattgattttaaaggaatttagttcaaaaaacagctccaacagatctcttactctcctacgagtttgttttggagttcccttttcccgatttctcgctccgtttatatacaggcgcgcggtctcgtgaaagtcgctcccaatctcacactcccgcctctctcctaccgttccagcgtgtgagagatagcgatctttctgcacgtggaaaaaaacagaattttctgttcgtagtttcagaagggtccacttttaagttttttcacttcctatttttattttaggaaacccaaaaataattttttggggagattatagataatctgttggtgatgttctaaacaattctctttaagttttctcacctctgtctagtttacgttgattcttcgtcatgtttagagatttctcacatcctgtgaatcttgagcatggtgagcgaagtttctcaatgtcttccttaaaaaaaagtttctcaatgtcttctcttattgggaatgggatttaatatacctttttcatatattatgtgatcgattgtcatttgtcgtgttttatcgtcacacaagctgtttaatttaaacatgcatgaaaaagtggaaggtggagggagaccgagggacacacacctttggtggcaaagaacaacttaacataccacaatggtcaatgaaagcccacggagtgtggagaaagtgttgatggaggttgaaagagaaaaatgaacttgtagggagtatttaattttgtacaaaattaaattgtaggggtgtaggggtatttagattttcctctctcttttttccatttttcattcaggcatactcaacaaaaccatgaagctagtgctaatcaattcaacacaccatcgaactcatatctttctctactctctagtgaaagagatttcttccatcaaatgaaagcatctccaacattgaaactcgaatttccatatacttttctgattatcaacacaccatcgaagttgcgtttagccgtcgtagtagtttcctagctgaagtttttgttttgctttttttttgtccttcccctacataggcatacctggccgattgtattgtataagaaaaactcttttttcttctattgacgtgcaattcatttatgcgttcatgaaaaaagattattaattctgatcacttctgattaactaactgaatcaccactctaatccatactactgaataatcttatctatctcctgttgatgtcagctgaaatgcatggaatcggatcctaccctgacattcaccatcgatcccaacaacatcccagagccacagatttcagggccacaggaagacgaggaagaagacgacgacgaagaagacgagccgttctacccaaccaaggcgaacgctgctcagagcaaggccgcgggcggcggcggctgccggccgccgccgccgccgtccgcgtcgtcgtcgcgacctaggagaggaggacgccgggtggctagaggcgacaaggaagaggatcaggaggccgccgccaacatcctcgccttcgccgccgccgcggcgcggtcggtgccggccgcctccgccgccgaccccaacagctaccggcggcgcgctaggaagggcgcgcaccgcgcgccggagcggtcgccgttcttctgatgacgatggcggtggcggaggagatgctcgccgtcgtcgtcgtcgtcgtcgtcgttgcatgctggtggtggtggtagctgcatgcgaggtctgaatcacccgatttttattttaattttttttacagagaatgggaacttggttggttaaattttctgtggtgaaattcgcttgcatgcatgtatgctagctacattttgattaatggtgggtaagaatctagacattttgatgacatttatcctcgagaatttgaatttcccgtgtgactgtgctatgttatgtatatcttagagcggaattgtatttgttgcacaactctgtttttgtctctacattaaaagtacatgtgttccatattcatttgtagaaaccaaaaacactaaaccgttttggttgaagggggaatagtgttagtattttttttccccaaaatttgctaaatctattatgtagtaatataatggatagatacgatgatgtgatagttctgtctcgtggggataattcaaaatacttcttttttttaagataacggctctaggtatgttgtgcagtgtagtcaaatttcttgatttcctatatgcatataattttttttctgcttgattgcatgctatagacctatagtattagttgggcaaaagaaagaatctattcttcctaattaagcagctagctacaagccaccatctaccttttgtttcctaagaaaaaacaacacaagattgtgccttttattaaatactccctctggttctataataattgacgttttggataaggttgaggttaaacttttataactttgaccatcaataactttaaaaatatctaatttaaagaaactagaaaaacatatatagatttgtctttcaaaacactataataaaagtaaacatgcatttatttattgtatatattactagcaaaaatgcccgtgcgttgcaacgggtaaaattttttattgataatatatgtttttcatgcataatcatgtcaatgacaatgtttctattttaatgagcggctttttttataaacattgtttttttttcttgcgcgattttctcaatccatttttcagaaatggcgcatttctttataacaaatttttcctagcatgttttatttttgcttattttactgacaaagaaaaccatatttttctcccttttatgcttttcttttctcgtatgtttttttgcctattttctcgcacgttttttttcttgttattttcgaatgttcttttttacttttttttccaatacagtagaatgtatgacgaaataaagccatgtagtagatggcaaaaaattgatggatcctatccgactcaagtgtctatcaatttagcttttttctaacagttttttcagagcgatttattttttagtagacggtgtttttttcgcgcggttttttaaaaccaaacttttagaaatggcacgttttttctagcagttttttttcctcgcatgttgtttttaaaatatttttaccgatgatggaaataatttttctcgcgcatttttttattgaagatggaagacctttttagcgtgttttttacgctttttttctgacttttgcctcacgggttttttgaaccgtttttattttctcattcattttttctttttaaatagttcgattagattagagatagagaagagatatatactggttagaactcggattttgtttcaccctttccatttttttcttgtgtgtattttttattttatacgaaccatttttttcgccactttcttaggaaatcggacgaactttttttagatgttttttcatttttttttcgtttttaaaggaattgtatctagctttttttcaccactttttttttttgccttttctatgaatcaattttttttccattcggatctacagtttttttcgccacttaggggaaaaatacttttattcttgttgtttttctttattttctttttttaaggctttcctttttcttttttctttttttttgagaaacacagtacgtacgcaggcgctcacaacgtgcgcacactcacccctatgaacgcacacacgcacaccctaccgctatgagcacatctgaaagactgagcctttttctttttatgcacctttctgcctttgttatctctcttttattatttttttaataaaaatgacctcaagtaccttattgcaagatattagggactcaaatgtaaatataaaaattacagggactcaaatgcaaaaagtacaaacccaaaaattaaaatcatataaaaatggaatgatctcgacttgtaggtttcatttttgcaaacagatcttcaatccggcacatcaattttttcaccaatctagagtcgaactttttttttggtttatgagagggaatcggatataggagtcggactttttattttatttttttcgctaatcagcccaaacgaaaacggatgggagtttgtttcctatttttgtggaatcggacaaatttttttcttttaccgcgtcgatggaatttttttttgatcggataacttttggttttttttcccttttttctgatcggacttctggtttttttggttttttttgccctttttttttggatcggacttccttttttttgtccctttttttatggataactttggttttttttttgccttttttctggatcggacttctttttttcgcactttttttttgcccggtttttttatcggataaacctggttttttccatccgttttttttgttttttttcgcccttattttctggaccggacttcttttttttgtccggtttatttatcggacaaacctggttttttctgcccggttttcacccggtttttttgacggacgatggaggtacctcttattttttaagtagtagagataatagaaaaataaggtcaaagatatatcttgtagagcgtgtcattgtccaaagcgttaattaaaatgaaaccgaagggagtagagcagaagaaaagccaccttctacttagatacacactcttctatttgaaaatatacacaagcatttctagttatgtacctgtattttataacggagagaatagtagggcttgcttcatgccgaagaatttattgaattctagacgatgacacaattgatttggacagtgctaccaaattccctgggaggcacgtccgcacgtacgcatgcagtagcatatgcccacttgcccaggctgaaatatacaccagattaattatcagtatttgttcgctgtcacagtttgcaacacggaatattaggcgcataatattttattaggcaaaacgtttgattaagattgctgtaactatggtaaacacctttgattaagaggatgtttggttgatgcctaaccttgatataactaagtttagactagctgtggcatggtggaataagcgtggtttagaaataatttgtcacaagtacggtatgcttagctctaaatttgagaacatgacgtgtggattccaaagttaagaaagtgtggtataatatatacaattgcggcagcgaaacaaatacatgcctaaaaaattgtggcatggctaaagtttggcgtggcaaagtgtggcaaccaactaaacaacccctaagattgttgtaactatggtaaaccactcctcaatagttctgctttgtagtgatattttttccattaagaagtcaagcagttaagtttgtccctagataagctcggtaagtagcacttgtttgaccatgtttacttacttgaatatatagaaaggcagctatttcagtcagcaacgaaaaagatacgcatgatgttgcagcattactcgatcggtctccatcactaactgatatgatcatgactggatgaccggccaagtaatcaggttattaattaattacagtagctgtttaggttctgatcagccagctgaaactaaaaggtcaatttcctgcatgcatgatcggtaatcagtactgtacactatagtggattagtccaaaaggccggcgctctggatagaacttagtttgatcttttccaagataggagtaattctagctaaaagaaaaagatcttttccaggatgtgatttgtctgtagaactgtataacaagctgcatgcgaatgtactgtgtcggaggggcgacggcaacgaattgaaagctaggattacgaggaagtaggtacgaggaagaaacccaaaaaaaaaaaaaaatcgcgaacacggaacccagaataatctttcgtgtaggagcgttatttagagcttacccctccgtaaaaaaaaaagataaaatcatacctacaatcctacacacatgtgtgtccaagttcgatcgtaggtatgaatttgttttttttttacggagcagtagcttggataattcttttctccacgaacaagattcggattatattgtaggggattggaagaattagtttcgtgctaaagttggaacacccttgagtgacaacaagcacgctcaaggaaggtacatatggttctcttgacatttaaaacttcgagtctcttgataaatctattgagatatgaaattaagagaatggtatccttttcagagtatatatcttcctattatggaagattttaaggaggtacaactactctaaaaagatctaattccttttagcaattaagaccgtgaaacagaattagaactacctgacttgtactccctccgtttcaggttataaaacgttttgactttgatcaaagtcaaattgctttaagtataattaaatttatagaaaaaagtagtaacattttcaacccaagacaaatttactataaaaatatatttaattattgatttgatgaaactaatttagtattataaatattattatatttggctataaatttagtcaaatttgaaacaatttgactttaaccaaagttaaaatatcttataacctgaaatggagagagtaatactgaaactaactaataaactaatagcttactcttaagaaaaaagctaatagtagttactctttcgtttaaaaatatagcaacctaataagacatacgtcttatgtcccaaataaatcaatcctatgaataaacatgaacacgcgatttattttgatagtacaaaggaagtatccatatatatgtaggtcagtgcagaaggttctaatgttgaaaacctaatttctaatttcgtccgggcttttcaaaattagcgaacggacgaggcaagaacgcggcagcgaacgcgacacggtagaacaagttccgagttccgacgcgacgcgccgttggcgcaggaaaagtccggtcaccccaccccactctctcgcttgggccgcccgcaacagcaaaccagcctagcgcccgcgctgacgcccgcagggctgcatcgccagtcgccacgcgggacggacagagtcactgccaggtgggcccccagtagaggcggggagcggccccgcgagctactggcaggtgggccccgccgttacttcactagaaggcgggttcgcattctgtgggaggggagcgtccgagcgtgtggtcgccgctgctgctgctgccgtcttcgtatgtttttttttttttttagccgcggaatcgtcagagctcaggcgctcacaccgtcacacctgacctgacacaaacgagtccacggcttttgtgttgacttgtctcacgtttttttgccttctggtcccttcacaagtgccattttgtggagccagacaccaaacaagaaggtcaaactgctggtgcttttctttcctcaattgcttctagaagcagtggggctgtcccgtacggctcagatatggctgccaagcaacgcgcatctgcgatatcgaatcagtgaaaattgtctacagtaatatagctacagtagtcgtggctgataggtagaaccggacccatatgttagcggcttctaccgcagctgcagtactgcataggatccatgtccgtatcgaacacatgatagtagtagctgtgacactgtagctaatacaggcagtcgagcagccgtgtagtagtgttggagtacattaactaatagcaagttaagaagatgttcatcttgttatcaaaattaatcctaccaagttttggtttctatccaaatttgacaaggtaacaatctaacattgataaattaatttatctccattaccaaattctggtaattttagaatcttcctctcacgcaaatttggcaatgataacaaaccaaacttaatttacacctttcaaccttaacaaatattaacaatgccaaaattcagcattaccaaaatttaaatttggtgcggttgatttagacatcaaagtgaagaaccctaagtgtatagtgctctatattaatagttacgtactttttccatctcaaaataactttttttagtctcgtttgtttaaaacaaggtaaaagaaaaaaaatcacatgtaaagtatattgaagataatctgatttgcagataagggtagatatgagataaatgtgaacatatttttaagaaaagttagagttcaaaaaacgaagttattttagagagtatggactagtaatccatcactaatcactcttaaaaaatatcgtctcgttccatgagcagggctattagtctcataacttacatctacatcatccagtcgactaaccacaatacttgaccaaaaaagtaaagaaaattattttctccataatttcccaagaatcaaggggcttaaacgaaacaaactcatcactttccccatttcgcactctatatatacaccatccatccattttcagtctacgcatccaacctccgaactagcaatagaaaattccaacattttcgccaacattaattcccatgggattgaagctttcttgcatcagccggcgacgcggctcgccggtgccggcgccggccagggtcatcgccgccgacggctcgctcaaggagctccatgcggccgcctctcccgccgtcgccgacgtgctccgcggcgagggcgagtccttcttcgtgtgcaactccgacacgctctacttcaacgagcagccgccggcgatggcgccgggggaggcgctccggccggggcagatatacttcgtgctcccggcggcgatgctcgggcagccgctgtccaccgccgacatggccgcgctggcggtgcgcgcgagcgccgcgctcgctgccgtcaaggcgccgcgccgccgaggggctcgccgcggcggcgacaggaagatgaagacggtgcgcgtcacgccgctgcgggacgagggcctcgacggcggcgacgtcctgctccacgagaagctcaacgagcggactctgggtgagttcccggcgtcgtggagcccgccgaagagcggcggcgagaagctcgccgcggcggcgcggtcgcggttgaagcgcgtgctgagcatcatccaagaggatgcataaatattcaattttttccacttcttttttggggaaacaattttttttcagaagctcgaagcccaatacatgcttaaagctttaattaatacttgctctgtttcagaatgtttcagaatgtttgacaccgttagactttttattacgtgtttgaccattcgtcttattaaaaaaatttaagtaattatttattcttttcatatcatttgattcattgttaaatatattttcatgtacatatatagttttacatattttacaaattattttgaataagacaaacggtcaaacatgtgctaaaaagtcaacggtgtcaaacattttgaaacggatggagtatgtttaattagtagatttagaaagaaaagaatactggggaaaaagattcatggatgaatcaccctcttgtatatacgacttcaatctgtagttgcaaaactacaaaaatgtaaaaaaaaagttgatctttgtacaatttttcctgatgtacatttcccagactctgattttctgctggttacatagaaagatggagaattaaggaattaattcaggctgtgtagaacagaagctacatggtgccagttagtgtcattttcctcgcgatcacagtcgaactttgtattatcctgacatcatttgcaataattgtgaaataagtgaaccccttgataatcgaaatgttcttaccaaatttccagtctgccttttactccaatccactccactcgttagacaattcccaacccagaaactattaattagttttcatatttgccatatcatatagatattatacatagaaactatatatatataatggatggtttcttaaaataaaattctcatccaatcatctcccttctctcttcttttatccacatattctcttgttttcattctttatacttgtgtagagatggtttcttgcataagaaatggtttcttcacctctttatctctctcattaaaatattatggggcggagggagtaactacctgttctaaaatatacgcaagcatttctagttatatgtttggacaagtgtattttgaaactgagagaatattatggcttgcttcatgccgaagaattgattgaattctagacgatgacaattgatttggacagtgctaccaaattccccacttgtcaggctgaaatatacactagattaattatcagtatgttttcgttgtcacagtatgcagcacggaatattaggcgtatcatattttattaggcaaacgtttgattaagattgctgtaactatggtaaacaaatttgattaagatttttgtaactatggtaaaccattcctcaatactcctactttgtagggacaatttttccattaagaagtcaagcagttaatttgtccctagataagctcgggaagtagcacttgtttgactgtgtacttgaatagaaaggcagctatttcagtcagcgacgaaaaagatacgcaggatgttgcagcattactcgatcggtctccatcactaactgatatgatcatgactgatcgaccggccggccaagtaatcaggttattgattagtactacagtactatactcactcacaacaaggtcaatttcctgcatgatcggtaatcagtactgtacactatagtggattagtccaaaaggccggcgctctggatagaacttagtttgatcttttccaagataggagtaattctagctaaaagaaaaagatattttacaagatgtgatttgtctgtagaactgtataacaagctgcatccgaatgtgtgtcggaggggcgaaggcaacgagttgaaagctactccctccgtcaaaaaccaacctctgagaagatatgatccctcctaatacaatgaatatggataaaaggcagattcgttgtactggaaggagatctctcctatgttggcttttttttggacggagggaataggaatataggcgatggagacgtaagtaggtacaatgaagaaacctataaaataaaataaaatttcgcgaatatgaaacctagaataatctttcatgtaagagcagtagagcacttaaatagagcttagtttcgatagttcttttctccacgaacatgattcggattatattgaagggtttggaagaattagtttcacggtaaagttggaacacccttaagtgacaacaagcaagttcaaagaatgtctgttcctcttacgtatgttgaaaaatctgaacctcttgataatgatctattgagatgtggaattgatagattgccaatccttcagaacatatacagtgtcctattatgaaatattttaaggaggtacaactacccaaaatatctaattcccttgagcaattaagattgtgaaacaaaagcagaactaccatacttctaatactcaaattaaatactaactactagtagtaatagctagcttgctcttagaaaaaaaacagttattactcattcattccaaaatataacaaggacgtacatatatggggtcagtggagaaagtacccaattttgaacatctaatttcgtcccaagtttgaacatctaattttgaacggacgaggcaggcaggaacgaacaacgaagtagcgagcgcacgcgctgtacggacgggaaggcagagaggatcgcgtcgctgacaggtgggccccagtagggaggcggcgaacaactgacaggtgggcctcgcgcgccgtgccgaatccccccacacaccactgggttcggattcgcattctgtgggaggggagcgtgtggccgctgctgctgggcgctgccgtcttcaggtttgttgccccgcggaatcgtccgtcagcgctcacacctgacgccactcgatcggtggcggtttctgttgacctgtatcccctttttttttttttgcctactggtcccttcacaagtgacattttttttttttgcctgctggtgctggactggaccggatgtgctttttctcaattgcttctggagtagaaccagttgggcagttccgtaggactagtgctcagttcttttttttaaaaaaaataaattacacagtacaacaacgcagttgggaactaatctctcacttgcaaaacaacgtaactcacgtatatgattaattaaatacggagtattatctattttatttttaaaaatagattaatatggtttttaaagcaactttcgtatatatattttttaaaaaaaattatttagcggtttgaaaaatgtgtgaaaaagagtaagctgaagttggaaaagtgaacaaactaacccagcctcatatggatgcctagcaacaagcatctacagggtcgaacacattactagctatgataccgtgacaggcagacgaaccaccctgtagaaggatcaacatcctttgccgtcactgcaccgtgcctttgtcactgacatgtgggtccgatgtgtcgtcgggcccatacgtcagtgataaaggcacggtgcagtcgactgcaaaggatctcaatgccctgtggtagtgtatagtactatatagtttgtttctattctttaccggcgttatcttttgatgatgaaagtatatactccctcagtacctaaatatttgacgttgttgatttttttaaacatatttgaccatttgttttattcaaaaacttttatgaaatatgtaaaattatatgtatacataaaaatatatttaacaatgaatcaaatgatagaaaaagaattaataattacttttttttaataagacaaatgatcaaacatgtttaaaacagtcaacagcgtcaaacatttagggacggagggagtataactatagtatactccttccatcgcaggataacatttttactcttgtgtgttttaaacaagataaaattttaaaaagaatcaaagtgcttatcattaataagaaagtagtactggtaaagcaagtatataaggtgcccggccgtaaagtatattgaaggtaatctgatttgtggatcgataataagtagaagataaatgtgaatttattttgggagaaaaagtagagttaaaataaagttattttagagagtatggactagtaatccatcactaatcactatatcattgggctagtttaggttgatgctaattttttctgctactaaaatttttggtaacttcaatagtgtcaaatgcatgtttggttttgataccaaattttatctataatagttcaaattcagtagttctatctatttagggtaaaaattgtttcaatccaaacaagctcatcttgttccgtgagcgggtctatctattagagcatccgacaaatatagcagatatcttaatttaatttatactggtttccaagttgtaattaagaattattcatatcaacactcatgatagtagcatactcccttcgtctcataatataaagaattttgagtttttgcttgcattgtttgatcactcgtcttattcaaaaaattttggaattattatttatttttttgtgacttactttattatccaaagtaatttaagcacaacttttcgttttttatatttgcacaagttttttgaataagacgaggggtcaaacaatgcaaacaaaaactcaaaatcccttatattatgggacggagggagtaacttattatattcagttatctcataaccttacttacatctgcatcattcagtctactaaccacaatacttgaccaaaaaggcaaaaagtaagaaattatgttttttttaaaaaaagtaagaaacttattttgttcatataatttcccaagaggaaaggggcttaaacgaaacaaactcatcacttcccccatttcgcactctatatatacaccatccattttcagtctacgcatccaacctccaaaccagcaatagaaaattccaacattttcgccaagatttcatgggattgaagctttcctgcatcagctgccggcgacgctcgtcgtcgcaccagccggcgccggcgccggccagggtcatcaccgccgacggctcactcaaggagctggccgtctcttccgccgtcgccgacgtgctccgcggcgagggcgagggccggtccttcttcgtgtgcaactccgacgcgctctacttcaacgagcagccgccggcgctggcgccgggggaggcgctccggccggggcagatttacttcgttctcccggcggcgatgctcgggcagccgctatccaccgccgacatggccgcgctggcggtgcgcgcgagcgccgcgctcgcggccgcggccgccaaggcgccgcgacgccgaggggttcgccgcggcggcggcgacaggaagaggaagacggtgcgcgtcacgccgctgcgggacgagcggctcgacggcggcgacgtcctgctccacgagaagctcaacgagcggacgctgggtgagttcccggcgtcgtggagcccgccgaagagcggcggcgagaagctcgccgcggcggcgcgttcgcggctgaagcgcgtgctgagcatcatccaagaggacgccgagtgaagatagatgaagattcagctttttgtcccccttctttttaggggaaacaattttttcgtattttttttcagaagcttagagcttaacacaagtttaaagctttaattaatttgttcaatactagactagatttagaagggaaaaaaatacccggggagaagagatccatgcatgatcaccccttgtaaatactacttcaatctgtagatacaatcatacaaacctacaagaatatataaaagttgattttgtatttttatgtacatttcccagctgctatagattgcagttaatggaaactttcaatctcctgacgcactgcaataatcgtgcaatcagtaaaacactgacgatcgaaatgctgctactaacttttcagtctacccaataagaaactcaaacttcaattccactgcaaaaaggggattaaacagggtaattaacacctactgacatgcttagcatattaatcctccaatcctatgcatattaacacctacggtcatctctcagttgcttctagtttgggatgcggtgcttcctacctagctcttatcgggcgttgaggatcgtttcgtttggtgttggacgagtgatcagtgttacttggcgcgctcagcataacaggcattcttctttggctagcactcatttgcctgtgccaacctgctctggcacgcgaaaggccatgccaaatgcaaattctttcttcggtttgcatatcagcagcgttgctggacagctgatctttttcaaaagcgtggtattgatagccactatgtctgtcccttttgcgctcaggagtttgagacggcgaaccacattctcctcgactgtgtgttcccttgacagacctaacaccatgttttgtcacctgagggctggactgccctcctctccggtggcaatttgcttaaggactggtggtcgtctggtaggacttgcttacctaagcatcttcgcgcatgcttcgactccctagtcctactgatctcttggcagctgtggaagtaacgaaactctagggttttcgactcggccctttcctcggtttctgtgtttatagagtctatccactcggaaggttgtctgtggttttccgcaggcattacagcttttgagggtttgctaggagtgtagtgtggctccgtcctacctctcgtttgtttggagtagcctttgtttcgcaatagttttttcctttccttttaccttttggtttttttctttcttcacccccaacataggcctgtgtggccaattgcgttgtgtaacaaaaactctttttattctaacatattgatgtataactattttgcgcgttcgaaaaaaaaatcctccaatccagcccttaaaatcctaaaccaaatatagcctaaggtactaggaaaaatgtaagcaatttactcatgttgcagttataaattaactggctcggactcatttacaatgggcaaattgaacaggtttttattttctttttgcaataattttgcaatttagtcatttacacacacaattttcatgatttactgcataatatgatactatgatcatgcagtaaataatgaccttaaatattatcaaatgtagtagatactccaaccatcaagatttaaatccaggtacacataatattaagcacacccggttatgctattaataggaatttagcgaggtcatgaatttgacattagcttctgtctctttgcgcaagtgttagaatacgtttttgcagatgtgggtgaaaataacacagtattttaccaggttaccacctcatgagaatctccagtataacgataggtccatcagtttgataaggacagtttggtctcaactcccttttaattttattatccttgcattttttacattctccagggaagaaaaatgcactagaagattatattctactccttttcagatgccgtatgcatcggtgctctctatttcccgacgagataagtaaaagaatcggtcaaaatattcaccagaaagagagtttcttggaaatttcaagccactctggtcttgctaagggaagtgccaatctcgggtagtaattaacgacccctaagtacggtaatcaacacaaaaagattaatttattgtactgatctccaaggagcgatgctaattgagatgatgccagaaacgtcaaaattagaagcagataggaagaagtcatggtcagtgaaagcattaacaaatgacgaattaatttggcaatcagtggccgttttatccactgatcagtcaaagttcgtcagttagctatgcccccagatcgtgttgcaatcaactgttttggtgattattgtatgaaatccttgctttacttgatgactaacgatgcatgcatgcgacgactgaaagactgatggcgtcaatgattagatcagagctttgcactgatgaaggcttcatctcggcctgcctcatgtggctaactaatggctatacacctactttaatcttctgtgttaagcaatttcttgattgattatgacaactaccagctgcaattatgtgtcctaattccaaatgtgcatcgaggtaggtcgacgacatggatgatcctgtggagaaaaatagtggcactgatcagcttctgaaccttaactaattcagtttgtctcctcttttgtcctctgtagattgcatgattaaaactaagcaggtagcaaatgagtgaaaatagagagacggacaaaaggagagtatgaaagcttggattggtggtgtttggttggtgatcttctcaacttatcagcatttttctgcacccaacactctgaaataggaaatggttgcatgactgaccactgacattttttttaatataagaaggtagagcctatctaatagtcatttcattgaaagaaatgataagttataaagtttcatgaataaggggaaaatgattaaaggaagaggaaaggataaagagaaaaggagatagacttaccactgactcgggagaatactggaaaaattcagcatcaagtgtgggaataaacaagcatacgcgcttgtgtacctgcaatcagagactcgtaattagagccagctgcaaatatattttaaggagataaatcaggagagagaaaagtagcgggctacagatttgtagctagctgtagcacggactccaagtcgcagtatgtctatgacaggtgggactatatattaatagtgtggtatgtaactattatataaatgagctattagattggctctagatgaattggagctagtagttagctatactattgaacttgctcttagccaattggtcagtgtgtcatgtagttaattaatctagattaagatgtagcttgttcataattaagatgagagatactctaaaatcaagtgttctcaggtacaaagagtaggaccatcagactgaccaaaacttgtgaagacatgcctgcatcaattagcaaaagttctttaaaaatttcagttaggactgatgctgtctgaaaatctgtatacacacgaaagattagaagattaatctgtatgcacacatcatggatacgtacgcgtgatccgtcgacttacctgtcgaagcaaacgtgatagtcttgcttcttgaattgaaaagcatgattttacacaaagttgattatacaagttgatcagatacaagttgattagataagccatgggagtagtagttaagcactgttggtatggaaatggaattagcatgctctaagtcactttgcccaagttgcccaacaaccaacggggtgtgaaatgagaagtgacccattgttgaaatgaatccaaatgttagacaatgcaaaaggtgttataagatacaggattttcttcttgtttttttccctttgatttcagggaagacgaatgcacatgcacacacattataacgtaaataggccacacgcctatggacataagtatgatttctaaactatgtttaaagagacagaggctgctgtaaatccttcattttattaaatttatactaaaaatgtaccaacacgtataatatgaaaccataacggacgaagtcatacagacatgaattcacaatcaaatttattttctcaagataaaatgattttctaattgcatgggttgtcattaatgagtccaaattaataaatgcctaggtatggggtatggctatttcctctgcattaagtcatctcctttcctttttttttctttcaaaggcgtaaaattaaaactatcagcatattagttctctgccctacgaaattattagtactgccaaaatcagggtaaactatggcactactaaagaattggtaaggtaaagttatctaatgtatgtttggattgtgaccaatataaagccaaatttaatattgtggtgaataaacttctagaatgaaccaaataaaatatgggcactacgaattggttgacctcaaccaaaactagcacatttagtattaaagttataaaaaaattggtaacgcacatttaccatgtctatacgcctatagacatatagaggtttagccacaccaattcttactagaaaaagtgatttagctacaataaggttttttaatccagatgtgtcaattaataaagaaaaaaatatcctcaatgaaaattcatcagtgccctatcagtcccggcaaatccttaattaattaattatgcatcatctattttgttttgaataatggaaagacacccggtccaaccctttgcttttgccactctataaatacatcttcttcatccttaatccacctgcaaaataaaaaattcagactcaactctccttaatctcatcaaaaacacacacaaaagcacacgaaaatttcaatgggatcgaagctttcgtgcatctaccggccggagagtgacatcgtcgtcgagtcggaagctccggcgccgccgccgccgccggcgagggtgatcgcggccgacggctcgctgagggagctgccggcctctccctgcgtcgcggtggtctccgacgtgctcggcggcggcgacgacgcggcgtccttcttcgtgtgcaactccgacgcgctctacttcgacgaccgcccgccggcgctgtcccccggcgagccgctccggccgggggagctctacttcgtgctgcccagggcgatgctcggccggccgctgtccagcgccgacatgggcaggctcgccgtccgcgcgagcctggcgctcgtcggcgagaggccacagcggcggcggcgacaccggcaaggcggcggcaagaagcagaagaagaaggtgcacgtcatgccggcgcaagcgcaaagcagagacgacggcgacggcgacgtcgacggcgtgttcaacgagaagctgaacgagcagacgctcggcgtgttcgccgtgttcctgagtccggcgagaggcgccgcgccggcggcggcggcggcggcgaggtctccgctgaagagggcgttgagcttagtagaagaggaggcatagtagtgaggcagtaggaagtagtagtaggaatccgtttcttgttttgcgcaaagtagaatgaaccagtatatcatcctcaagtttggttgtactcacaaacaaaaaaaaaagagaggaagaaacaggacgaattttgaagtaaactaggccttgtttagttccaaactttttctttaaactttcaatttttctatcacattaaaactttactacacacataaatttttaacttttccatcacatcgtttcaatttcaaccaaacttctaattttgacgtgaactaaacagacccaaagatgaatgaattccttagctcaaaggaaatcctctctccgtttgcatatacttgacactgaagtacgattcatctcgaatcactcatgatttttaggggatcataagtcctcaaaatgatgatatattatcaagcatgttgcatcttaggcttgttccatacttggcttgcatcataggcttgttcaaacctttctcctgcgcacataaaacaacaaaacatgataactcattagcacataattaattaattattagctaaaaaagttaaacaatgaattaatatgatttttcaaagcaattttcctctatatttttatttttattaaaagaagtagagtttttcagtttaggaaggcgcatgtgcgtgaaaaatagtacggagtagtagattagaagttagaaaagcttagctgaaaacacacccttaaccgtgaaagtttctcctatagtagtctaaccatttaaggactattaaggctcaacgttaaaatgacgaaagtcaacattgcaacgcaaatgtaaacggaagcggtttggaacaaactttgtaaggccttgtagtttgatgaaacccatatcccggcccatctcgggagtattatttgggaagagattaagctaagtaagcatgtggttcaatcaacaataaccagagttagttagctgaatcttggtgggggaatcatttagtctaacccgctaaatcaccctatcaagtgttcttttcccctgattgtgctatcttaaaatgcattgctttcgattatacaacatcacggagatattaaaaaaaaaacaaattcaacccacacgctgaggtataaaggaatcaaattcagcagatgaacaataatggtactattcatatctagatttgtctttctcttttttcccaatgcatagtcactatactatacattatcattttttaaaatatttgtataagtatttatattaaacttttaaaaaaacaaaatatacacgagtgaaaattccctcaagagatttgaatccattccgtaaattcaaacgaaagaatcaaagaagtactagtactagtctcaaaaataatctaatcctaactacagatctggatatatgcgtatgcaggttcgtagatagggcgtgtgcaggttcgtagataggatttgtttttagacggagtagtaggtcggcttgtaaattgtaagccttgtttggtataaaagcccacgcactggcccatctctagagaacagggatgagcaattcgatggtataggcaatcatatttgtccccaaatttgcgaaaacttatacagaatcagtcaaaaccacctataatgactcaaaacttatacaattcgatcgtactccttctcagtcaagcatgtcaagttgtcgctgctgctcgaggacagtttttattcgcaccatcaattgcaacacaaatactattttcagctacaaattcaaaactcaatttgaaaaattccgatcttttcgcatcgatttgaatcgaatttgccaccgatttggttcgttttgctacctcccaatcagcgacgacccggagttgccgtgatccgaggggttccagtccaccgtggagccgtacaccgccgcgagcgagacgaacacctcgtccatggccggccgcgcggcgggctgcctcgccacgcaccgcgccgccagcgacgccacggccatggccaggtcgagcgggtagtcgccgccaagccgcgggtccatgaacgcgcgcacgttgctccccgcgtcctcgccgccgccgtcgacgagcgcctccgccgcggactcccacagcagcagcgcctcgccgttctcgccgtcgccggaggacgccgcctccttgccggagaggagctcgaggaggacgacgccgaaggcgaacacgtcgagcttgggcgtgatgaggccgtgctcgaggtactccggggagaggtagccctgggtgcccacgacgtggcgcgtcagctgcgcggcggcggcggcggcgccgtcgcccgcggggagcgcgcgggctagcccgaagctggacatcttgccgtggaggtcggcgtcgaggaggatgttgctgctcttgatgttcttgtgcacacatggcgggttggtgtagtggtggaggtagttgagcccgtcggcgacgtcgaacgccacctgcacgcgctgcctccaccccaggacgccggtggcggcgtcgccgccgtggagccagtcgctgagcgcgccgttctcggcgtactcgaagacgaggtaggtgtcgccgcggtggacgcagaggccggagaggcggatcaggctgcagtggttcacgcgcttcaggatgccgacctcgccgctcacgtcgccggaaacacgcttcaccgccgccgcatcgccgttgaacacgccgcggtacacggcggtgccgggcaccctccgctcctccgagaaccccgccgtggccttctccagctccgagtacttgtacaccgttagcgactccaacgcctcgcgcacttcgctcgccatcagcgacctcgccgcggacagcgacgacatcgaggttgccgtcgtcgtctgcttccccgatgccagggcgccgtactccgccgaagaggacacgtcgccgaccaccttccccggacgaacactttcttccccaacgccgcgtcgccgccggagacagaagaacagcaagccaaagacacccgccaacgcaagaacgccgcaaccgacgcctaccccaacggcgactcccttcccgctgcccgacccaccaggcggcggctgcgcccgcggcggcgcgggcgcggggggcggcggcgcctgggccggcggcgcgagcatgtccggcgtgggcgcgttcttgagcgggaccagcagcgtggtgaaggggtatatgatggagctctcggtgagcgtgttggcgtcgagcacctcctgcgcgtcgacgcggaaccgcgcggcgatggcggagacggtgtcgccccaggtgacgaggtaggtgaccatgtgcttgacgcccgcggcggcctgcggcggcgaggggcaggcgcagcggagcgggacggtgaggttgtcgccggcgacgaggccgcggctgtcgtggaggggattctgcgcgatgagagcctggcacgtcgagaggccctggtaggtgaggttggcgatgatgaagtaggtctcgacgccggtgtcgcggatggtgtgggaggcgttgtgctggtagtagccgcccggggagcagccgcacggcacgggcgcgagcacgaggcggtcggcggcgacgggggcgaccgggtcgacggcgttggagtcggcgacggcggcggcggcgacgttgaggaggtaggagatggagacagcggaggcgtagaggggcggggaggagcggaacaccaggtacgcgtcgcagggcgccgcggcggcggcggaggcggaggtggcgttgcaggtgtagccgagggtggagctcgcgttggtggcgtagcaggcgttctgctggttcgcctcgtactcctgctgcgccctcgccgcgacggcgaggaggagggcgacgacgacgagcgagagcccggcgccgccgcggcggattcggcgtggagtttccgccatcggcgaggtcgggggcggattggtctccgtctccgtctccggcgaggccttgtaattaagtggttgttggctgctgtcctccgctggtttagctggagacaagttgggtcaacggtgacgagtcaaactagtggcacatttttctatgtggggatgcagcgacggatctttgataaacttttcataaattttaccacgcggagtactcctattagtcatgaaatcgatgagtacttgcctaaacgtgtcgcatccggtacgtcgtgagctagtaataaccggcatagttttagaagttgatttaaaggattttttttgtctttctttttaattctcatttaggtaagaataaaagtacataaatgataaatcatacccccactatcacaaaatgtaactatatttttagatagtgctaaattagacattttaaaattaactattaataacaaaaaaaatataaaaaagattgatcaggtaaaaagtatctttatccttatccttacacaaggatggttcatcaaagtagtatctcgaaaatcgtgtaaaagttttaaaaggccatattttaggacataggaattgtatatttcaaattattttctgttttttaaattacgcgtcgtcaggtcattattagccgagtagtaaaacttgtttggaaataaacccgtggaactttatcactgtgggttccatttgtcactgcaacttcgcaaagcaacacaagaccaaatgggcgagcccatagtacatgggaaatggtcaaagaaccgaagggctagcgagtagtacgggggaaatggtcaacacaaagaccgtcccgttatcagtgggacacgcagcaacacggggatgatgggtttccacaggccactccagtccagtcacgtcgtgtgtgtttagttcacgctaaaattaaaggtttgattaaaattgaaacgatgtgatagaaaagttcgaagtttatgtgtgtagaaaagttttagtgtgatagaaaagttaaaagttgaaagaggaaatttggaactaaactcggtcatcgcccattttttccgagcgaattcaggttgcttcacgggacgcgcaagcgcaaccgcggaccatgctggattcgttcctttgtctgactgttagacttaaatgaagatggttgctaatattctctctatcctgaaatataataaattttaaagagatatgatacgtactataaatctaaacacattttagtaatatgaatttaaacacataccataaatctagacacatcctaatagtatgtatatgtcacattcctctaaaatttcttgggtgtgttttgctgcactccttgagctgcggtgcagctatctttcacagtaatgtgtgtcagcgtaacagttgtatggctgcattgcaatgactacaatcgtgcacccgaacgggacccttatattttgaaagatgaagtatgttagtccgaggacaattcgtccacgttttagtcatcacgtcgggtggaacattatgggccagcatatttgcaaactaaaaataatttatggataaaatttttatgtatgtgttcttagcgagctaaaagcaaaaactgaaaaataaacttcgatgaaaaaaccctcaaaatcaactctaattttaaaattaaaaatttaaattttagcagataagtataagtataagcgaaaagataagtaatagattagtgaagttcctttcagtcacagcaaatatgttagtgaagtgctaatcggtcaaccaagcactcgagcatactttggggctggtctagctcacgaacgttcgagatgagcggatttcacgaacggttttcatggcataacaatctcttcctgcctaattacgtgattagtatttgtttcttctgttaataaccaaatccatgccgccactatttgtacttacgagatttgtttgattggattatatttttttcgggaaaatatccggtgtggcatgatcatcattttttatttatattaagattaaagtgtacgggcagcccttaaacttataagggtgtatcatttaggtccctaaactttcaaaatgtatatccaaatcccagaacttgttatagtgtgtcatatgggtcctaaatcgccagaaccacttcaggatcctatgcggcgttgatgtggcatgccacacggacatgacgtgggattattttgactgacaaataggatccatttaatttttttattttttcttttttcttctcttttttccctttattatctttttctttgtgaccttgagcagaagaaaggaaaaaaagaagaataagaagaaaacgaaaaagaaaaagaaaaagaaagaagaaaaaaaaagaaaagaacacgtcacatccatgtggcatgccatatcagcgccacatagtatcctagaggggatgtgtcgatttgggacctagatgatacactttgacaagttctgggacctggatatacattttgagagtttagagatttatatgacacaactctacaagattaaggatcgccaatgcactttactcttatattaaagttaatacactaaattatctaataattgcaaatataaattctatagaaagtttatatacataaagtctacatagaaacttttttatatataaaatttatatattgaaagtttttatatataaagtctacataaaaattttatatatgcaaagtctatatattgggcttcatatatataaagttcatatatgtagaaagtcccaaaaaaattcatattaaaaagttccgttaataaaactagaaagagactaacaaaaaaacaaatatgaaaaaaaagtgaaagaaacaaaaaaatgttgatacgtatataggaggatcacgtgaaaagagaaaaacggaaaattgggaacagaacaatacagcttcctcgcgcatcctctactcctcgtggcgcgtcctctagtcctcttcgtccatatccattcacaagattcctgctgagcgaatgttcgctcactagtctttccgtacttatttgtgtccattcatttatctctgtttctgataaagttattggagatgtcgccatcgtcaaagtatacgaaattgatccgtggtgacctggtgggtaatcgggttttggcggttcataaataactactcgaattttattcaaagtttgcagaattttgccaaaatttaccaatgcgtatccaattgataacacagaaaactgagcggttaacatctgttttgcgaacttgtgtcagctactcacatgaccaggtgaccatcggtcctattcttttcaaattaagataaatattttttctcgattttcattaacatatttttcaaactgttaggcagtatatttagtgcgaaaatgtttttcaaacaatttttgaagtttaaaataaataaaactaaattaaatcacgcgttaacggttt

SEQ ID NO: 9138 - DNA, 8556 bp, Oryza sativa
ttttagattttgtttggcataattaagctcctatctttattatactttgaaaataaattagttatgataatatgttttttgtgctgaactatctttcgactaactagcaatcaatttaatacaaattgttgtcgcgtctgaaagggagagtggatcataacaattaacataatgtcgtgacagtgcatacggaggatcaatctatcccctccttaattaaaaaaaacatggatgaacagaagaatatacaaactgcttgttgaactatgatataagttgtcacttcaaatgtgtacatatatcggattctcttagaagataaggaaatgtcattttcatccatcttttacattgtcaatcactttgtttttttctccggtcagtccatgcattcgagcatgtgttccgcgcgtgtacgcttgcgtgggtggattggttcatgaaactaaccggcaggattaagaatttaagattgcccaattgacatgttggttattataattattaacccaagttgcttgtatttcttcttcttcctcctccaaaattcttcctaatttatttgtttcaaaggtatcgggtcagacttcgaaaccaattaacagaagggattatgagatagttgtgcatgcattcattatccatgtaattcgtccattctcaaatagatgatgttttagtatacatataatcgaatgtcgaaatcctaacccatcattagtaaatggaaaaaaatatacaacgattatttgatgtgtgaaatagaattagagaatttattatcaaaaaactttaacgtagctgtatttttttaaaatatttctatgggttatatgaatgtgtgagacagtattattgatatcttgaatgttttatgaaaaaagaaagaagatgttgtaagaacaatctgggttaatggaaaaagtcagagaagaagaaagtggtggtggtttcagattacagttgaatgagatgctgtcggccaggtcggctacaacaaacaggcaaagccaaataaccttgtaacacaaaatgaaaacaagaagatacaaaaggtcagggagaacatatcttgaccttcttggggtcactacaaagatgatgctaattaaagtcaactctacaataataaacaggaacaatatatggtctctgcatttcacatggatgcatgctaaattgtgtctaattgtttaattattggattggaaaacccatgttatgattctgaaggaattgccttgttttccatggattttctgtgttctgataagttattccaattcagtgtatatataacgatcacgtacgagtcgatttcagaaaacagcaaatgcaataacgacattattgacctatgtataagagctctaaaaaagatgtcctaaataaaattgaccaataggagccaatctgaattgaagtgatcgatgtcgattaattaaccgtgggaatttccttcacaagcacggaaaattcagttttgtcctaattagggtcaagtcttggatcctgaaaaatgaaaagaacttgaccattacaaaagcaactgtttccaaccacaaatggagtctcttgtaataaagcgacggcttaatttgttcttttagaaattagaatcttctactcggtcgatctaagaaaatgaatatatatttcctgcatgctccttgaaaccgtgacaggaaaatgtaattttaagttaattactgacaaaattattgaacataattaatttcaaaatgttctgaaattttcggttctcttttcccatcatgccgtttctcatcagctagcgagcgtgggttttggagttgggaaacggcccacgggccagcgacgatcaggcatcagctctatgggcctcagttcggtccaaaattaggcctgtttttcaacttttttttttcggactgctagaaatttcaacaataggttgtccaaatgcggccttccagtgtaactaagggcttgttcatacccaattttggtattgacacctttggccattgtcaactttttaggctgagttagtttgtcctacgcataacttattagcacatgattaataaaatattagctagtttttttaaaaacaatagattagtatgattttttaaagcaactttcgtattttttttaaaaaaagatcgtttagttatttaaaaagcatgtacgcgcaaaacgaggaagatgagttgagaaatgtaacaacaaacacaaccttagcagtcggttgagcaatagtaattcccagctcttccccaaaaaaaaaaaacacaaccttagcaaagtttgatagtgttcgtatgaaaggaaattatctgaactaacaaaatttggaaaggtaataatgctaagagtagcttagtttgctacctaatcaaacattggtactgctaaattttgagagttaaaaatccgcgacaaaatgaactgccaaacaaaataataaatagctaatttcgatgcaattaaaataaatcagaatattttcgatgccacaaaattgtaactggaaacttttatatttctacaaaaagtataaactactcctttgcttgtcttttggcttattacccgtagccagaatttaaatttaaatatttaattttcaaactgattttgataattattttatcatggtttatttttacaatcatatgactataaaaaatttatcaataaattattaccagttttgatcgataaatgatagattaaaccatttgtttcctcatataaaaaacacagtttaggacatactcaatagtagagcctagtatgatctcttaaattatttagagataatatctttacaatataatagttgagacgacgaaaactcaaattttgtttattgttgttctttcttgttttttctcaccctcatgtaatcatgttttctttctgtaagtgctaagaatcaatattgtgctgttgttaactatatcaacgatattttgtttattttttttcacaaatatttctaattagcaaggttaatagcttatgatttaatacgggttgtacacttgtacatggccttacatgtgccatattttggccaacaaccaacgttggattgctagagctatcaactcttcttgccatgtctgaaactacaaaacccatttatcctatcttactataaagttatcccccactaactccttaagcttaacatgcaaagatgccacatcatcatctactaatccactaattaacaagatgtcacatcatcatccactaacaatcatcacatttaaacatcatgcaaacatgctatatatttatagtttttataatttaagagcttttcaaatacaaacatgttaaattatcattcaacacaattcacataatgtttcaatgtatatttttattatgttttatgatatcctatatacttatatagttcatcctcacttagttagtgcttaaatgattaatctatggtccaaattatctttctccttttttcctctaattaagtcatatcacatcaattatttttagcctttagatgattaatttacggtccaaactatctccctacttttcttctttcataaagtcataccaccttactttttacgtttgaataaccattctacatactatttaaatttaaattatcataaaccacattaatttacttaatctgatgttatctagttattttacacgttattttttttgttatcatattaaattcccgcagcaatgcgcggggtttcacctagttattactatgggcatatttggtgcagctccagatatagcaacatctctcttggatcttaagcctaaccaaacaatttcagtttcatctaaattggagtggagctggctagagcgctctcacaaaatgaactaggctaaataatctgcaaataaaacttttatatacgtgttcttaacgatctaaaaagcaaggttgaaaaataaacttcgatgagaaaacctcaaaatcaactccaaatttaacgttgaaaattcaaaatttggctaataagcataagcataagtgaaaagatgaaactgctaaaagggtggagctagatttatactgccccacaactttatactagacccaattcatgaagttaaatttagaatttaaagctctaacaaacgagtcgtttggttctataccaaacaaaattcccactataatggaaaacaattttaatataatctaataaataaaagaaaagaaaagaaaaatcacccgctcccctgcgatcccttctcgccatttccgcggcgccaccgcactccgccactctccccctcctctcctcctcctcccagatctcctcctcctcctcctcctcgccgccggcgatggccgacgaccccctcgacccgccgccggagccgcagccgcagacgctgccggcggtagcagccgcgtccccgtccccgtcccccccgccgctccttctccgcccccgccgcgaggccttcgagcacggcctcctccccatccccaagctcatcttccccgagggcacgctcgcgcacaccctcgcccaggtcaaggacaagctcgcctccgccgcggatggaggaggccgcgtggccgcggcggcgctcgcggaggcgctgcagatcccgcacgagcaggcggcgctcgcgctcgccacgctcgccgcggtgctccccgcggacgaccccgcgctggactccggcggcgggggcagggccgacctccgcgacgtgctgctcttcctctacatccagtcgtacaagcgcctcgtgccccgcgcgcacaaggactcgcccgccgtcaccgacgtctggccctccacctccgccttcgacggctacctctccgcgctctccccgatccaggtcagggatctaggcctcccccccgttgctttataattagaatttgggtgctcccatgattcctctgcagcagagaacaccttggatgtgtgattgcttagccttaatcatgtgcccaattgagcttagaacatcgccgtcgatttaaacaaggcggctgttgtgccaccttatatccttcatgttgcagctgatgctgccgtttatctgctgtcacaacaaaaattgatatgtgatgtaactcactcgagctataagaaatgctccacagtaaaaagtcgtgcagctctagatatatagtgcaaaggaagatcctagctgctgatacttattggatgctatggatggtaccgtatgctggggtcacttcttgacttcaatttaaggttatcttttttattggtggccgtcagaaatgaatggttggttgcatcaaattacgtatgatggttggacttgtatgctaacagtaaactcagaagcacacagactttgccataattgagcgaccagtcattgttgtgaccattttgttatagattcagtcaattgtatgtttgcttaattctttcgatttgatctggaaccatgcaaacctggtaatttcactataggcacaatattttacttccactcttttagctcaaatttcaaaatttggagactatggtgcattcaaatatgacttacaaaattcccagctgctaaacctctgtttcgtctatcagcaatatttttaaactgaaatcctatgccctgtgccttttctggtttgggtggtaacagtggctacagagggttagtattcatgcctttttgtataaagtttttgtaaaatcaagatttctcctacttattcaatttctcgtatttaaagcttttacgctaccaacctcagttacatgttaaaattgttctaggtgttacatttagggtcaatcccaatttcccttccccaaaccaacagatcaagcaaaagacataaaaacaccttctgttccttttgctaatatgagtcgtatggtacctccttcacttactctttatatttatattatttcgcagcttgtacgcagtaatagccgtcgattcatgccttctcaagctgatgaggaaattcaccagctatcttatctgcaaaagcatatggccaatattcttactctgttggccgattctgttgagggcgaaggtgatgattctctggtacgcagccttttctttcttttaagtttgccgagcttgttgctatttgtgatatccacttgattactcttctgtttgacaatttgtatcttgttttcttagtagagtgaagctttatgtgggaaaagagtgacagaataatgcatagcatgttctgataatggagtttatttgtttttctatatctcaaaacactagaatcgacccgtaaaagtacatctccgtgttggatgcctggaactccagggccgtgatcctgtaaaattatatgcaaacctacctctcagacaagtatacctctaaatatattgtgatgtatgagtatgcttttggtcaattaggtgttaacttcactcagaaggtgccctgcaaaaaaagaaaaaaaacgaagaccacccatcagtagatgttttgagatagcagattcttttttaaaaactaatatatagacaagcaaatataaaggtagcatatatttgacccagttagatatatctggcccaagtaagaactcatctttttgttaaatttaggatacatgtcacattgtcaccttacatttgagggcattttctgaaggcaattgcctttgtgcgtcctatttaggtttttattccttaggattctttgtggttgggctttggtagaccattacacttcagaatgtaaaataactgtatttcacaatttttgtgcaggtattgaccatggagacatttgaacaccttggatttctactgaagttctcagaaggaacacccttaagccaggcagccactttttttgcaaattctgatcctgacatgcctgctgcccctgtacctgctgcccaggttcatgattggatctcacagaatatatctgcttcactggaattctctaccgagaagtccatatcaaaggaagttagccagcaggttacttccgatatagacgtcacaatggctgatgccaatgctagtaatgcaaggaacagcacaccgactggtacaaatcctgcatactacagaaacacaacatttgtggaaggcttctccaaaacttctgttgtcaagcacgcgtctgatgtcaaaggacattcagtgaaggtatggatcatagctgcttaccataaactatttttggatgctgaaaagactacaaagatatgtcacttttcacatttctacatgtttgcattgtccactaaatcccccgggggggggggggggttaatgttgataaaaagaaccatttatgcgaatctagtttaaaacagtttcaagtgttttcatatgcttacatatcttgaatgtaataatttattctagtgctactcttagtacaataaagaatatgttttaatctctggatttccagtggagtattagtttgaaagggaaaaacattgttagccacatctgggtgattaaggagatgatggcttaaactggcattatttgggccaggatatgtaaaatgttaaaaccgaagcgaaaaatttagatagctatattttgggacgcggggaaataggctgctaagtagaattgggatgagaaaacaaatatgacaactgttctcatgatgaaaattttttgcagactccagcttctagctgtttgtgtcagtattatgttttactctatttcaagaaattcccacttctgtgttgtattgtgacgtagctgctttgtgtatttaattttgtgatcatggaggtgggactccacatttttggttttcttaacaaacagcttttgtaggttttaaattgccatgagtctgttatctacatattggcaccattgaagtacgcaactgtgtatggatgttctgatgctactgttgttcttggtgctattggtaaggtatggatgccaatcggtatatctttacaccctcctttcccattgttgcagaatattgattaatatattcctcatatttttctaagcaatttaaagagaaaaacccttgtatacacatcagttgccaccagactattttagctgcaccggatctgtttgagacttcaattgtgtatgccttggtatcacctgaatggtacatgagtgctgagtattttgtccaaatagaagaggaggtgatgataataataacaatagacagtgaaagatgtcacacattgttgtgtgaaccaaaaactgacatgctagttgctactcttttacagtcttttcctggaaaattcctatcaaatagatttaatcatgcgttgagttggactgttaaacataatataagataggctgtacattaacaaagaataaagggccccaagtggaaaataagaaacacttttttattgtcacttcaaatttgctgttattacctctgttctgctaaagtgctaagtacatttgacaattatactttatatgttttgtgttgtcaggttgttaaggtggagcattgtgaaagagttcatattattgcagctgctaaatggatttgtattgctaactgtcgtgagtgcatattctacct

SEQ ID NO: 9139 - DNA, 33488 bp, Oryza sativa
atctagcccaggtacaatgttgaagagggaatctgaactcttttgcgcggattgggtaaggttgttggtgatcaccgttcctgggaggtcaaatggttctatctgcacagaggtccccttcaaggttgcaccctgggtgtcaagctgccctgctgagtcctgagggtgtactctgaatgttgcgtggatggcggtatcagtgccatcgaccgtcggccgttcttgcattgtgagagagccattcgcgctcgagaggacgaaggtcttcccactggattcttgtgtgaaggtcaccagctgtgagttgtaggatgaagggactggagatatccagtctgaaattgcgctggtgttgccggcttctgcattccaatcaccagttgacaggccagctagaacaaatggcccgaataggattgcttgaagagatgcatattctggccgatcatctgatgtcacagcatagcagttaacattgagatgaatattctgactaaaataaatcacaatagttggtgtatgtcacatcgtcacagtttcatattcactattagcttatgattttttatgttaattgataattttcggttgaaatgtcaaacaattgtatgtgaactaagcaaaacacattgatgcatacttgaaaatagaagaaatttcctaaaagttgagttttgaccttttattgcttcagtccttagtgtaatagggaactgtagtgataaatgatcatctgaacacattgatgcatacttgaaaacagaagaaatttcctaaaagttgagttttgaccttttattgcttcagtccttagtgtaatagggaactgtagtgataaatgatcatctgagttccactgtttggagattgaaaggaaagaccctgcccacaaaacaataaagtaagaacttgtctaaaacatgatcaaggacgattgaaatggatatatttttttgttcatgcactcaaaagattgtacctggagacattaatcctaaatcgttgtcatttagagttgcttttgcgccattggcagatgtccatgatggtattctcacattcaatgtggcagactgaccatttgtctgcataagtagaatagaggaagctaactgctgcttctttcatctgattttcatgtaacatacattaaaagaaattacctttgcagaagtggagagtgaaacttgaagaaacatgtccaaagagctgattggctttagttgttgattaacagtaagcccagctgctttccagttataagcacttggtatgtactgaatgatgtttagcaccggtctatctcctttctcctcgaagtaaatggaatcgccaagtttcgaaaaggattctatccctgtaaatgaaatagaagatccataaagaaacaggccacctgataaattgcctttcaattcaaattttcacaacttcgaatgaaaacacaagcaaagtaatactaaaatcacggtattaatttgacaaactgttaccgcaatattttcatgtaaaagcagcagtgttaaataagcagaactcagaagcattttatttacctgtcccataacaacaccagaaggagtcatactttgttccccaaccatgataggaaaccgctttagaccgtccaggggcctgaggtagcatgtaaatcatcaccccgggatcagtccctctttggatgcttaaaacaccatttatcagtgccctttcataatagtctgcatatgataattcctttgtccatctgaataggttgcgagaaacctgcagtagattgcattgaacccattgagagagagagagagagagagattgaatgttcaggagagtggtttgatattgtgaaccttgagcatgttgtaggttgtgcaagattcctcattctcagtactcagagtatcagctaaacgctttggattggtcctgaataattatatagaagtagatagtcatacatcaaagagaaatatactattgactatgaattcagaatctagagtaaaattaccaaaattcaccagcagatgtgcccccagtagcatagctatgagaagaattgatggtatccatgaaaaacgttgcaatttgctgtttcatgagaattatgattacaatcagcttttctctcaaatgatgttagtgaaaagaattagaaagaaaaacagatagtataactccagtaaaaaacagcataaaaaaactccagtaaaaaaccaacacatggctttgacatacagctgacaaaaaaagggactgcatatggataactacagagctaataggtaatgaaaggtataatactgcccaaaaactatagtttacctagagaaagcatgggttagcaagaaatatactattttccccggattatgctatcacacttccaggcccatatctggaaatttaccaatatcagcaggaaatatgcataatctgtaagcagaataaagctatccttttcctttcagccaagcagccaatatgaccactaaaaaaaagtaaccaatatgataatctaaactattagcattgtacattcatatccatatccctggacagataattcatcttcatgtatgcatatggagtaaatatccagaaagaaaggtttgtgttcttttaccttgtaaagaagatcaccagtaacttcatatctcatctgtgcaccaataacaactggaatgtgtgtattggaatggaagcctgaaatactgtcggcctgaattgaagcacactcaagatttatcagtcagagacattactgcaataggaatactactattcttgtatcctctggaatcagacacccaagccaaaagttctaaacttcattttaggtagtgtctttgctatagtgggaaaaatataatgacaaaatgaacagtagaattgaaataatagatccatttggcacgcaaacatgtagttatattgattttcaaactgccaagtgccaactcaaaactggatattaggtaatccataatttttgacagttagtaaaacaggtaaattgctatatgacaaacaaggttgaagttgaatgtaagttggtctgagtcattcaccataaattgacacatgttcatagatgatacagaatataagaacaaaagcaggtaagaaaataaatcagcagacctgaactgcaagcaacccaagaaaacatggcttatcaaaaagatgggccagagtcagatgcttctgatcattctgcacatgcaagaaaactagaaaagttagcaactccactagagaaaattgcattaatcaaggcagtattcctatctcataacaaaccgacaatcaccgttatcgtgtagagctgatagagcacatcattcatcccaccactctcctcattgagtgaagcccaatgcctctcaatactgtatttctgtatgacattcttcacacggtcactgaagtaattggccatcccgaccaccaaatcaagggccttagaattcccggccaccgtatactgatcaagaagaccttgcataatctgcaaaccaagaattgcactcatgtagcaagacaatgatataatatagtgatcaagcaacactaggaactgaaattcccccatataccttgtgaattgtatagtaaggagcccaaacagccttgatggactcaaccctgtcgaagaactccgaggggaaggccgacaagtaccccgatcccatcttcttctggcaatcatggagcgcgtcgacgaccgatgacatcttcgccaggagagtgtcattgtgtgtgctcgcccacatcttggcagtagcactcaggtagtgtcctgcaaagaacaggcagcaaagcaaagccaccgcaaattcagaccaattgcgcgatttcgctgtgcaagtgatgccgagaaatggcggtggcgcaccgacgaagtgtccccggagctcgacgccggggccctcccacccgccgtagggcgccccggacgccggaaggccggcctgcgtgcggaagctccacacgaggcggtcgacgtcgaggaggagcaggtactccaggttggtctgctgggcctgccagtacacggtgcccggctgcagccgcacgtcgtgcagcgacgcctccgccaggagcgcgccgccgctcgcggcgatggcgccggcgccggagccggagccccggaggttgcggtagagcatgagccagtcgaacgcgtcgcgccgcggggaagagacggggctcgcgaggagcctccgcggcatgagagacatccaggtggactcgtcggtgggggtgaggtggcggtcgccgtcgtggtcgtcgccgtggccgtggccgtgggggaggaggagatcgagcacccgcgccgcctcgacctcgccgtccggccgctgctccgccgccgcggccgcgcgctccgtgtgcgacgccgtcagccccgggaacccgttcgtgcagtccttccccgcgacgccatcgacggcggcggccaagaacaccaccaccaccaccacgaccccaaccgccgccgccgccattcccgccaagaaccactccctcctcactaatcaagactcaagaacaccaccacactaccagacgcatcaaatcaatggaatcctccaagaattccacctccatttatgcccccaatgattgggcgatctcaaccaagaattgcacggaaagcaagccgcaacaactgaatttcaagaacacgaagccctccttatcccctcggacagatcactccctccgagtccgatgactagtcaccactaaccactgagccagtgattcttggggagaagaggagtagaaatcggcgcccttttcgtgggcggataagcggaaagggggcaagaaatacgcatcaatcatcgggtaggatgagagcgacggcttgtgggatttcttgcacccaaagagcagcaacgacaaggagcgacatgaaagccaagccaccattgatgcatccatccatccattcgagatccaacaaatccatttccggccatccccgtgacactagcagtgagcgccgcttgcttgcacgccggagctaccgctcgtcgtcggattacgacgccggcattgtccctgtcaaaatcgcagcaacggaagctggccgcggcgaggggcgtgtgcacttcacacaggcatttttctccaaattttttcttcgaacttccaacttttccatcacatcaaaactttcctacacacataaacttccaacttttctattacatcgttccaatttcaacaaaacttccaattttgacgtaaactaaacacaccctcagtcgtcgctgatcattttggttgtgtttcccaacaaacctccgtcccataaaaaatcagcctaatactagatgtgatatattctaatactatgaatctatatattcatctgattcattgtagtgttctagatttctttttttatggagggagtacaatttgtagagtaccattaatttacaatatagatttaaaaatatgtattataaaataatagatttaacaccatttaaggtagttttcatgtttgaaatatatatttcattttataaaattgaagctaaatttatagttttgtgatacacatatttcaatatgtacgtagttttacaataatttgatcaaatgtagttttataaaatttactcattaggagtcattaggaggttgtcacaaataatcccaaatcatgcaaaagccaccgaaaaccttagtttaaggtaatcttttatcatgtatccaagctaatatacataattgctaccagaatgaatattttccatttaatgaaattctcagttttgacttttttaaatccctagtgaaggatcaattatggcttagatatagtgaaattggcgaatttaaaactttaactacttgctaaacaaatgtactctaccatggatataaataaatatataaatatactttttataaaatatgttattcatcatttgctattggaaatattcaacttttgattttatacgtggttgtatgttagaattcaattattttaaatattaaaaagttctaaggatgctttataaaatctactgttagagtaggtggggcagtaaatttactgacactaccattagtttttttaagaaatatatagaaatgaggttcacatccgctactgtaatgacactacaattacatagaaatgtgataagcggaagcaagtctcatgtttggaccaatatagtactttgtaaaaaaacggattcgtcacaagtgagcctacaataacacaagcagcaactagtaataagaagctaaccacaaaattgtagagagaaggggacagggagaaggctagcagccaataagaagcttggcagtggcgagaggcggggagaagggtgcatgtgtcgaggacgatgcgaccacaatgtggtgcaagtggagttgacctcgaagacgatgcggcggaaccgcacgtgcgcctctacggacgagaggcggagctcggggacacctgaacacatcggcttttgagcagctcgacagggggtgactatgagcttgggggataggagcttggacagcgtgatgaggtagaagcctcatcactcacgcgtgcaggtgaagacgacattgcagttgtggttgggacccgcgccgcaccccccctgcgtgcgcaagtccatgatgtgagcgctcccggccgtcgagcttttcctcgccgaccgacacccttctccccacccattggcggatgcccaggaggtttgggttgagatgggaggaggggagtgaagtggaagaagattgccggttaacttgtggggtccacgtgggactcagccaccacatcaacaaaaccgaaaagcaatactaccttgggatcaaaagtgatccgatccggttttacaggattagaggtttcatggccttttaaactcaacaagaagttagggaaccttagatgaacttttttgggagatgaaaaattccagcctcatgggcctgtgcatatgacccataggcaggcgacgacctccgcctccccaatccgtcccggccgtctcctcgcccgccggccgccgccgatctccatcctgccagctgaggtggcgccggcgtcctcctgctcccgccgcattcgctcaccggtgagcatcctaatccatcccatccggcctcggcctcggcctcggatttcgcctcctcgcccgccgcttccgccgcgagcagaggtggcgcccggcgtcctcctgcttccaccgcatcgtcgctcgccggtgagcatccttccctacccacacctcatcagctattctgcgttaagcgttatccctggttcaaccgaaacagggttagatctgcctctgctcagttccacctactttcaacttgttaattttgatttttgtttttagcggatgtaatttggttactgaatatcatccacaaacccttagaatagttgcattagaaagaaaaatgtaagctcatataatttgtacttatccaaactcagtaactcacataaaaatttcttaagaagagtagtcacacacaatatctttttatcaaggtatattcttataagaagttttcaacaagatttgcttgaaaatttgagtctaatttagcaggcagaactaagagagcatggtggcgatggcgcggtggccgtggagggtgctgctgccgctgcttctccttcactcctcccccgtcttcttcgtcttcgctcaaggtactgcgacccccgtcttctctctcttgtggggcggcgcttcctcttcgccccaccacccccaaatggcaaatattggaagtgaatcatccatcatacagataagatgaacgcgagactcgtcatctcattcgaccacctcagtgctctgcatccatctgcgataccattggatcgtttctaacacaagatatttggatctagagccagccttggatcctattaactgctccatcatgggttcatctcatgaaatttaacggaaccactccatcctaaattttctattcagcatattaatttcatggatcagcaatgtcctaagtttcttttcattccaatcagcactacgtctacacaaaatggatgtttcctttatgcttcctggtagactaagtatcctttttcccctcattttttcagaaggccaagataatgatccctctactttgttcaaacgagccttagaaatgatgaacctaaggaaatatgatggatcacttggtctgctaaatgctgtgctggaggttgaaccaaatcactcagaagcttacaggcagcgtgcatctgtgcttcgtcacaagtgcaggtaaaaaaaagttgtatccgttactttagattataatccattcatgtttgattcacatctgttcctcagttcaaagttactgaccagaaaaataattacttgccaccgccagatagctaaactcccattttctcttgtcctaaaaatgtctaaactttattattaaaaaaacatccatatctgaaagactccattaaagaaccgttaagcatatgtgcctacttataacattgtcagttttacacgtatgtgtcacctttccgtatcccttactcgtttcaatgtgttttttctgaagtctaggtacaaggaagcggagggtgactatagcaaatacctggagctaaaacctgggagttcttcagtggaaaaggaattatctcaactgcttcaggctcaaaatgcattagagtctgcttatggccagtttgagtctcatgacttctcaaaagtcctggattacatcaacaaaattgtgcttgttttttctccagactgcttaaaggtatatttcagaggatagtaggaaccatggacagataaatatttcatctaattttgtctcagtaagctgcagtactaaaaatggatttttcaggcgaagcttctcaaggctaaagcattgctagcacttaaagactactcaactgttatctcagaaacaggatttattctgaaggaagatgaagataacctggatgccttgttgcttcgtggccgagcatattactaccttgctgatcatgatgttgcatccaggtaaagcgtgtctggtattttaggtttggacaagtgcatgcttgtttgtgcctgcacacacaaatgcagtactagataaatgtgctagctttaaatatttgtacagtgatgacaatattaattgtttaggcactaccagaaaggccttcgtctagaccctgaacattcagaactgaagaaagcatattttgggttgaaaaatcttgtgaagaagactaagagtgtgagtatgatttctttgtatcaacaaattaggggcttactgcatcatagtaataggatcaaatggtgtgcatgcaggctgaagataatgctgccaagggtaagctacgtgtgtctgctgaggactacaaggcatccctagcaatggatccagatcatacttcttacaatgtacatctttatcttgggctatgtaaggttctggttaaactcggaagaggcaaggaggctataagtagctgtacagaagcactcaacatagatggagaacttgttgatgcattaacacaggtgacattacttgcttggcatgcacagaaatacacatttttctaatttagagtggaaaccaaagttcttattattcaatgttgaaacttccgtgaaaaaaagaagggaatttcagtctgattgccctgcaattaatgttgaatcttggactccttccgcactctgatgccacattattgagcaagctgcgagcatgcagacatgcagtcgcattagcctgtccttctaattctgtattttaaaccacaagacttgggaaatctgcaactgctattcagaaaccacaaaaaatgtaattcagtatgcacaaataatgtgttttgactttatgagtgaataagtgatgcaaaaaaaaatagtaatgtatatttgtttggtaaactaagttatgcaccagacaatgcaattgaattagttgttatagccagatctcgctagtctcttacttcatctgcttgttgtatgttaccttctactggttgcagagaggtgaagctaagcttcttacagaagactgggaaggagcggttcaggatctaaaagaggctgcccagaaatctccccaggcaagttttatgtggacctatctcctttttcccctaccctcctaggcaaatgttagggataagtgtgctcatatatcagcatatcttctttttttgtcctttgaaaacacacatattgctatttgagttcccatcaaataatctgcttatgtggctacgcagtgtgctgatctcatttccttttagatttgggaacacaatatttttagtgtaattgtgctgcaatcaaattatcgtgaaacatagttccaaatggatgaaacatctagttttagtcaattggatagacaatatgcagaaacaattatttgttttttacggtagtcatctgatgatacttttacttccccatgatgtatttctatttggtgcccttctgccagcaatctttgttatccgctttttgcagcgtgggttcgtaggttgcatatgtttctctagcacctatgcatgcagtggatgagttgataaaactagatttgcacattactattgttagtactactaataataaagtgggccaccgaagaggaactttatgccaatgtatttatgaataagcaacaggatctcaggattttaaactagtggaaaaggtgagggcggtcagaatttcgaacatgggtgagccccgcttgacggctgccccttacagcacagttctcaaataatattgatagttacataaattgcttctcagctatattacaaataggaagttaacttgttgcttccctgtttctttaacctcaggaattgaatccaaaggtcatgtgcttttaatggaatgctttattagatttatctatcaaacagacttggtctctgccctttttctgtatttttttggtacaaatgtaacagtggtttgcactgttcatgctcaggacatgggaatccgagaagcactaatgagagctgaaaagcagcttaagttaagcaaaagaaaagattggtataagatccttggcatttcaaagacggcatcagctgcagagattaagcgtgcctacaagaagttggcactgcagtggcatccagataaaaatgtagataagcgagaagaagcagaaaacatgtttcgagaaattgctgcagcttatgaggtataaataaacaaaattgaactgtactaagtatttaatgttctatgagatgacattttctattaatatggttaatttaaaatactctcatgcattccaagtttctagccctggtgttgtactatgaataagaactagctgaagtgcatttcatccacaaaatatatcatgctagacactgcatgtgtccgagacaaaaagtgtcccaataacataaattctggtcacccatatttagctataggcatgcttgtttcgaatcagatcgacatgctgcagatgccacgcgtgtcttttaacaatgcgcaatcggcaatttgcaggttcttggggacgaagataaacgtgtaagatacgaccgaggagaggatcttgatgagatgaatatgggaggaggaggaggtggtggtttcaatccttttgggggaggtggccagcaatacacattccattacgatggtggattccatggaggaggaggattccccgggggcggctttcctggaggctttcagttcaactttggatagaaagtttactgcctgtggagttggtgtttgtatgtttgtttgtttgttttaggaacgctgataagcttaacaacaggtattgattgtaggcagtcaagccgatcgatcgagatgagcatcgtatacaagtgttgttttaagcaccatcaaattttcctcaagttgtatccttccttgggattttctgacgcatatgatccaattgaaataaacttagccttacagtggagctagctgtttcactttcactagccaaggatttgcgccgaaaccataaaaaccgaaggtccattccatgtattgtgatcggagtcggcacgtaacagaaaaactaaccaaaaaaaataacttaaatcctctgaagaaacatttgaaccactcgctggatcgtctagccatcagtcaaccatgagcgtgatgtccaacaatctccatgttaactgtaacatctgactatctatatatctacatgttgtactgtaacatgtgactatctatctacaccgatcaatctgatgatcgcttactttctctattttatattgtactagcaaaatacccgtgcttcgctacggtgtattaaaactaaaaatatttgattttaaccgaagttattttcacactgctttggtacttttgctcgctagaaaaagtctcaaatgatagaaagaaatatagttccgaggaaagggagataaaaaaacaaagccggtttgatttccacctttatacggtgcgagtcaacatggactctgaagatatgggtagatctacggggtggctcagcagcacggtcgaccagcgaataagcgagcaaactcagaccaatcgacggccgatcgatgaccgtagcacggtaggtagcagccgcatctggccgtccgcttcccttccgcgacaacaatgaccgtgactctacgctattattatttcaatatttcttatttttaattctagccttcgtcaaatttctacttcacaaaattaaacttcttttcttcggctgagggacctagaacagactttttcccagcctagctggtacttttcttcggccgagggacctagaatagactttttcccggcctgccggtcagcccacggcatattatgcgcacgtgcgggcactccctcctccccaagccgcaacctggacctgggctggggaagctgcccagcacgcgcctctacttgggccggtttcgatccagccagtgccggccgttcgatcttagggtttctatcgaatagccggccgccgacgtcggagggacaaaagcccatccctcccagccgtcggcgaaaacccaagcctctcgccagaactggagcggacggcgaaaagcagcggcgccggtgcatgcctcctcgccggtgcgcacactcgcccaagggtgagggcgccacctttgagcagccctgccccggcgccgtccccgtcgtctctctctcatcttccgcgcggcgtcatcgacggccggaggcggtggacttcccttgcgcgtcggcaacgaccggcggcgggtgggctacccgcgcacgtgggtgacgaccggcggtggcgaaggacttcccgcgtggcgtcggcgacggctggcgttgaggttttccgttcgtcattttttaatttttggagcttttcttcagggatccaagaccccctttttcctacagacaaaaaatcaccggatggatgaaacagattgtgatgaaaggaaaattatgaatattttaattagttaagataagattacagccggtgtttttttttgtttttttccagatttttttttgtgtcgtacgaatcggactttttgagcctgtttttttttccgccgttctcttctttttacggtgcgttttctttttttttttctgcctggtttttttcgctctttataaattacggacgatggaaacattttagattttttaagtagtataagtagaagtagattagcaaatatacccatgcgttgcaacgggttaactaaaatttaaagatttgcattggttttaggagtttgaggggacaaataaagggagctaaagcgaacttattccgtgtggagcgtacacgcggcctatgtggtggcccaatagtgtggtcggcctgggaacaatttggggacaacttgagggatctaaagtgaaattttttcacgcggagcgtacatgcggcccaatagtgtgggcggcctgggagtggcacccgacccgacgtgggagaagcagtagccgtccgatctgatggacggtcctgattgatcccaatctatataaaaactcataagtctaaaccctaatcctaaaatcatttccattctccccctctctctcagccgctactcccctcccctcccgtcccccaccagcgccgccgctccctctccccctcaccggtggcgccgctccatctccccctcttcctcctgtctcgccggcgcggcgacagggaaggcaccctgccggttcccctcggccactccatcccccttcctccacaacgacggggagaggatccaccgctcctgccggttcccctcggtcactctctcccccttcctccacggcgatgggaaggggatccaccgctcctatcggttcctctcggtcaccccctctcccttcctccacgacgacggggatcagcgacggggaggggaaccaccgcctcggccactccctccccccttcctccacctgctccactggcggcgctctccctactggcgtggagccagcggccctccgccccttctcgcctccctctcgcgccagatccagcggtggcggcgtcggtggctccctccgccccctctcgcctccctcccacggcagatctagcggcggtggcaatctgctcgaccacatcgccgtcgtggcactcatcagcacctccgcggtggccatgtccgaggcgcgcctcacgtccacgctcaactcgctggcatcggtggttggcatcgccatcatcgccttcgtgctggccgcggggttttccacttcgacaccagcaacctcgcgtcgcccttcttcccctcggtgctgcgggcgtgttctgtgcggcctaatccgtactcccgtcgccgtcaaggtcgccgaggggaggggaggggaggttgccattgttgtccatgaggtcgaggtcaccgttgtcgccgaggagaaatataggaaaaagtgaagaaagtgctacgaaatagaagaattcgcagtcacgatggtatattgtagaaggcgtgcggattaggtggtaaaacatataaggcatgcgtattggatggtatattatctaaattctccattatatatatatatatatatatatatatatatatatatatatatagtggaatgacaaatggccctacacatatttattttaattctaatgccacataagcgccacatcacagccacgtggaacaaagaccgggtcaatatagccatgtaggcgccacgtcagcggaactgtcttccaaaaccaccgaagaagtcaaattgcactagtttcaacagttgagggtcgagatatccggtattatggtttggggatacgaattagattcagcctccagttaaggaagccaaagtgaacttattccttgggaaaatgaaaaaaaaaagaactcagcccaagttggtttgcagcccggcccaaagcaaaaccaaaccagaccttcctcctttccgtgggccgcaggtgggccccaccttatcccctcgcgcctcgtgcctcgtgccccgctccgctctactcactgaagagcgggccccacctgccccgcctcagagcagcatccggatccggatctggaaacccgcttcccaaatccggcgcccgtacgcccgcccgccactaccgccgcggtgcccaccgcttcgcttctctcccctcctctccaatggcggaacccccaatcacagcccactcctcctcctcctcccgccgcgtccccaccgcaggcgactcccccaccctctgaccccacctcccgcctccccgccgccccgcgaccgccgcggatcgatcgaggggattcttgccacctgggatctctcctcccctcccctcccccgattcttggtctcgcgcgtctgtctgcccccccgtggtggattcttgtctggctcccggcaaaaggaacggcgtctcgccgcgggccgcggattcgaccaggtgcggtgctggaaccggcgccccgtgtgtcccagatgttaattctttttgtttttattgttctatatacagtggttgatttctgaaccgatccgttgttcgcttggttgggggaggacagagagtttgtttgcggagatagttttcgaattgcgtggtgaaatataaaatttagactagtttggcttatcttggcacctccgcacctgcattgcgccgttgagatgtaacgttgttgatgagctcaattggtcgggttgtttttttttccccagatctggatggttaggttcttcacctggctaacaagaaagatgttgcttttagctgccctggaattgttggtactttctgcgggtgcatctatctgatgaaattgagctgcattgttctggggagtgtttgcttctgctcattgcctcatagggcacacaatgacaccaaggagttatagaattaccgtctcctggaaatccttagtttaccatcctgttatgattttgctcaaatttagccatcttatcattggttatgcgtcgtggaattccaagttgtactgtcctattttacttttgtcaaatgtagttatccatcatatgttatgcacaacatatgctcaaagaagcatttttactggctaggttagcttaacacatgctgatcagtatttttcctttacagttcaatgcacctcaaccctcaacttgttgactagcttctgtgctaaactttgtgttgcaggcatctcagtgtccacggctgtaatttataaccaagcctaagaaacttacattattctagcattcattggatatggtatcggtgaatcttgggctagtacattatgtactggaccacatatatggtaccgtccttcatcgcaccaaattaggaacgccatttttctcgaaaggatggggaggcaccaaacttgatttgttagagaagatggtgaaacagttattccctgaagcacgttgccagaactggccaccaactgccgtgcaacccatgtggaaaacggtttgggagacaaagagttcttgtctgcgagagggtgttttcaggactacatgcgatccacggctaattgaagcattgcctcctgagagtcacaatgcaagagttgcttttcttacacctaagtcagtttcacctgagaagatggcctgtgtgattcatctggcaggtacaacagtttaatcctatttatttgttctatactttgatgtaccatgcatctacatgtttttttctatataagagactattttcaagcctttagatattgatgtttgtacactagctgaatgttgtttatttcatcccatcggacagaaataaaagttgactagatttgatgtttcaactttccatattgagtgatctgctttctggttctaaatattatatttcatatcatgccatgttattaactgatgagttgcaaaaatgttctttgtccagctgttgaaatttgatctgggcttctaatacaatgggtcaagttaaacttttatctaatattacaggcactggtgatcactcgtttgagagaagacttcgacttggtggacctcttttgaaggacaacattgcaactatggttcttgagaggtgaggcttgtatagaatgccagaatggttgtcttacgccacctttgataccaaagcttttttcctaacccgcaagatctgatttctcaaatgaattccagcccttattatggacaacggcgaccaagcatgcagcatgggtcaaagcttcagtgtgtgagtgacttgctactattaggaaaagctactattgatgaagctcgcagccttctgtactggttgcagaatgaggctggttatggcaagatgggcatatgcgggctcagcatgggtatgtaattctaaagttttcatctataattgaataatgtgaatgctttaagtcttaagcaacctgcagcatcccatttatcaaactcacccccattttcgtggcaacttcgtttcaagattcctttacaagtattgatgtgatacatttttccctaagactggtaactgagatgatttttctcaaggaaatatcttttatttcacctcaagtactttggccccttctattaatttctctcttgcggaagcgctcctttttctatttatttggattgcttattgacacggaaaaaaatgctatatgatagataatgaggttaactctggcatggctttttttgggaaaaaactttatcttgacagtagttaagtaccatctacatatgaaaattgctgttatttcttacaagcgtctcatgctaattacataggtggtgtacatgctgcaatggttggatccttgcacccaacaccaattgctacgctgccatttcttgctccgcattctgctgtggtgcctttctgtgacgggctctacaggcatgccacagcttgggatgcattgaggaaagatgcagcaacattggcccaagacgtaacttctttgacagaagacatggcccagaaatcaggaatcactattgagcaagtaagagagaggttgcgatcagtgctgtctttgactgacgtcactcgatttccagtgccaaagaacccacaggctgtcatttttgttggtgcaacggttagtgtcaatgttctatcatcatttctcaaacatgatttacccttcctgtgtcttatatatttcagcctagcacgtaaatttcttgataagagtaactcattatcaccttccagtactagtgcattctggtttcctactattactcatatcttatttttgcattcattcaaaatagatttattgcctgcgtcatttgcagcaacacatcatcttagttgctcctttccaataattacccacgcctctctgtagtactgttgtcatctgcttaattctgtactttcagatatcaatatgcttttttcgttatcatataatatttaatggagcttggtctgaagcaaatgttctctttattttcaggatgacggctacatccccaaacattcgataatggagctccaaaaggcatggccaggttcagaggtccggtgggtaaccggagggcacgtatcgtcgtttttcctccacaacgacgcgtttcgcaaggccattgttgatgctcttgatagactataacagcagaggaaactcatctttgtgatggcatttcttggtgtgcttgttgtgaaactcataggcatgccacatgacaagatcacatttttatgagtgggggagcctagaaataccacattctgtctgtaactcaatatatgtgttttcccaaagattgggaagatgcatgagtgtaacattgacattcgttacctgttaactaagccccccattgttaatctgtcccaaatttcacctactactaaccttgcaactgaagtaatttgcagttgagacaagaaaggaagaagatgacagtgcggcatacctaaactctctagtctctattctgtgtctgaagtctgaactctgaagcaaagtcagtcaaaccatatgccacaagacaaaaacattacagtgtcatcatcaatctcagcacttattttcatactgactagtaattatcatcagcagctactagtatacagcttagtttctgtttcttatacattatatgcacaattacagcatgctgctaccctcctaatttaaaaatgaaatcatctgatcttgtcaaagaagcaaattaaggcctgatcgattgatcatctctctatgcactgtagtattctgaaacttttgaaactaatctgttcctgtctgtctgtctgtatgtaaaactgcagtggtgtagcagtgtagatgctgggccattggatctccagggccagtggatggatgtggtctaatttctagggttgatggatggcggaggcggaggaggggcgggttggtcggggtggcgcgggcgcgagagccagagggaggtgagggcgcggaggcggtgggagtggtcggcgatggcgaggaagcaccgcgccgactgcctcgccgtcagtatctgcggcagcttgtacagcgtctgcagcctcagcgcgtccgcctggatcatacgcatgtacgtcatcagttcatcagtcagtagagtactcgtgcattatatttaaagttgtataagagcctcgtcggttggcctaataataaatccaagcaaaagcagaagctaaaatttaaatttttaaacttgattttaagatattttcactgtgatttcattttagtgcttttaaatcgctgcgaacaaatatataaaagtttgggtgaatacccaatatgatccttgaactttcgcttaaggatcaatttagtccctgtcatttcgtattgtccaaacaagtaccttaagttcattgtgtgattcaatatagtcctttaaccctctaaatatgccatgtgtacatgtcacatcatctatgcatgcaaattcaatatttaaatgtcctttacacccttatgttttcataggaaataaaggaaaactattgagaaaacacacaaaaaaaaagcttttgaccattggcaaaaatatgtagcattgatagataaaaaaaattaacatttttctttgttttatgattgcttcttcttgtttttcttttctttatttgatagaaaattgaaggttaaaatggacatttaaatgttatcttacatgcacgaatgacgtggcatgtccacgtggtgttttaagtggctctaaggactatattaagccgcatgataatttttagggtcttggttggacattataaaacatgaaggactaattcgactcatgaacaaaaattgaaggactgaactggctattcaccctaaaagttttaactataaattattttttattccctaataagccgttttggtttattagagagtatgagcaaccaatgaggttctaacaagtattttattttgttaggacaaaagtttgagcaacaatcatcctattagtgtgaatttttataacacaaaatgaatgttattagatccatattaaaagagtcactcgccattatgtttctttatcatacaaatagtatatatatacggagttattcaagtaattactatttccatcctaaaataaaatataaatattggatagaacacatcttaataatacaaatttgaacaaatgtttgactagtttcgtagtgatagaatatgcccttttcagttctagtttgttatattttaagacggtggtcgttgtattagttaaacttgtgtggtaacgaaactaaatgccttttgcaagtttagttaattagagatctagctgttaataagaaaaagattatccaatttcaggttttatttcaatcactgtaattaattaattattaaccaattgcctggctctagctagctaggtgctagctaagtatgggctcttgttgaagggaacagaacaaattaaaatgcccagctagccaataccattgatcattagtggatagggtttcttagttataggattaaaaggagacagtacaacagctatagctagctggctagataatcaattagcctaagcagccacacagttttgtacaatccaccacttaatccagagccaactaaccaacctaatgcagccatcaactgaattaaaaacaaaaatcaactacaattagcaagccgatcgaatcacgtgtggtaactacttagctccctccctttcaaaatatatggcactgttgatttttcgttcaaattcgtcttattaaaaaattagtataaatatataaaagtataagtaaagattatattttatttgaaataaaacaagtcataatattttttttgaatatgactaattgtcaaacgatgtaaaaaagttaacggcgttatacatttttgaatggatggagtaattaacaacgtacctgcctgacgaaggcttcgagggaggagagattggagatggcaagggagaggtgagccatggcgacgtcggagtatgcggtggcaccggtgccgggagggaagagcaggagtgagtccgaggagacggcatcggagagggcgtggtgggtggcgtggaggtcgcggtcaagtgcctcctccctctccctcgccgactgctgcacaccgtacacacccgccgcctgttgctccgtcaatggctccgcgtgccgcgccatcatctagtagcaacataatcattttatttcaattagttttcgacaataataatgaagaatatttatagttatgtaatcatattatatataggttcgcaagataatcaaatataactattcgagttcatgtagtatcacttaataatattatattagtatgatagagtcgtggatgcatgactatgactatgagtattaatactcacaaatattgctatgagtgtattaattagtatagagatcagaagttatacttactttatataaaaataatatcatatcggtaatgggacgacacgtaaaaataatatcttagaaataccatattgatgatggaacacgcaaagaaaattagagtacctaattaacaagggtatatctaattactaactagttagctactttttatgagatatatatgatagtactactataatataatgtagctagctagctttttatgagatttgcaagtattagatagtagctaggactctgtccatctagaagaattagcttgctaaagtatgtatacacatcctctctacatgcattattggtaaattagccatccccatctacatcgttgatcactcttatctaacttgcctccttcaccaactctccgttgtacattactgcacactactttcttccaacacagaaaataacaaccacatattagtagccatcaaagacttccaagagcctaactgttccatcaactgggacctctcacctacttaaatcaatattttaagatagatagctagctaacccatcatacatctttctttctagttggagtacctaatatatgtgtctggactctggtgtactatggaatactgtctaacaagcttctttccaattactttttttattttttgcaattatgcatgaatggaaatctatgtatgtatagggctactacacacactactaaaacttaaatatatactccatatatatatatatatatatatatatatatatatatatatatatatacttatacatttagagcactaacagatccataaatattgcacgtatatatagggtatttcaggtattttattaaatatatgtaaagctattaattgtactccctccggttttaaattaattgaagttttggacaggatctcacatacttagaaatggttagttagggtgcatattcatgttttatccatattaaatacattaggatggcacatctaacaagcacatcctcttaacctagtggctggctgctagtcccaaagcatctttttactgtcttgtgccggagttgatgcatgcatgcagccatacatgggtaaatcagtttaaattaatcacatggaagctaaaacgccaagttttatcatccaaaaggtctaagctccaaacgtcaactaatttgaaaccggagggagtacatgtttagggcgtgtttggttgcctgcatccatgtatagtgagcagcgtgtttggttgtgcactggctgatataagcaaatattatatgtatatgcatgcatgcacgaggacgaacgaagtaaccgaaggcacgcatggaatgatggaagaaacgtgctgcaaacaaacatgcatgtatatgttgctgtgcatctcggaggaagaatgatgacattttttagtcaaaatatactaaaaacgtacgtaacaaaaaagaaaaaaaatatcgggaggagcaggtagctagttagctagctatatactccctccgtttcgaaatgtttggcgccgttgactttttagcatatgtttgaccgttcgtcttattcaaaaaatttaagtaattattaattcttttcatatcatttaattcattgttaaatatatttttatgtaggcatataattttacatattttacaaaagtttttgaataagacgaatgatcaaacatatgctaaaaagtcaacggtgtcaaacattttgaaacggagggagtagtaggttaattggtgaactcaagcttatggaaacctgagctcatgcaatatatgagtaatatacagttatgtcgatctagttaattaatactccatctgaaacagatgcagtatattaacctagtatactagctagctaatatactgctacttctgtcgctctagtatattaaacagatctggttgtaagacgttttgattttggtcaaagtcaaactacttcaaatttaactaagtttatgcataaatatagtaatatatataatatcaatttagtttcattaaatcaataattgaatatatttttcataataaatttgtgttgagttaaaaatattattttttttctacaaacttagtcaaacttgaagctagcatgtattttcttggttcaccttcctctgtctctcggtccatattctacatacccatattggaacatagacaatgggttttatttttttatttttaacgtaaaccgaattttatcatattaacatatttaatttgtatatagtgatgaatgacaccatatagtctatatatgttgctattttctttaaaaattattaccatatattttgatgccatcctccccttcattagctattacattgtataaacccatctctctttatttttaagtttttatgtattatatatgtagagcgcggcatgcgcagctagccaaatacgtactccaacatgtccaataactaaacgcgtttcacaaaattatctgactatatcatgtctatcatatattgtagacgcccttaaaccctaaaaatccaatataatctagctagtatctcaaaatctaaagggtgcctatactacaacacatcttttataatttacctctgctttcagaaggatgacgtgctaatttatccagttaaaaatgaagaaatcctaactcatcaatatatgcaaaaaaaaagtatattgcaattcaaaacatcgagattatgggtctgttcagattatagccaaaataaaccttaccaagttttggcaatgctaaaattttggtaagatggcaatattgccaaaattttggcaggattttttatgtattgatcaaatttggcaacacactaaacgtggatatttttttagcaactttgcgaaaaaaatggtatggttgaaaatgacatcaaaatgaaaggccctatattagtggattatttgttatgaaaactctttcatatagttatactccctctatcacataatacaagggattttgccctttctaattgtctcacaaagatttttgtgtactactgtcagtcacatccatcaacttcaattcaaatttctacctattttgaccctcaactatcccctcacccaaaccaaatctcatttaataggggtattttagtcttctctcgctattcttaatcttataaaaagggaatagtcccttatatatatattattatgggacagagggagtatttataataattttcataaacattaatttgatttgaaaaggtaatgataaatcatatcaacatctaaaacgtcaagtaaaaatatcactgccagttcagatccgtttgggtgggtaaaaccatggtgaactggcattagtactatctctctatatatatcaccattggtttacactaaaccgtcagtgataagtcatcagtgatgatattttgtggtagtgaatccttaatatataatatataaagccggctttaaataattatctataaattgattatataagatattcaattaattatgtgctaaccttgatgagctcggatgggcggaagccaccaatccagaggaagcagcgctcggcggcgggcagccacgtcccggagacgaggtggaagacgtcggcgctggccacggcggccttgagctccaccagcacgccgtggtgcgccaccgccgcgtccaccagctgccgtagctgcgcctccgccgccgccgccgccacgccgccgtgctgcggctgctcctccaccgccgcccgcatgtgagccatcatcctctcgtggctctccacccaccgcgcgtactcgccgtcgaaccacgccgcctctgcatgatgacgatgacgatgacgacgacgatgatgattagtctcccttacacattataatatgttcttttttttctcttaatcctttaagtctagattcactaacattcatatgaatttgaagttttgaacacatatataaaatacatacgtggatctatgtataaatctatttaaaacccaacgtaaataatgtgaaacagaggaagcattcattaaaaattttagttgtttccattatgtattttaaaaattaagagttgtgtgtttttgcacatggacatctgcattcattcctgacatatttgatctaatgatgaattaattaacgagtaaacaaattaattagagaatttgttggtgattatgtggttttgagtattatatggatttaattataataattaattagggttggtttgatcgtatgcatgcatatatgattatatatacctgggctttgtcctccaatgccggcagaaaaagctccaccacccaaaattgcaccctatgttgatacgtgcgttagacatgcatcatgaaacaaatcaatcaattaattagtttactgaaaacatcgtatagttcaggagcatttgcatgtatatatgctgtacctgagttcttgatctttgcaccaactcctgttccagctgggacagtctgatcctgcttgtctccagattttgaatgtaagcctatatacacattgatccatatacgagacacaatttaaaaaaaaaagcatagttaattaagtgtcatgagaaacgtaattttcagatagacgtagccagtaatgttgcacatctatattccattttaggtggtaagtaattctccgtacccccacactcacatgcatgcaaactcatttgtttaattttgactttattttatatccgacatgacacatgttagttattttaattttgacttaaatttggagtaagaacgtcgtaactgcacaagtctatactcctgtgctgtcgtaaagtagggtgaaatggcagtgcggttaattaaacaacaggtaattaattaatctcgatttacagctaccctaccagccaggtagagcaagagtaattaactataattaactgcaacttaattaattaacaaattaccttcttccttagcctgcttttcctggctgcctccctgttctgtgcaagcctccgcagcgtcttggcgtccggcgtcttggggccctcgtgctccgacgccgccgccgacgatgcgccgccgtgatgcttcccgccgccgccgccgccttctttctgatcggccgatcgagacgaccacacacacacacaaactcatgcgtgagcttgagccactcagaatgtcgtagatcagctgaagacgaagatgatgagatcatcggagctaattaagttaccttgacgacggcagccttgccgtccttcccggaggccgacggctgatcggccggattattcagcctcgacggctggccgccggccgccgccgccgccggcggccgcttggaagagccggcggcgatggcgagggcgttattggacggcgccgagttgatagccgccatggatgatgatcccttgggagaaggctcgccggcgtgcattggctgtgaagggaagatgttgagggtttctgcatccatgtagagatcagtaaagtagcaattcagaataatactgagaaacatatgtccaaaaatatatgcatgttgatgaactaaattgtccaaattaactatatgtaatgcatggcattaattaatatattaacacatatatcaaatggtgtaacagcatgtcaacatgcatgtggttgtaagttctgttgtttcacacttatggtcctaatgtaaattaaaagtatgaaaaagtgaacaaaagggagagaatatatatgtgtgtgttcatgtttgatgtcctagatatgtaaatagctagctagctagcagtagtatatatacatatatatgcaaatcgttgttgcaaatgtctctggatgattaaggttaaaaatgcatatatctagcttgctttagcattacatatatgtgtatatacgataatcatcctagcaagaacgacacacatctccaggtgtttgttatacgtcactctctcctccccatctagagaaaattttgggaaaatgacatgtcagtgagtaaagctttgaggcgatcaaatagaaggaaaaaagaagatggatcaccatcgctgcctgctcatcgatctctatagatagctaatactccatatctgtcgtcgaaaaattcgataatgaccatatatattcacttgtcaaaatcgaggtagctagatgagatgcttgccggcctgcttgctatatatctgatgaaattaattaattaatatgaccaaagaaagattattctccctctgcatccttgtcgatcacatcttttttcggagaagaatataatgcataatttgtgaaaagtctgaagatttggtgacagtaataagtgcatatatatatgtggcttacgaggttgttcttgaattgctgctgatgcttgatcctggctgttgaggtagaggaagatgtgatccaattctgccatgtcgtatcctcccccaggatcctttctgctgcacttgcacaaattaatacaaatggagaaatcatcacaaaattatattatcatctgatctgacagtagctatagctgtagtagttgctaaattattctgcatattttaaggttttggtaagagaagctaagcttcctgctccaagaaaggggataaaataaaaaaaggaatttttggaatatacgttgtttgctaaacaaatccagtattagaaaatgtaaaaatccttagaagatatcaaaattaaggaaatgaatgaaaagcctcggcaccagctagtagaattagttgcacccatcgctttattaaatttggagcaaacaataagtacacccacttcgaataccactcttcaaattaattaagagatgcttaaatatacaccaaataaaacccttaataaccaggataaagttacttatcttgcgcaaacatgcaccattagtaatcaacccattcatgcatcatacaaattaaaacatgaaaaacaattctgtaatcttgaaagttcaaaaaagcactccataatctcgaaagaaaagtaaaagagacaacaaattaaactgccaagaaagacagcatcaagagagagagagagagagagagagagagagagagagagagagagagaattgtggagttaattaaagctccagttctgatgataagacaaaaaaggggatcaagaagctaaacattgagcaaggtgcttcaaatttgttctgataaaacaagatcgaattagggaggaaaaaaaaaggcacaagtcgtataggagttagggtttttacatgatgttgttgccatggatggaggaggaggtcgcagaagcttgcatcatcatcccggccgtgactgagcaagaagccgcctgctgatcatgtggctgcagctgctgctgccatggcctatcccccatgcaaacacactgatccccagtagcaaataaactatctctttcttctccttgatgatgatcacctcagctagcaattaaatcgatcctatcaccaaatcagctcctcaagtacttcacatctgatctcatcacctctagactcgatcgatatgatatcgattgattttgcgaggaatttatcggtagacgacgcgtgtcgatcgatcgcgccgcaatccctcctcctcttcttcttcttcctccaagctaggtagacatagcttctaattctccttagcttcttctgaccggaagctagctagctataggtagcaaaagtattaggacttgtagtagctagcttagttgaggtggagtgcttgtacaagaaatataaggggagtggttacaaggccatggaaaaagctaggcaataattagactttttttataaaggtcgaatacgatatgtgattggatcggggttgatcggtctctgcgactggttttggagcgcggttttatattgatttttgttaattaattggtgtttgatctttacgtgtttcatcattggtccaagtcaatttgaagaaaaaaaaagaaggttatctagtgcttgtattgttgttgggtattttgggttcagaagaaattaagtattatcactgtttcttcttgttaattaattttgctcaacttgttgtgttttggcaggatttaggttgggaattaattgggtcctgcaagaaaacaaagtatggtttggactagccgctaatatatactagtatatattttttaagcaaattaattaaggcatatgctttgcctttgtgtatattgatagagcaggggagatgcaaatatatatatatagttgattatcaattggattgtgtaaacatatatttatgttgctgtatatatagcacatactattacaaattaaaagtacacggtatgaacatatataatttcaaattccctaccgtgtacttttgtaatggttcgatggcaataatagttaagaaacatcagtgtcttaatccaaccacaatgtccacccttttcaggagccaatagccactcaaaagagaaaacaattaaaggatgtgttattacaagataaacataattaatagggtttcctcccttggatacaaaagaagggggccctggagacaccacagttggttgatccttccaaaatgtcaattaattagtaagacacatgattaaattccagatacccatgaagcactatgtccggtctgttgtatatatgttcagcatccaaatatgcaaaatttgggtttgattcttctctggccagcaacagacctggcatgcattgttggctacacctttctcttccaatgagcacattattatacaggtaaaggtcaaagctaaaatacatgccaatgagttgacctctaatgatgcattgcatttagctactatctagcattagtacacatgatcgacccttgtatatatgcatgcatgcaatccaatttcagtatataatatattcttataccaaacctaaacaactaattaaattaagagaagatagcaactaatacttgatgaaaccagccaacaaaagcaccttatttctcttgtttaatttgtttcatatagcgtgcatatatatatttttatatctctgttactgccagttcaattaatctcgttctgctctgcatgtgtgtatatatatctcccttaggattatttaataagaaactcatatatatatatgaatatatcacacacacaattaaccagaaatattaggttgccagaacacacacaattggtatatataaattaagagatacacaggtaagtacattagtgtattaattaggatccgtgattaattatatataatctgtacacttactttgttaaaaaataattatgtctatagtatatattaattatctgtccgtacgtgcaggagtatatggttcaaactgtactgcctgcttgtgtcgtcagatatggacgactcctttgcgtttgcatacatcatacaatgctgaatgcctgaatgcaacactagataaactgtgcgtgtacacgtacgtacatgtacatacactatacgtacctaatacacgtacttagacgccggtagctgacgtgtcaattcatctcttatgtgggctccacagaattgatggcaatggcgtcgtacgattttcttgtacagcttatctatagctgaggatcgatggacctctcgatggtgatgaattgagtgatcatcaatggaggctttcaatccgagtttgaagctgatctctactattataaaaattaaagatgtttttttattagtactttagtacgtcatccgtatatgagttggtttttaaattcgttcgtttttggaaatacatgtacttatttgagtcgacttttaagttagttcacttttgcaaatacaaaagcagtcatataagaaatctcttttaaaaaaaactggcatatatactaactcgaaacgattagactcctaaccatagctcataatttttaaaaagaaaatacatccaaatgaaattgccacagtgaatttcaccttatctaaaccatatagtagtaataaggttagaatagacttcactagttgcaacgcacgaacaatttttctagtgaagataaaaattaaattgatgtatgtaaaacaagaaaaatcattaacacatgattgattaagttttaattattataaacttgacaaatggatatatttgatattttaaaacaacttttgtatagaaagtttttacgcgaaacacaccgtttagtagtttgaaaagcgtactaaaggaaaccgaggtaaaatatcttaatcttagaaaagaaatggatcgcacgtgatgtcatgctgacgtattggttttctcgtccacggctgtcatgtcatgtcatttacttttgcttagtcgccggccattatatttataaatcacctgccgatcgagagatcacttaatttgcctgcctagctaatcacataacctaactaaacgactccacccaacccatggagacgtgtgcatttgtgcaacattgcacaatcaacctacccttgagttggatagatagatatattaaattacaaatgatactatatctttttgtcatgtgtgatattaaattttgttaagagtattttgctgaaaaagttcttgagtgttactcggtttgtacgaatgtaaatatgggaaaatcagaagaagttttccttttgtacaagttgtaaaaagaacacatagaaaaaatttgatcaaacctcttgaaaaattctttcgaatagaagtgtgcgtgttcatttctatttctctatcttttctatttctatatgttgaaattcctccaaaccgaataaatcctactgtctacgatattatagttttaggccttctttggaatgaataattttctaagaattttcttatgaattaaactaattcctgtaaagattttataagaaaatcctacattccgagcagccagcccttatttttagattttgtttggcataattaagctcctatctttattatactttgaaaataaattagttatgataatatgttttttgtgctgaactatctttcgactaactagcaatcaatttaatacaaattgttgtcgcgtctgaaagggagagtggatcataacaattaacataatgtcgtgacagtgcatacggaggatcaatctatcccctccttaattaaaaaaaacaggagggctgcagga

SEQ ID NO: 9140 - DNA, 49827 bp, Oryza sativa
aacataaaaaatcataagctaatagtgaatatgaaactgtgacgatgtgacatacaccaactattgtgatttattttagtcagaatattcatctcaatgttaactgctatgctgtgacatcagatgatcggccagaatatgcatctcttcaagcaatcctattcgggccatttgttctagctggcctgtcaactggtgattggaatgcagaagccggcaacaccagcgcaatttcagactggatatctccagtcccttcatcctacaactcacagctggtgaccttcacacaagaatccagtgggaagaccttcgtcctctcgagcgcgaatggctctctcacaatgcaagaacggccgacggtcgatggcactgataccgccatccacgcaacattcagagtacaccctcaggactcagcagggcagcttgacacccagggtgcaaccttgaaggggacctctgtgcagatagaaccatttgacctcccaggaacggtgatcaccaacaaccttacccaatccgcgcaaaagagttcagattccctcttcaacattgtacctgggctagatggaaacccaaactcggtctccctcgagctcgggaccaaaccgggatgcttcctggtgataggcgtggattactccgtgggtacaaagattcaggtcagttgcaagagttctcttccaagcatcaacgggattttcgagcaggccgcgagctttgtgcaggctgctccattgaggcagtaccatcctatcagcttcattgcaaagggggtgaagaggaacttcctgcttgaaccattgtacagcctgagagacgaattctacacggtttacttcaaccttggggcttgaaccttgaaagaggttactcattagtagaaagaatcaagaattcagaataatggttgtccttactatactgtaatttagaatatgcagccaaagaggaaacgttttgtttcttctgaaattgtaggataatttttactgagttcagtgcaatgttgtgcaattatgagttttttttctgtggcattttcgtatcttggtaattgaaaatgctgctgaaagcctgaaatacagccattctgcaacatatatgatgcagtagatgctacttcctctgtttcatattctaagtcattttagatttgtcctaactcaaacatttctaagtttaaccgagtttatagaaaaaattacaacactaaattagttccactaaatttattattgaatatgtttttatagtatatttttaattttgtgttgaaaatattgctatattttttttataaatttgatcaaacttgaaaaggtttaacttaggataaatttataatataaaacagaggaagtatcatttatctccattgttctggcttttgtccggtaaacacaagagggaaaaaaatcatctgttcttatcaggattgcgtgatatacactataatggcattagtataacaatataagatcagagcaggtaacagcagtttaagtctcataaaatacatctccagcgactgagaggacgacaaactggagattctatccaattcaataaactactgaggaatctcagctgatcagagctcaccattagtgcctgcattgtttaatgcatttcggcttaacacccggcaaaggagttgatcaatgtacccatcatgcctaaagaaacccacccaaccacaatggcacaaatcaagggggaaaagaagtcatcctctgcaaagaattttttggcacaacttggtttattctgcaatccatagtcatgccaatccatagtcatgccaatcaagtgatataacaaaatgtaagcatctgtgaaattatccacctaaggatttcaattggataatataaggggggcagaatttggtagcagatgtcagaatctgtgaaattatcaatcgaatcagaactgcagctgccttgcaccaggaaattaatcgaacaaaatggttatcttcgtgacaacaatatgtatgctggttcagatcacaagttaatagatgtttgaactttaaggcagattattaactacatcccagattactgaaacagaacagcttcacatgctgaactttcagtgttacatgttgcagatctaatcccaactattctcagtagcattaaagaatgaccatttggggatagagtaataacctgagaactaacttgtcatttgtcacaatttcctctcagatccgattttcaatctagagtagacccagccaaccaagcacaatccggcaaacttctttgaacatacatgaatttgaatgcgcaccagataaaggtgcatacataaataatctttaaggaaaaatgaataatggacatgttggcaatatgatggaccattgctgataactattactgattgaaatgtagcaagcatgggacatagtacatcacagagctagctaaatgagacaccacaatactgaccgaaaaccaccaagaataaagattacacaacatacccaacacgcaaaccacttgacttgactgagaggatgaattctttcggctgccaggatgcagtgtgcatcacaaagttgaacaatttaagaaatgtagcagccgacaagaagaagtgtgaggatagagcagcaaaggtggatgttgaaatcttgtaggttgcaatccattccacgcccctagccgccttagatcttgtcgagcttctcagccttcaccactgggttggccttggcgatggcatccctagccgcagtccggtagtcgaactggcattcatgcttgtcggagtagcggtgcaacgcacagtacatgttaccgcaccggcagttgaatcccgtcagcccaaccctcttcctacaggtagcgcaccggttcggcccttccttgaccttggggactacagcaacctcctcgctggtgcccgcgacatcggtaggctgcacaacgagcgtcttcgcctcgacctgagccaccgccaccgccgtgctaccactggcagcaacaatatgctccttcccaccgtcacaaccattgacaatgctatcgatggaggaggcagcaagcttggcctgctcctccttcatgatcatctccttgtggcacttggagcacatgttcatggtcgccgcgctgccaaagaagccgcagttattgatgcaaaggattgggccctcgggctgctggcagccagcctccttgtgttccatcgcaactgtgatctgttcatcaaacaaacaatgcaaaactcaataccgaaatgcgtataagaaacaaatttaaaatttaacatacggataaatcaactagtgtccaattaaatcgggcggtaagataatccaagaagcacctagttgctacaattttcctatcgaaatttccatataattgtgacttttaaaataacctataacccactgcggcgagcttacactttatgaaacaagatcctaatttctatgaggcgcaacgaaatcgccatcacaaaagtggattcctcatcttatcaaccaaacgcgcctatccatttcgacgaaatcaaattcaaacaccgtaaatctgctgtaacacgttttacccactcacatttaccccgagtaatgattaatcgcccacggttctacaacaaatcaaccccaaaaaaagatcaggaaactcacgcgaatctaatcatttcaacctgaaagatcacatagcctaatacacaaccgaaaaaaaaaatcaaacataaacgctttcccctcgagcccaataaccaataaccaaccacatcaaataccaaatcaaacaacgaccccccacatcagatccccgcaccaacccaaaaccgatcccccctccccaacaccagcaccacgcggatcgatcgatcgaatcgaatcgaccccaagaaaaaaacaaaaaaaagaaaaagaagcccacagatcaaacgggtcacccacaaactcaaggggggggggtggaatcaggcagggggagcaagagggcaaaccctaaccctggtcgcggcggcggcggaggccgaggcggcggtggcggaggaggcgtgcggggattggaatcgcgagctcggtgcgcgtggtggcgtctcctctctctctctctctctctctctcactctctctcttcaggggaaggtgggggtggggggagagagagacactgataaaaaagaaagcccccgatggcgacggggaaattaccggtttgcccctcgcctcgacgtgtatttacgccacgtggtggggttgtgggccgttggatcgtggttggacggatgggaatcggagggagggtgtggggttttgcggttgggtccctgggagatgtggggttataaaaagtaggggctttttctttcttgctggggaagaagatggaggagagggagagcgtgtcccttttccttctctttattgttggtgtgatacttgtgtttaattattaaatcctttcttattatagtgctggaatttagtttttttctattgcagtaatactgtgaaataatatgaaccggtataaaataaaaagataacgtgttcatatgataatcgtataaattgttgctaacttttgtagatgaaaagaacaacatgttcataaccattccctataaaatcatattgccttataaatgaaacatataggttgtcctagatataaaacaatttttgcctgcttgacactcttgtgttcatgaaaattatttttttaatacacaaaagagttgcgcacctatgtattaagaacaataaaatttataagcggagccaaataaaaagaagaagagagccacatgtggagtagatgaaaaactagaggaccataaacctattctcatggtaagcaagagacgacctattgtgacatagcactctaccttattgcgtcatgtatataccttatcatgtacaaaacaataaaaataaagaatatggtcagaccaacttgcttttaactatggatgattggtagtattgatataggggtaagaatacatttttaggatttagttcaatcataagggtttggattaagtcgttgatttcgtaccagctaattaggtatgctaggtataaacatttggcatagcatacatgcacttagtaatataggtgctcaatgaaaagagaaaattgacatttagccatcgtcaggatggggtttcgccagaatgccactcccaaaagtggtttcgttaaaatgccatcctcaaacaggggcaacatgttgtaatgccattttatccatttcttctcaatttaatgatttttgtagtgttttttcttgctgagatgactaaaataccctttatcctatctcatctctctcttcttcctctccgttgcatatacacagcacggctcgatggcgtggctgtggacggggacgacgccagctaagctggggacggggacggggaaggggacgacgccggcgtgggtggggaaggctgcccccaacctccggcgcgtgcgccagccaccgcgatcgaagacggcgacggcggcgagcctgacctggacctccatggtaccaacgcccccgcccttgagcggcgcggcgtcgtcgggacccacgtatgcgccatccacctcgaggcggaaggcgagcgtggtgatgttccgcggcggctgcgcgaagggcgggagcgtggcgacggcgatgggggaggacggggcgagggagacggaggcgagcggggagaagcgatgggggaggacggggcgagggagacggaggcgagcggggagaagtaggtgacagtgagcttggagtttgggttgtcggcgaggagggaggcgtcgatccgtccccagccgcgccggtgccagggcagggatccatctcctccacgcaagtcaactaaatggtcacaggggcaattttgtcacaccacggtggaaatcatttgcaaatcagctaatttggtcgaaatggcaaagtagcaatgtggcgtcgttcgaaaatggcattataacgaagccacaatccggagtggcattctggcgaaaccccatcctgacgatggctaaatgtcaattttctccaatgaaaagggatcatctgacttaactgttgtgtaattgagccactgacacatggaaagagactcacatgtcagcatatgtactttctccttgtctttttcttaaccaacgcttgtaagatcttgtattgtactccctccgtcccataatataagtgattttgagtttttacttatacggtttgaccactcgtcttattaaaaaaaattggaatcattatttacttttttgtgacttactttattatccaaaatactttacacataacttttcgttttttatatttgcataaattatttgaataagacgagtggtcaaacactacaagcaaaaactcaaaatcccttatattatgggacggagagagtagtattcatcaaaacgttagatacccgggtgaactaatatatgttggtatgagtcatttcagcatactcctgtgagaagcagcaaatggacaattacatgtatgagagtatctgataaattttatgatccttgcatatatagaacctgaaatatgcaccatttattccattctattttgcaaagaagaatgtgtaaacggtatcagagctcgaaaattttcacgcatagggctaaactaatgaagagctattttttcacgaataatatagcatttttttaaaaaatataataagaattacggagcgatttcagcctaaacaaataagagctatttttttcacaaattatatagcatttttttaaaaatataataaggattacggagctaggtatagggtttcaaccctagttgctccatgtttgttttccgccccagtgcgcagataattgttacctagctctacatattttgtttaaatagcatagagtatagagcagatgatggacacaagtcgtctgcagtactgcaggctgacatgtgggcccacagccctcgggcccacatgtcagcctgaagtaccgcacatgctctgcaggggatctcaattgagcagatgatattgatctcttaggtctaaatttcataagtaaactatttataaggtattgtttgagttgttgataaaacctaactaacaagctttaatacgtagagaaaaagaagattcctacaacattgtactccctccgtccctaatataaggattttaactttttgcctgtactgtttgaccattcgtcttatttaaaaaaatttagaattattatttattttatttgtgacttactttattatccaaagtattttaagtataacttttcgtttttatatttgcacaattttttttaaataagacgagtggttgaacagtgcacacaaaatatcaaaatcccttatattatgggatggagggagtactgtcttaaccaaattcctcatgttatttcccatcttcgtctactgtggaggagctctaactcattactcatccgttataattatcattttctttaggacaaaactcggtttagtatgtaacatttgatatactacccggtcgaaccgtaccaagctttcttgtaacatatatgatggtgttggagatctctagccaatcttatgccacatcgcatatatttcttttaactatgtatgtgccctaaataaacttagacatttattcgagccctagttttaaagacaaattctatctacccaaattgtaccgattctacctagcacacatgctaaaggaattttgcaaaattatgtatgctcgtgtggctgatctctcctctctactacacatccattgtataaaaacgagatttgaagggagagatacccctctaaacttttttttgtaaaatgaattgataaacatgtcaaaaattaaacacgagattttaaaatggaaaccacacgctctttacaactgcaccgtgaagtgatctctcacctccggtgtacaagcattttccatcgaaccctccatccccatggcgggtggttcattcgacgagacgccgccaacgccaaatcccggcgcgaaccaaaaagcgcgggaaaaatttccccgcacccgcgccatctccacctataaagatctcgccgccgcagccgccttctcctctacactactagtcctcttcaccccgccgcttccaccagatgggccgcaagaggagggctagggtttcccgcgacggcgacggcgaggaggaggaggagcccgcgccggtcgccgcagagagcaagagcctctacgaggtaaatccccaactccaaaccctaggtctatggcttacgaggtgttacccgtacgggtagcggttgattttgcggcggggtggtgttggtctgatcgaatcgtgtgctggatgcctggatcgatgtttttttgttctttttcttttttttccgggattcgagggtgaggagcgcatctgattgttcgatgcgatagcgggatagctttcgttttcttgtttatccggtgtcgcgtcaggttccgcccgttggggaatttcgtggttcgctgcgcggattgatcgtgtgttagtactagtgtacaagtataacccatatttgcataccagattacctcgaattgaagcaactgtgtgtaccatttcaatgtgcaaaaacaattgggcaagattatgctactgatgaacccaaagtacgaagtgcgtacttatgcaataggaaaaacattttgtatcccaaacatggaggcagttgcttgaaggctcacatttcacttgtgaagccttatgactgatatgggagagtgcttattggtttggccttaactttcagctctagttttgggcttcgcagtagtagtacctctccaaggattttatagtgacttaatcttctttaaatcttgctggccttcctgccaattgctctttgatggtatggcattcttgcctttgagctatacctgttcctcttaagtattactgccacagaatttatgaaggtcaactgatgtttaaatctaatttttatcatgttctggaatctggagtaaatgtcaaacaatcaaacagttacgtggctgggtgtgatagggcctctaactctctactatgcacatacattgaggacatagttcaatccttgctagcttgtctcgttaaaaatttatattgtcaaataaaaagggtttctcatatcatctgatcaatcagaaaacaccaatgactgggtaaagtgtgcaagagccaagaggtacaagaggttgtgattggcggttgatctcaagctataccactattagttttaaaagcaagtacaatagcattaccttacttgcataacttaattcaataaaccttatatatgtcccagctgttcagacatcagtattttttttttgtcttgatctgtgctgaaaaattgtaattaattggcgcacactactagactgtttagcgcgttttaaaaaaattctagactgaaggaaatgttgctgaaacctaagcttaatgaagtgccaaagaagagctgaaagagttcatggaaattcatgtaattgactttaaaaaggccacaaatcataagattgcaaccagaaacagtggctcctataggctgagctagctgcaagcctgcaacttaagagccccatcggttggcctaataagccaaagcaaaagccaaaatttgaattttcgaacttgattttaagatattttcaatgtagtttcttttagtgttggattttaagttgctatgaacaaatatataaaagttttacctataaattaatttttatatggcttattagagaatatgggcaaccaatgagacttattgtgctgctacctccctagcagtgacccctagcaaagggcattgctggcttcctgcagcagttgtctgtggtgcaggtgcagctagctcagtggaatcggcctaaattatttatttttaagcgaagctgtagaaaggaacctaaagtacatatgcaatcagaaacaattgttatgcttcagttttgtctttctttataacacaagtaactcatttgatgtttcctttcttcattctgaagatcttaggggttgagaggacagcttcacagcaggaaataaagaaggcttatcacaagttggccttacgtcttcatccagacaagaatcctggagatgaggtaggatcttgtttccaaattttttccatggattaagtgccatttgtctcaattgagctgttatgtgatgtcaggaagccaaggagaaatttcagcagcttcagaaggtgatatctattcttggggatgaggagaaaagggcattatatgatgagactggaattgctgatgatgatgtgagcacctgattccaagtagtgtgatttccaacctttcactcccagtagattttctgaagttttgtcttttcctgtaggcactggttggagaagctgcagacaatcttcaagagtacttcagagctgtttacaaaaaggtatctttttggtccatatcaacaaaaaaacttgtgctatctgttcacctatacaatgatcggtgatgacctacacttctgcaggttactgaggctgatattgaagaatttgaagctaagtacagagggtcagattctgaaaaaaaggacttgaaggatctatatacaaaatttaaaggcaacatgaacaggtggcttacaaaatttagtgttgattaattttctatacagaaggcaatgaattgcaagtgaataattgggttccatttctattttaatttggtgcccttgtatgcaggcttttttgttcaatgatttgctcagatccaaagcttgattcccatcgctttaaagatataattgatgaggcaattgctgaaggtaaatgattatatgctgttgccatataattttatcatataatattgaatacctttttctattccttttctacaatgaagcgctggcaaagtgtttagcttatcatgctaactcaatctattccctgaaacttctctaatggttaaactcctttccatttccttcccttttgtaggtgagctgaagtcaacaaaagcatatgataaatgggccaagaagatctccgagattgaacctcccacaaacccattagagagaagagtgaagtaagctctcattctcttatctcccaagtaatccgccttccgagatgttgtctaccatcagttgctcactactgcatttgcctcaaacctcgtcacaggaagaacaagaagaagagcgaggagaacgatctgatcctcgcgatctcacagcgcagggcgcagcggaaggaccggttcgactcggtgctctcatccatcatgtccaaatgtgacccaaaggggagcagcagctcggagcccacggaagaggagtttgagcaagctcgtcagaggctcgagaaaaagcgttccaagaaccgcaaatgattcgccttgcagcctcccttgtggcttgtgcaattctgtttcatcgagtttgttaaccaggcctatctttgacagatcagattgtctgatattctgatccctagtatctatgtgagattggctgcttctgttgtggtgcaagttcaggctggaatctgaacttcctgctcttttgctgaaactggggccgatctttagcatcactgcatatgtgtataatcaaaatcttaaatgtttcctggatgtgaacttgtgatctagtttctgtataagttaatccagtagctgtcttgagtttttacgcctgtaaacgatataaacaagaatgcatcatcaacagggacgagaggcgggtttgcaatctcgttttggggttgaattgtgaggcacagcactattttcactaaattctgatgaaatttcaaacggaactattcataaaactgaatggtttgggaagctcgaataaaattcgcatgaacaatcttgataaaaactggttggtttttgcgaaattttctgtgatttcgagataggctagaaatcatatttttgagaagggggggggggggggtcgaatggtatttgaaaattttagggtttaaacagcaaaattcgattgaaatttggcaaacgccattagattagaacttcatcgagcaatcacctccactaatcaccaccacccctatcttggcaaacccactaatcaccacccccatttttggcgaagctccaccccgagcttcgctcatggccgctcgccccgccattaaaatcccccgcgcgcctcgcctcgcctcgcagctcaacgccaccaccgcgcgcctgcagcccgagaagccgtcgatcgacaacatcacccgtctcctcccccaccccgcagagcccagcacttcgccgccgccgcccgggatggagatgaagaagatcgcctgcgccgtgctgctcgccgtggcggcgtccgcctccgcggtcgaggcctccgagtccccggcgtccgcgccgggccccgggtccgccagcggcgccaccgccgtcgcggccgcgcccgccgccgccgccgccgtcgtgctctccttcctcgcctactgcctgcattgatgacgaggagagagagagtgagagagagggtgtctcacgtgggagaaggcggcgcggctggtttatttgtgtttttttttaaaaatatatgatctaattcgttggctaatttgattgtttttggtttatattttaaatctacgtgtttgtgaattgtggttgaatatatatatatatatatatatatatatatatatatatcatgttgcttaatttgttttctgacgttgtacctgctcaaatccacacttgtaagcttgtaaccgttattttatggcaatttaaatatagcatatgaattgatttgttcctttttaattgttttttttgtttaaaatacattcagatcgttatagatttatcgaaaacggtaaacatctttaacacaagtcgttttgtggcatggagaaccatctgccgctcaagcttatagaatggacgcaggagtaggtgggtggatggcatgattcatgtggctggctattgtattagcccaactacattgtttcagttagcttttatgaaactgataaataatattgatattactactccctccgagttgataatatttgtcgttttaaaaatatagtctaagaaacatatttgaccactattttctattataatatatatagaaatatcacaaatatataattttattgaagtacatttttaaaactaatatatacatatagttttcatatttctaagataaatattttataaattatttatagtcaaagatttgaaggtttgactttactctgcttcaaaatgataagtattaccagttcgaatggagtatagtacattgtttctccttaaaaaatctacatcatgttatccgcgtcacattactaaaatcataaagagatgtgacacttcataatactacgaatctagactaagagacggttcagattcgtaatactagaaaatatattcctccagaatcgcttatattatgggacggacgtaacatatagaagttgatttagaatattaaaactcaactaatcaatcacatggtaatgactttttcttttgtttttggtggcttaacttcatctcaaccaaatctaaattcgacctgctatatctgctcatccagttagatctcgaccgtcgaatctgcacgatccacgatatcaaattcgcgatatatatatttttttaaaaaatacaaaattccaagaacacaagttgccaatatgccctgacaaagacaacaaaaaaaagaacagaagaaaaaaaaaattaccaagacaaaattcccctatctattgactaacccaaacccaaagcacataagcatgtgattagcaaaagacgccgtactctctctctcatcaaactgctgacgtacgcacgccgtgagacgccgccgcagcaaaagcttcccttcccccatctccctctcctctcctctcctccccgcctccccccgcctcgataccctgcaagccctagctctctctcgccgccaatggagtcgcaggtgctggtggcgctcgccctctcgctcgtcggcggcctcagcacgtccatcggtatggccccgccccctcgcgcctcttcccctctcaacagtttcgtttcgggggtttggatgctgctctgcctgcggtcgggcgcggtttcctagggttccgcgggtggatttaaggccgttttgtgtagcttgcgggctcgctgcttgaaggaatcgccaagtggctgagcatctcgcaatctcgcgttcctgggaatttctgtgtttctggtgagtttcaggtgtcgatagcgaattctgtcttgctaccgctcgtataggtgacttccatgcgaattcagatgcatcctttattagcaaatcgaaaattagtgtttaggatttttgttaagaaagagagttcagaatccagtgagtatctcccttttgtaccattttggcttgtgagtgatgaatgttttgctatttaggcctctgaatatgaaaattaattgatcacaatgattcatcagatttttttgttttaaggtcagcaatggggtgttgtaatttgtaaataagtggcataactggacaggtttagtggcagggtgtggttttctcttatgtgtactatgtataacaggataagtaataaatgtcgttgcatggtcaaaaacttttaacccctagggttcaacattgtacttccttatgtttggttaacaatttgcgaccgtgaatgatctcaggacattgagcgatgagtactctcttttaaaactgtccctaatactatgtggagggtttccagcaaggcttctttgtgccattttcccactttagaagctccaattttctgtttttcaggtgcgctgtttgtgattttgaatccgacgcctaatcttaagatgcttgggcttctacaggtgataagctttgttctctatagtaatggagcaacttcactatcttttaagcaagttctggttttgctattggttcttggtagattgatctcttgctgttactgaatacagggttttgccgctggacttatgttgagcatttcctttctagatttggcacacaatgcattgaattctattggtttcttgaagggcaacctttgggtcagtcatgctttgcctatacttatagtatccatgccaatgtaatgccgatctatctcatacaataagcagcaaccattgttaactaataataatattttgcagttttttgctggagttcttttctttggtttggttgtcaagtttattccagagccaactgttgtgccaacagctgatgcaggcaagaagcaggttgaaataagcagccttaataatgttttcacaatcatattagtctgttttcaaataccaaggctgaacagaatttagttctctatgtttggtttgaggaaagcagactgacgatgatggttcgggtaaagatatgatgaaaaaacatcgtcggcaagtattattcagtgggatcattactgctgttggtaagaaaataagacttctgtatcactaagcatacaaccagacatgcattcctattgaacttacaccaggccattattcgaactgtttcttgatatatgttgtgtggctttgcttccttgttccttgagatactacaacaatctgatttgatacttattatgagcctgcaggaatcagcttgcataactttccggaggggatggcagtatttttgggatccatgaaggtattgcttttgtatattcatcattccaatatagtggcatcattcatctgttgaagggatctgtaacttgcatttttttcatctaatagaagttacttgggaccaaccacctttcaaagcctttactagctctggtctataacactatataacatagttttggtgttccaatagttactgtatttgagtagttggcttggcctagttgctagttgtatttaatatcattctgtgtcccaatagatatcatgttggatatttgttagcttgccctgaatgtgttttgttatgatgaaaaactgcagggccttcgtgtgggactgaacttggctattgctattgctttacacaatataccagaggtagataaatcaacttatcagcatttctggtccatgagaattcttaactacagtttgatgttgcatattgctaattaggataccctagcttgttgtatgtgcttgcagaaagatttgaatgccatctaaagtttgcctcttagaaaatatctggtatttcatttatcagtttaatatgaatcgccaacgttatggcaaactaaatcatgacaaggaaaaaaaaatctcaagtttggttaattatatatgcccttaagctgcaacatttatgacattttctagatctcaacaagtcaatgtagctgtatctgaatcattgttgagtgtggcaggatagagtcttggacaacttcttttaacttctacagaacttggttcatttactgtagtatttatctgaagccctaattagttgttttttttttcaccttctcagggggttgctgtagctctaccactctattttgctaccaacaggtacctattttacccatgtagagaggaactgaattaagttatatggttcacagtagccttcagaaatgagttcattaaagaatatatgttatggctttgagattttctatagacaaaagagtgtactagttactggtaaaaaaagagtgtactagttactggtaaaaaaagagtgtactagttgaagtcatgaattgaggataggtgtgtaagatttgagaactagtcattggcgaaccactcttatctgctagtactacattccacctgttgcacttggaggattacagagcattaataatttctaatggttttgctttagcgaaaaggcaaatgatgcttaaccttttcaatttgcaataatagcatgtttctgatagttctcttgtaattttgtaacactttcttctaccacagtaattatatcttgttccttttttcacatgtcaaagcaaatggcaagcatttaaagttgcaaccctctctggtttcgctgagccactaggagtgatcattgttggtatgctatgtcatatgcacttctctgtaatatttttcttctggtgtatatccattgagtgctgaaggctgatgcaaatgtgattgcttcagcttacttgtttccgagcagcttaaatcctgaagttcttgaaggcctacttggttcaggtcagtctgttaataaaaagaaaaactggtatcagtattctgcattttgttgacctcccatgtgcctttctgcagttggtggggttatggccttcctcactttgcatgaaatgttacctctagcatttgactatgctggtcaaaaacaggctgtcaaagcagtctttgttggcatggccttcatgtctgcaaggtttgttgatgtttcaaataaagtactcctaatatgtttcagatcatccattgtgactaatgtggatttgcattcagtaaagattttcctttatattttttgatgcacttctaccctggaatataagtaacttaatgctcgcaagtgctgaattgctaaaacatcattgtcataaactcatcatcaaaattaaaatatatcaaatgaatagactgattaacttattgaccttgacactgaacagctagtcaatcttataccgcagcataccgtcacattgccttggagcggtacatatgctattcttacacaactaatctctggtttttgcattgtcagcttgtatttcttggagatcagcctgccaaaggaagtgagcttgtagcacatgactatccatacaagcttgtcacactatcctctgaactgaagcggagaacttaggagagatgttaactttctgagcactgccaggcagggatgtggggatatatggttcgccatttatcaaacggaaacaaggatttgtgacttagattcgcgcgttggccatgtgtatgctatcacagctggtcattgtatttgaccattttacagtgaagatgaacagtctgggatgggtggcaaaacaccacccagaatcagaatgtaacctccgcttgttggggaggaataggacacaacttgaactagcagactgatcagatcagtcctttaacttgaccagtgtacattggttgaaggcactgtgagaaaaataaaaataaaaatgcttcgttttcactgtcaagaactgtctttggtttgaacctttggccagacatgagtgaattatatagttccagaaaccttgatggtaatatatcataatcctgattgttttagttttaacttttgactagtctaaaatatgtactatcagaagtagctatattttgggatagagggagtagtttgaaagtattaaactaatataagtatttctccatgctgttacatttccatacttttctaaaaataaatttacaaaattcggcggcatcttattgattacgaagataataaatgtcatttttcactctagggccacacaaaaagatttcccttgatcagcagcaattttctcagacctgttgaaccgccgacacgaacaatcacacaactgcatcaacagcaaccacattactgtgcaacccatgtatcatgtcgtgtaagaatttaaaaccaactgtactaacttttttttttgttaaccagggttagattgcccagggataaccagatgcacaggttagagttaaatcctaggtttttttttttttgctttaactcaccactcgtcgaatgaccactttttatctatcatgatatatatcaaccacaacatcaatatccaacaattcacatgtttattagatgctcttttaacttgaaatcaaaaaaggaaaaaaacagagaagaatatatattaaagaaacacatctagattaacccataacaatgtagtataacataaagcaagctagcttaaagttccagcaaacttatatatgctatgcgaattaagattattggaaaataagaaaatttcaagcaactgagacctaacaaaactatatataacaataacatttctcgtctagttcttataagatgcatatgctctagtcaagaaaatatgttgctttggacaggcctaacgatttggagtatttttagtatatccgtaaaacccgacaaaaatttgatactgtgagaaaaatatgtatttgatatgtttgtttttcatacacccgatctaaatattaaaaaagatattgacattcaaaattttaaaagttctagtgtgccttacacatccaaaacggtaaaatcaatgttttgattgttattgtgatgaacaattgacatgagattttatttgtattggttttgatatatggtgatttattggcgaagtgattttgtctctgtatgggaccagacagtaggcaccggtcaaactgtaggcatggtggcggtcaaaccggccaaccagacggtttgattgactagctcctgtttggagttggtttggagttgattttttgattaacaatgattgcttcttgcttatggcttccagatgatttctatacgtatgttatatatactgttgtgtgataatattgagtcaagttggaaaagaactaatgcttgaatatggtttcttatttattcatatgtaagtgtgtcttgagatctcaggagagtattgccgatgatggatagggagtcaacttgagagaagttttgtctagatgatcaggagatcttgtggggtactaatcctagaggacaatgcatgtggtgatgaagattttgtatgtcatacaagaggtgttgtatgcatatggaaagcatagttaattttgaatggagtccaagtttgaaaagtttgaagtttaaatttgtaaaggatattgagttggatacttgtacaggtgagtttccgaatggattaggactacttactcatgttggatttgtggcttttgtgcagtcatctcaggatataaatagagaattgtcatgagaaaagttagggtttaacctagatttgagtttagtcgaaagttgagagaggagcgtttttgttgcactttataaacacaattagaagcaataaagttgatctacattcaaagaatttttctgatttatgttctctctattatgatggtcaggccagtagaggaacgacagtcagaccacgacggtgtgaccgaaggcatcttggtggttggaccaatggcatcaagtcaagaggaaacaacaataggagatcaggcagacgatagggaggcggttagactggtcaccggtggcataccgtcggtcaaaccaacagtatcaggtggtcagaacgacgctcaacgggcagtttgaccggagcaacttcttcgggttttaggatattttcttattaaaaaaatttggatttttatgttcctaccattgacgtccctcgctggtaagcttggttgttgtgttcgattaaaaaatgttttatggcctagtggattattttgttagacatgaatcgtgataacggtacattctacaagtccctttttcacatctcctcagtaattttctagaaattatgcaaaaccaagaaccagctagtgttgttattttatttaacaagtgtcttgcgagttattaagtactattgaatatatacaagccataacaaatggaacgaattgttacagagaagcaaattcgaggtaatggaattcattgattaattccggcgtttacttacaaccaatattccaaagtttgcacgactagctaccgatgtctaccataagctaaataaaatttcgcaatgctattatttcttgtggatctaaaacttcaaaaaaagcatctcaactttaattagctaagtttgaattatttcacaatatgcaataatcactatagtcatagcaatgtcaaacatagttcgaattaataaatctaacctcagttcaaaacccatgcatttaccataagcacactgtatatatatagtgtttaattaatataattaagatctcacacccaaactgcaaattgcatgcaatacacatcaaatcaaatcaaaccaaacaaaaaaacaattaagagagtcctccacatatatatatgatcgatcacaaacaaattaattttctactaaaaaaataacctgaaactaaccaataatcagctaattaatttcgcactcacatatatataaattaaggtcatcgcagcacaccggcggcggcggcggcggcgcggccgtcgtcttcggcgccggcgccggcgccggcgtgggcgtgggcggcgccgaaggcccgtgcgtggtcgttgagggagcgcttgtgtcggaagtgggcgccgcaggcgcagcgccagaggcggccgcagttcttctcgtgggtgcgccagtcgccgcggacggcgaagcgcttggcgcagcggcggcaggcgaagtcgcgggcgccgtggcggcggcggtagtgcgtctgcagggtgcggaagtccttgagcggccgcgcccgcgggtggtcgatgtggttgcggcaccccgccgcgcagcagtagcacggcagccggagcatcgccgtcggctgcgccccgcgcagcgccgccgtcccgcctcgccggtactgcgacccgtgcccccacatgtgcatctgcactcaccacgcaacgcaatttttcattcttaattttcagccagctgcccattgttcatcttctcttaattgcatgcatttgttttttttttctctataggttgcgtccatcaattgaatgatcaatagatacacgaaatcaacctttatttttcgattaattacatgcaagatacgcacaccaccacacacactatgtgagatattctctcgttgtttgtatatcacttaaatagttatataaaaattaacaagaattgagaatatatattaatgtgtgacatatcactctacaaaaatgtagcttaaaattcaatttctacatgtcatacaaaaaatcaaattaaattatagctagttaacatatattctcagttaatttttttttacacgtacaagttaaattttaagttacatatttatgaagtgatatatcacatgttaatatatcatcttatttttttataactatttaagtgcaacgaggggacgtctctcgagtttaaaattcactctccactatgacaagcattaattacacaaacacaccacgacgtaagcaagagcatgcacattcactaagacacattataatgactaatgataaacttcatcgattgttgggagtttcataagatagctgatcataactcataaatatgctcaattgctagaaatttattggtatatctttttatgaccatatagatcaaatggggatcggagtaggaatttaaaacacacttgtcatatactccattatttaagtatatatgtgttttttgcacgtataaatacctggaggttgttgtatctgttgaaggtcttgcggcagacggggcaggagaactgggtggcgccggcgaggatctgcgccgccgtcgggatccagtactgcccgccgccgccaccgccgccgctcctccgcacgctctccacctccacacccacgccggccatggcgccgccgccgccatcatctccagcaactcctgtactagaagcactagccccatggttcgccatcgccggcgacggcgacgccgacgccgacgagacggccggtaggcctatgcgcaaggcaaccgtgacctcctcctcctcttcctcctgctgtttgttgcagctgcagcaaccgtaccggagcagctgatgacgatcatggccgccatggccatcatcatcttgctgctgctgctgctgctgaccactgctgctgatgcaagaagaggtagatgaaatgaggctgaggaaagggaattccttcatgagctcgggttgatgatgatggccatggcctctcgagatcaggttggtttgggcgtagtcctccatggatggatggatggatggatcaatgcgagctaaggtagtagctagggtgcatgaagaattttgcagatgatgtgatgctgcaggggatatagctagctggggacgacgatgacgaaggggtattgtggatatcgtttgatttttataagatgtgggttggattaatttcacgtacggcctccagaaaatggagcttgacattatttgtaggacgaatcgaacgatgtcacttttaataatctaaatggtgagaatatatatactttcgttcgttctaaaatataaagacgcaactgataccaagaaataattattatcacctttttatttggatcaccctaataaataaattatgtacacacctaataaagttagagataagggtggaggatttaaacaaaccaatttaaacgagggaagctagttaactatatgtatatgcatatatgcacgtcttgtattataaaacatagaaaaaaaatagttgtgtcctaatattttgaaatggattatagagtaatatttttcagatgtatgtaaacagctagtacgactattatatatcttcttcatttccttgtacgtcctgcatgcatggttgcgtatatatgtagtgacgacaatatgtacggttagcataaagttaaaatataaagaattacatttaatgtaaagatagtagacatgattctttgaaggtattacatatgctaccatttatatatatatatatatatatatatatatatatatatatatatatatatatatatatatataatattacctgtacaattacaaccatatgtaacaggattttattaaaaaaatatcattaacccgtcagtaccattaatttgtataaatattatcttttagtttatatatatatatatatttgttacttaaatgtgatctctctgggcccactagcccccacaatcctttttccttcttaaagaaaaaaataaagagttggtgataaggttgattgacgtgtaagcccttatactagaccccacattattctttatccccaaaaatgtatcgagttggtagtacaaataatggtagattcaccatttaccaccaccactaattaaggagtatagataaagaaaatagcacataacccctccgtgtttctatgacaccgattacaatccacaggaaactaagcattttaagcgacaatcatatgcttacgatggaattatcatagccattcaatatttggcaaatgaagtgattgagatgaaatatttttttccttatccttaatctttgttaaagaacatactcccttcttccatttatatgaaactttggttagtttaaatttttactaaccaatgtcatatataaatggaatgagggagtataaagaaatgctttatttaagaatggatggagtaattttttagggtaattaatacttttagaattaatttcttactatccaaaagttaagaatgaatatatagaaaacctaaattaagttcaacaattcaaaattggtataagccacagttcaaacttcagctaattaatcaatcatcacctacatatatacatgtgagaaaattcattttttatatatcttgaacagctcacatgcacatatctactttctctgacaaataattatctgccagaagtacagttttgtaaatcctaagctgtatatattcaccagtcaaaccatacaagccacacaacaaaatggacctgcagccagggcccactgtttttgcatagctagcagtatagctcaatgttcaactggacacggcttgattgattaattgaaaatgaaatgccaaatagtagcagcattcattgtcctgtgctgctttctccccagcttaattaattccccaattaattactgtaggggtcgtcgcaagctttgcaacccccaactgacagcacttagggttcaaggtatggatggaatagatcaatagtgagagccataaatttagatacagtaacagcacgtactaggtagcagagggacagatcgatgatcatcgatcctagtcaccgatcatgaatgtttcaagatgatcgagatcgtggtcaccaattgagagatgcatggttacatcttttagcttttgttttgaattgaatcaaggaaattaatatgtaggaattgcgaataaaaccttaacaacttctcaattacatgaaagtcccacacaccaatgtatatatatatattcgtcaggtttcctccttcgacacatgttcaaatgaactgtgaaaaatcttactccaatgccaaataatacacatgtggtacataaagtactcatatctctacgcgtctaccgcagcatcatcaggcatgattcactaaacctcaaattttggcacatgcaaaatacaaacctgtcttacaattaattattggttcgaccaaatccactcaattattggttcgaaaacgagattttagcaaaatataaaggttggaatgcatgaagtcttctaaaatctaaattattgtatgttggaattgaaccatttcacttcaaaattaaaaactactataagacctctttggaatttttcttttgcatgtattaaactagttctatgaaaatcttaaaaatttctacgttctaagccctaaatactaattaaataggaacttgattttttaaaaaataaactgaggcaacaacctcagggtagtttattaaaacacaattgggagtacacaaggcccctcatagaacattttgaaacatgtaaaaaaagtcctctaaagaaaagtaaaatgtgatcaggtccttcaactccttccaccgagctgatgttccattgttccatccagtgtctacggtgatggtgatgaaaccatggcagactgcaaagggcatagtcaagaagcaaacccaatcaaggcctccatgatggaggttgaagctttcatggccaaacaagaaaaccacaatcatcgctttgagatccaccaccaaagtccacagggaagagcgccaacccttgcaggtctgctcattggaaaattgaagaatggccggcgtaaccttttattgcttgtggatttgaaggactacatgttacagatgttgataaccaaagcatcggttctaagcctgacggttgctagctagacggcatcttccgagaccaagtctagcagatccatccatggcatgacaccgccaggacaaaggagacagaagtcgacatctcctttaatctttacaagaaaggtgggggagggggacaaaggatctgtaacataatttacccgactatgggacgagcttgagcactcccccggaccccccctccccccaatcctttcaccggcaaccaccggggacgaagaggagagggattccaacgagacaaagacaccgtcacctgtgggtccttctctaattgtgagagaacgtgtgttgggggaatgaagtccgtcttaaattaaacaagagttaggtaagggtaattcaaaaatcttccaactatgcctaatgttaatcttactttcgagttttgagggattttggatcgaatgaagggacatgacactttgaaaatttgcacaactatgctttagcaaaaaagcattttaaaaataccgataaataacttttatcaggtgtttggttcataccaaacctttggcaatcaggtttgcttaacatgtggccaggggtggatccactccaccacccgatgaccgggctggtcgggtggccgcacaatgaaatttaaatgttttaattttcaatttatagaagcaaaattttcattgcaaacacttgatacaatattttttccccatgctctaaaacttttttgatctaccactatatatgtggctaagagtttttttcagccaaacaaattatgacataccacaccgcaccttagctctaaaagttggtaaactaaagcatatatacaaccaaacagccccaagtgtttctagctcccgccactggaaaggcgctgtgactgaactgtgcatgcttgaccgatccgagagaaaacgtacgatggcaacacaagcgaattcacgatgatgataatgcagggaccagcagtacatgagccgctagcagctagctaagcactgtctccatcgcatcctccccctcgctaagtcctcaacgaatcacacacatttcgatcgaccacatgcacgcatgcacaagaattctagcatacagtactactacaatgtgtgtgcatgcattgtattccctccctcccataatacaagggattttgaagaatacaacacattcagtacttgtagtactttgaatctgaacacatgatcatagtactatgatatattacatactttgaatctgaacacatgatcatagtactatgatatattacatatatttaaaatctcttatattttactctctccgtccaaaaaaactcaacttctggagtttgaattttgtccaaaaaaaaaccaacttctaccattctacctactcccagcaagtaaaatgagaagttttattccttcaacattctttacctacatatcatcattactattttttttaataataagaggtattttggtcattttcactctccactaatgttacattgggatgctaggatttgattttataagggacagagggagtaagagtaaaaaagaggagggtttgattttatatggacagagggagtaagagtaagaaggaggagtagaccacaaatggtactacactgttatatcacatgatgcatgaacacacacgccacagctagcgtagtacacaaagatacccaggattgatagcgagagcttcgatctggatgagaggctgctttcccgtttccttttctaggaggctacgctgagctagataagctgcaatgctgcatcatatcacgctcacaccaagtactacaagatacccacacacaccggtggtggtggtacactactactggcttctagcttttgccttttgatatgccaatctatggaagatcatggttcgtgcactggtgatgtggagagggtgatgctttctgtccctgatggacagataagtgcaacagtggcttggaaaagctggtgttgtgatcatcttgattttgaattaatcatggaaaagttggtgttgtgaccttgttttgcattaatcatgtagtagtacaactttggcatcttgctattttttttctttcaattcgattttcttggatgccatctagctacctagctaggcaggcaaaatgaagtgtaattattgacattataaagtgttctgtaagaatgtggcttgggtttttcagtaatcatgaggcactcctagctagttagttcccatatttggtgcaataatccaattcttttagttggaaacatagcattacggtgtactaagatttgatttccctagttcctacgaattaacgaaggatactggagtgacctctgaaaaccgctgcaagaaggcaagagagaataccatgaatagacagcagctgagcagcagaagcatccatccatgttgtccccagatgcatccaggggagattaatctgcaggaaacctcatgatcacaaacgcgaaaatcgccgattgatcggtccactgaaaaactggagatgataagctcaggttggtctcctcccataatagactgattacacactgtcaatcgttggctgcatctggcttgtcagcttatatctgcaggccatatcatgcatgcatgaatcccagaaagattggtctcctgggtatttgattatcagcatgggacagcctgctgatggttgcctgtgcaatgatgactaacctgcagcatgcaggcaatgcattgcaagatgacttgtttgattaaaaaccaaactctatggcaggaaggtaggggtaaactgggaccaaatgaacaaattcagtagcaaactaatttaatcaggtgagtcatctgatctactagtgtgcagaaggacagctgggcgcctgggctactgcaagttctagagatggaaaaaataatgccgacagaatggtgtgcaggtgtaggtcttgaagaattgtcaatccattatatgctggacatatgcatgattacatgtatcgagatgctaatacactggtagcattttgcagtagcacatggatggcatgaagcagagtagcaataaccaagtcctgaacccaaaacagcacagatgtttctttgaaggcaaacaatcttttgaacttttatcaacattgtaagttgtagctgtaagaagaatgaaaattaccaaagacagcaagagagaaaattattttcttgaaattttcagctcgggaaattgtattgagtatatcttaagataaaaggataacttgtagctggaaaatgacaggatgagacactgattgtgcgtacctgctagcatgtccccattgcatggatggaagattccgtgagtgctcttcagtccagctttttattggtttgggaagctttcattcatcttgagatctgaggaaatccgatgcatgctgcaacttctcatgacacataatacaggcccatgcgtgcggacgtggctttggtcctggacagactcaaagtggcagcttttgtttggagcgaacttgcaatgtcatcagacagattatgatagcttttgtttaagctgaatagcagaggctcagatttctccagctaacattacaatacaaatggtgacattgatacaaatccaaaattttgtcctacgacaacgacaaaacttgtttaaattatcccagggaacttcacccaaccataagtcatgagtaattacctggtgggatcattttctcctcagtttcaagaacatctacatgagaagagggaggattgaaaaaaatgtacaaatatgttacaataagggaattgggacagacaaaatttgctttgcaaaaggctttcacatattgataccgcaaagaaatggaagtaatggtactatctcctaacagcagctaatcaaatgaaggatcacgccgacaaacacaatgatactctggttaatttctgtagccaaccccaaaatgaaatcgccttgcttgtttatcattgaaagcatactcaagacgcaaaggtcccagtggggagtccacacggacgccaacaccgtaaccgtaaccacttcctggcttcccacgagctccggctgggtcacctaaacaaccaataaccaaaggtggcctaaatgagatttgggtttagcataaaagagatgctatcactgtaaatatggaaccatgtcaaaattgtttcagggcactaaacctcattaataaatgcaaaagacattaactttcccaattataaggattgtttttattttcacacctatacaaggcttaacaaagtagagaacatctactgactactagtcgacaggactgtgctgctttaggaccaacaggtacacaagtggaccacaaaacttccgaacatgtaaaatgcgagcagaacatggcttaccaggaactttgggaccagaactaagatcactaccatagtcaccaaacaccacaccttccaatggcccaaactacacacagaaaaagcactgtaagtaatcaagatgatgaatagaagtttgaccatcatgcatcaggtcataatatgcacttgtcatcatgacagaacaattttcgtatagaaattaatatactcttcaccatacccgtctaaagcaaaggaaaaaaatattattagagtgatacaactcatgaaatatttggtatagatacaactatttgccattctgtgcatcacatagtgtcctcaccaagttaactatattcttaaatacatccagtccaacaaatataacttcatcttaagttgcaaaataattttaatctcaaatactactatttttagttttcttttatgtatgcatatccatgttatcaactaggtatttatgggggaaaacaagtagttgtgtatgtaagtatatattttactgtactgatgattcaggttaagccccttctactaaagacagaacattccataaaaagtgacaaagcctaccatgcggcaagagacttctccactaccaacagcatatgagcggccagaaccaacagcaccttcttcatatcctcttacactatttgtcccaccaattgcaaatgcttcatgaggcgaaaagtttccctctacatgacctccagaagcactacagcacatagaaagagtgatttatggaatgagtaatacaacctgggcaatttgctactggaaacctttagggcaaactcatatttatgttccaagatccatacatggcatatgatatgcactaaaacataccttagaagaagtcgagcagggccaatttcatagccctgcctcaaacgcgctgtcactctgttaaaactgagccactcaggaagaataggaagaccttgctcaatgttgaaaacgaactggaagcagtaagaacagtaggtgataagagattttgacaacaaaaattagaaaataagcagtggagtaggaaaaatgctaaccattgttgagctacgatctccagagtctgtgtagacactttcaagcttagctagtagtgtatcatcataagcatttccgctgcattgtcatgacaagaacatcagattccatatgttaacatgatttgacaattgaattcatggtagattgaacataaaattatttatggcgcaaagttaaggtaaatgaagcatcgagatccaagacctggcagttaattggctgttatagaaatctctgatgataggattgcctttgtcatcacgagcaccagcatgctgcatagagtgtcagtaatcagtagaatgaaggtccccaaagggacagatttatagcaggaaccaaatcaacaaacttagtcacttgcttcttacacggttacaccattactggcggtacaaactgtgctcatgtactacatctcttcttttttgcttgatgctttggatatggacatgtaccattattacttcttctaattatgtatttacaaacaatattaaaaacataactgcatgaaaggaattttcatgataaatctattggtgctatttttataattaataaatcataatattttagcatatattaatgatttaagatattgaggtttgacgacgtcatctatatttaagaacgggggtagagtatccttttttatcctttaacctaaggtagtattaatgtcacaagattgtctagtctgggtcttctctcatggccaataagtacggagaaagggctacttgattactatggcaaatctattctatgtgaaaagtaaaactcaaaaagcaaccagaattagccacatcatctgtcaaaaaatggccgttggattcacaaaatgacaaaatagcaaggaaaaatcctagccattgaaacgaggaatcttctagaagtggtaaaatacacagagaaggaagagtttgagccactcattgcctctcattgtaatctcatgttggcctcccaaacaggtctagggctggcttggcttggcaaatcaacccaaacggtccttagactagatgaccaattaaataattttagaagagggaaaaaatattctacatataacactgtaaatcagtcagcagcaatcaaaacaatatatagaaaagaaattaacatctaattattgatttaactgaatggtggaaaaattattgttaattacaataacggttaatagataggaaggttatagtcgcgcgaacatgcgacttcattcactagttgtacctgaaatattaatccaagtgtgccactccatttaggtctgaatggtcgactgtattcaatgccagcagtaactcgtccaattgtaatgggcccatggtcaggatggtccccaccatggataagtgttccgggagtcctagagttctggcaaagaaaataattataagaacataacgatgattgtcagccataagtaactatggagcgttgaagacggaattgtcttaatcataattacctgaaccatgatagttctggaggtcctcttattgtcaccatcaatccaaggatcagtatagtttaatcgaaatatagaatctatttgccccctctccagtgagagattcagcttcttgttcctcccaaaaacatttcgatgagaatatgcaaaactgtttattccagtgcgagacaagaattagatgtgcaactccagtttgaggacaacttctgtaaggatattaactgatacatttgaagcaatatctaattcttcacagctgataatccaggatgcttcctagaagtttaagaagtctggtttctaacaaacaacaatcccaacattgttgcatagaaaaaacagctatattctggtcttccagcagaaacaagatcatattggcatgtggtaagaacagtacgataaacaaaatcagaatagccgaaggcataaaaataaaaagagtggaagaatctaccaacctgccaataagcccagaaagtggtccatttgttatcctgcagaaaacacagcatgccatcatgataaaatagatgttaaaacaacatttggatgcaaatttgcatatattttgcatatggtctttgaggtacagtaagtttaacattatcagaaccttatggataaggaaattatttttatgaaagcaaagatttgatatttcattcaattaagttcgctcagcaagccttgtactcacccacttgaaatgccaccaccagcagaaaaaccacccgaaggtcgttcaacaagattcatgacaagatcaactttattagaatctgcagaagatcataagtaagaaaacatgtgctaataagtgcaaataccagctttccgaaacagactgaactaacaaattaacattacctccaactggctgtggaattatagtaacatcctccatgattcccatagtaaggattgtttcaacatcccttttcacttgtgctctattgtaagcctattttcatcatcacaagtttagacagataatacagtatcactcttatcagagaattagtctgtattttcattagcaaaatacttctgcttcagattgcatgactacccctttctttctttctttccttttttttgcagaatacagaatttgtgcaaaattatatgtataggcaaatattatacataaatgttcaaagaatttaatgagtacactctaacatcggtataaaaattaagttttgtaattatggcatttgcattgcaatttcagaagcacaccaaagcaatgcttcaatgcctagtgcacagttcagtatgaaatggaaatggttcttgaagtcatatctcatgaaaactcgtatgttctagatataactgatatgaatatttgtgaatatcatcaacagtgacatagtgcttttaaagtaggtatgaaatggaactagttcttaaaatcatatcacaagaaaacttctacattgagaacacaactgatgtgaaatttgtaaatatcattgtagtggaatagtgttcctaaagtaggtaaacacaaatggagaaaagtgatttcaatgatctgacctgacccttcttggtggtaaggtgacggagtattgtctctggttgcgtcttcccaacagttggttcaccactggtgatggagagaaatagaaagaggtggaagataagaaagatcagaatatcgcatagaaataaaacagtaacaagtgaagcgaatctcaataaatcaggctatggttctcacgttcttctatccagaaagcgaatattgatattattaacctcagcttcagaaacttgtagcctcagaattcctccagaaagaatctcagcatatgaaacctgataccaaatcaaggggctttattgatttatcagtagtaaacaaaataccttgtttttcttgttaaaactgtaaaagtctgatgtgttttgccctacaataatgaatgccagagctcaacttatcgataggttgctaacttcagcattaaccacacatcatatttctaatcctgttaggactaagaatttaacaaataacagaggattaccatggtgtatgcccacctatttgacatcagcaatatatatgcaaatagtgcaggttagacaatctggatagcaacaaatcgactgctgttgttgtatgcatctaaaagtttgtagttacaaagaatgtactgtaaatcaaatgggcaccagaagcctgattacagcaatgctcaaaccttttaaacaaaatgtgatatagaaccaaatagcatacaaaagtagaagatgagttttatattcactgatttgccacttaccaagccagttagaccacgttcctgataccatccattaacagacttgatcacttgatccaaatgtcttatattgattattttccctgcatagtgtaatatgaaaactcaagtaggtctcaaaagaaaatgcgacaagctagaaaaggtacattaggattacaaagaggaaatgaattgcgcattctttctccatagagaaatggtacaactatgagatttcgtaggatgtagaaaagcatttttgtctatagggtcaaaatgaaccaacaataagagctgcaaagcagcacattttaatccagtggagttctggaattcaatacccaaattcattctagacaaatgcatacgctatgtcaaagatataggatactgaccaccgctatactttgatggctctttacccagattttacaataggagaacaacgatttgcattgctttaagcttttgatatgatgtatgagtaaatgaaacaaatgtagctttttaccctgacaggcacatatcctcaattatgataatctataccacatttcacttcatccaccacagcaggctaccgagaatgaaggtggacaagttcttaccatggcgatcatgaaatgcgtcctctaggaacttagatggcagcatgttggcaccctcacagaccaacccatggaagtcctggttcggctccacctaaaccaagcccaaaatgtgcaataatcagttccaaggttagctgacgaagagaaaatggggaacgagcaaataataataataataataataataatcctgacctcaaagacgagacgaatgccgtcacgggtgtcgacggcgacgggcatgcaggagcggaagaggccgctctcgacgacgcggtgcacgtcctcctgcacctcccgcaccgtgagcgccgcgttggggcggcacgcccggagcgccgccgccgcggccgcctccagctcgggccgctccaggggctccccgtccttccccctcaccgccacctcgctgatcagcacccgctcctctccccctccaccccctccgccgtccttctgcctccgcggcagcgcgatgggcgccgccgccgcccccgcccccgtctcggccctcgccacgggtagcctgggcagcgacctggccacgtggcgcaccacgccatcgatggcgcggccgatgcgcgcgaacgggagcgccgcggagagcagcgtcggcgctggcgctggcgccggagccgcgtcggcgcaggggagcttcacaccggaggagacgaagcgcacgtctcggcgcgtccccatggcgtcggcggcggcgctgaaatcgagctagggtttagggtttccgcggcgacgaggagagggtttcccccgccatgggctatgctggaggaggaggaggcggcggcggaagagggagaagggaatggtggtgacgtcatccgcgttggcctctcgtcctcctctcggatgatgagggccgtcggatcgtctcgaatttcgttctgatggcggatacgtggatctgatccgttggatggtttcggggattacatccaacggcgagtattagaggtagagatgagaagtaccctctcacgctgtcacgccatgatccacgtggggaataaggtcattgtttagttcgtgaaaagaaaatttctgcgtgtcacatcagatgtttgagaagatatcgaaaagggtttttagacacgaatgaaaattttaattttataactcgcctggaaaccgcgagacgaatcttttgtgcctaattaatccgtcattagcagagtgggttactgtagcacttatgactaattaggtacaaaagactcgtctcgtgattttctccccaactgtgcaactagtttttttaatctatatttaatgctccatacatgtgtttaaagattcgatgtgatgtctttagaaaaaaaatttggggaaactaaaccaggcgttaatttgacactaaatcttattttcgtccttaaaccgaaaaaccaaatacaataggttcccaacttacaaaagcagtacaaacaaggtccctcggtagtattgtccccggtttttggctaacgtagcacatacgtggctaatttgactagtcttcgtcccacgtgggattgacgtggcgcttatgtggcaatttgatttggaaaataataaaattcgtgagcccacatatcagctacacaaaaaaaataaataaataatggtgagacctaggtgaatctcacatgtcattctcactcccctcctcttctctctcatctgtccccatcttctcttcatctctcttgaagacctaggtgtcgcacgactggaggacaagcgcggcggcggcaacggtggtcgtggaatcatcgggcagggacacagacgagggcctggcgatgtccgcgtcgaagagcgccagggtccaacgtgggtcacactctgcgcggaccaggcggtggaggtggtcggtggtgagggtcttgggccatcttgtcgacgagaggatggtcgatgacattgggtggcggcggcagaatgggcaagcctgcgagtacaagacatagtctgaactctgaagaccgagtctatgccacgtcatgtgcatgtaccgagtcaaattagtcacgtagacaccacgtaagctaaaaccaccatccaaaccatcgtgggatctatattgcaccggttttaacagttgagggatttgttgtatctggtattgcggttaaagggtgacaatcgaattcgctgtcaagttaagggatctaaagtgaacttattcctccacatcgccgtacgcttccgaaattgcaattttgcaaggtttcggcccaaaaaggaatgaaattctcaaatctcaactgaagcccaatacagatagaagttacggagaattttaggcccaaataatgggatgaagcccatattgtactatcgggattccttcagaatttgggtaccgctctaacttttttggttttgtttttcaggacatggaaaaaaaatcaactgcatttgatttttttaaaaaaattactgcgtttgaattttgaacccatagtggccagcatgatattagaacttgcacggtaccgtttttctttttcttcataaattaaccctttgtccatatcattccattgtccctttctgtctttcatgatgcatgctagcttttggggaaaaatattgaccgtcatagagtactgttttctttttcttcacaaattgcaaagattatacttttctgaaaggaatgcaaagattatacttgctctcaatcttcggtattggtatatagtattttcccaatgtagacattcgcacaaattacaagttaaaacatgtcaaattcaccgtggttgttacggcacgaacgacaaagagccacggcgaattcaaagcttgtgtttggactggtatgtgttgatttgacaaaaagtttttgaacgaatcgtgttggtttgacaataggaaaaatgactgcatgacatatcgacaacgatttgaagcatatttgcgtcaaaagctaggaaaaagtaggaaattcgtttgtgcaaccacagtatcatattctcatgtgaatggttttcctagaacccttcatttttgacacaaatcctcgtaaaattacacggtttgaaatgcctcgaacatggtacatgggaattggttttcctttcacaaaataagagaactttcagatgggatcagtcagggcatccacaatgtgagacactcctagagtgtcctcactaactgaggacactcgtagagaaacttggttcgcaatggagggtgcccctggatgaactccttaaaatctgaagcaacccggtgagggtactacatcccacagtgggtgtcctggcccaaggtagcccagtacaaaaatttcacccatacccctcatcagcccactagcccagcaacctcttcctctcctctttctagcattttctcgtctcctccgcccaccgtctcctcctcttccgatctctccctctctctctcttggtcgaacgaggcgcgaacggcggtggcgaacggcgagcgccgcgcgaggtggaagacggcgacgggcgtgtgcggtggccgacggcgatgggcgtgcggggtgtgaagcatctagacccccggtgttaattttggtaattaatgacaagcgctaattgtggactaaccgttgtctttgagctatacattttaagttaggtccacgtcatatgtgcgcatggatgattatcaatggattaacattgacggcgcaaagcaaagagaaagaagacggtaaaactagtgctttaatttagaattgatcgaggtgtagggcgatcaaaattgctagtttattttctagtttcgccgtactattaagaggggtaatgacctagcaaagagatgattgaattaccacattaggtcattgcattttcatttgtgctctatttttcatcacacgcacattcacttgcaaattcactgggttcggcctgaccagggggcggtcagaccggccacatagtggcggtctgaccggcgtgccctggccggtctgactggccccaagcaggcggtctgaccggcggcacttgtccggtcagaccggccctctggatgccgagatgatgctgctcgggatggccgatacagagccgatggagccgtagtcggtcagaccgagccgatggcggtctgactgagccgaggccggtctgaccgcccactcaactctggtctgaccggccaggccgatggggccctctgacagcacttcaacggctagttttctagccgttgcagagtagcacggtctgaccggccacatacctccggtcagaccagcaaagcacaaagttgggagatttcgcccccaacggctagttttggtgggtgggagtataaatactcccccaccagcagcaaggggactctcttggcacccaattcaattgcatacatcccttgcacctctctcacacccacttgagctttgtgttcatccatctagtgtgttagagggttgattagccaagagtcaagtgcattgcttccatttgtagagctagtgtggcacttgattgatcatctccacgccgggtcattgcttgttactcttggaggttgccgcctcctatacggcttgtggaggagttgccctgtgacctttccgagaagattgtagaggaagcccggcgccggtttgtgagtggtttggaattcaccaccttcggagtgaaggaagaactaccctagtgatcgaggcttgggtagtcctctccgtgggccagctcccgccttgcccaccccttgatgaagggggtgtgcggtggcttcgtggttgagcggtggagttgagctcgcctcaacggggagtaggaaaccggcgagtttccgaacctcggtgaaaaatctcgtctccttgtctcatttgatcgtcgcatttacatttgtgcaaatttacttttctagaaacaaactagatatcatatcaccctaggattgctaaacattgacataggagtgtgatttactttcttagagatatagttgagccacaatcaccctaggtttgcaaaacataacttagttgcttagttagagttgaccctcaccaagcctagcgacttaggttagttttgattaggtgtcatttagttttaaatcgcctattcaccacactctagtcgacatctcgatcctacaagttgtatcagagcttggtctctcttgattgggcttcaccgcctagagagaagatgtcgaacgaggtgaaccatgtagggaaggctcccatgtttaatggcacaaactattccacttggaaaattaaaatgtctactcacctcaaagctatgagcttccatatttggagtattgttgatgtaggttttgctatcaccggcaagcccttgacggagattgatcaccgcaacctccaactcaatgcccaagccatgaatgctttgttcaactctttgagccaagaggagtttgatagagtgagcaaccttgagaccgcatatgagatttggaacaagttggcggagatccatgagggcacgagtgagtataaggatgccaagcttcatttcctcaagatccaatatgagacattctccatgttgcctcatgagagtgtgaatgacatgtatggaaggctcaatgtcattgtgaatgatctcaaggggcttgggacaaactacaccgatcttgaggttgcccaaaagatgcttagggctctaccggagaagtatgagacccttgtcaccatgctcatcaactccgacatgtcaatgatgacacccgcaagcctcttggggaagatcaacaccaatgacatgtacaagttgaagaagaaggagatggaggaagcctcaccttccaagaagtgcattgctctccaagccgaagttgaagataagggcaagggcaaggtgaatgaagccaatgaggacttggaggaagagattgcccttcttgctagaaggttcaatgatctcttgggaaggagaaaggagagaggaaggggctccaactccaataggagaagaaatagaagacccaacaagactctctccaacttgaggtgctttgagtgtggtgagaagggacactttgcttccaagtgcccttccaaggatgatgatggagacaagtcatgcaagaagaagagtggaggctacaagctcatgaagaagctcaagaaggaaggcaagaagattgaggccttcatcggggaatgggactcaaatgaggagagctccgcctcatccgggtccgaggaagaaggtggtgatgatgcaagctccaaaaagaagaagatggccgttgttgccatcaaggaggctctatcactcttcgctccactttgtctcatggcaaagggctcctctaaggtaacatctcttagtgataatgagagtgatgatgattgtgatgatgtttcctatgatgagcttgtgagtatgtttgaggagctccatgcttatagtgagaaggagattgtcaagttcaaggccctaaagaaggatcatgcttctttggaggtcttgtatgaggagctaaagacttctcatgagagactcaccatttctcatgagaagcttaaggaagctcatgacaacctcctttccactactcaacatggagctctcattgatgttggcatatcttgtgatttgcttgatgatagtgctacttgccatattgctcatgttgcatcatctagcatttctatctcttgtgatgatcttgtggatatgtctagctctagctcttgtatttctatctgtgatgcctcacttgttgttgagaacaatgagcttaaggagcaagtggctaagctcaacaagagcttggagaggtgcttcaagggtaagaacactcttgacaagattttgagtgagcaacggtgcatccttaacaaggagggacttggattcattccaaagaagggtaagaaaccttctaaccgtgccactcgttttgtcaagagcaatggtaagtattgctccaagtgtcgtgaggttgggcatttggtgaatgattgccccggtggtaagcctcctaagacatgcatgtttgattctcattatatgattaggaaggctcatgatggtagcattgttgctagatatgtgggttcccctatactcggtggtaaaaagaatgccatttgggtgcccaaagctttggtctctaaccttcaaggacccaaacaagtttgggtacctaaaagagcttgatcttcttttgtaggtgaactaccacaccggtgggagccattgggtgcttgatagtggatgcactcaacacatgactggtgatagggctatgttcaccacatttgaagtaggagggaatgaacaagagaaagtgacatttggagacaatagcaaaggaaaggtaattaggttaggtaaaattgctatctccaatgatttgtcaattgacaatgtctctctttgtaaatctctaaattttaatttgctttcggttgctcaaatttgtgatcttggcttgtcatgtgctttcttcccgcaagaagttattgtttctagccttcttgacaagtcttgtgtgttcaaaggttttagatatggaaatctttatttggttgatttcaattctagtgaagcaaatttgaaaacttgtttagttgcaaaaacttctttgggttgcctttggcatagaaggctagcccatgttggcatgaatcaattgagcaaactttcaaaacgtgatctagttgtgggcttgaaagatgtgaagtttgagaaagataagctttgtagtgcttgtcaagtcggcaagcaagttgctactaagagtatcatgtccacatctagaccattggagctcgtgcatatggatttgtttggcccaacaacctataagagcattggtggtaataatcattgtcttgtgattgttgatgattattctcgctatacttgggtgttctttttgtatgataagtctattgttgccgagcttttcaaaaagtttgcaaaaagggcccaaaatgaatttagttgcactcttgtgaaaattagaagtgacaatggttccgagtttaagaataccaatatcgaggactattgtgatgatcttggcattaaacacgaactttccgctacctactcacctcaacaaaatggtgtagtggagaggaaaaatcgtacattgattgagatggcaaggactatgcttgatgaatatggtgtttccgattcttttggggcggaagccataaacaccgcttgccatgcaaccaataggctttatttgcatattctcttgaaaaagactttctatgagctaattgttggaaggaagccaaatgttgcctattttcaagtttttggttgcaagtgttatatttaccgaaagggtgttagactaaccaaatttgaaagtcggtgtgatgaagggtttcttctaggttatgcctcaaatagcaaggcataccgggtctacaacaagaacaaaggtattgtggaagaaaccgccgatgttcaatttgatgagactaatggctcccaagaggggcacgagaatttggatgatgtaggtgatgaaggcttgatgagaaccatgaagaatatgtcaattggagatgtcaagcctattgaagtggaagacaagccatccacctccactcaagatgagccatctacttccgctatgccaagtcaagctcaagttgaagtggaggaggagaaggtacaagatccacctatgccaccaaggatacacaccgctctttccaaggatcacccaattgaccaagtgttgggtgacattagtaagggtgttcaaactcgatctcgtgtcgcttcgatttgtgaacattactcgtttgtttcttgtcttgagccaaaacatgtagatgaagctctttgtgatccggattggatgaatgctatgcatgaagagctcaacaactttgcaagaaacaaggtgtggactttggttgaaagacctagagaccacaatgtcatagggacaaagtgggtatttaggaacaaacaagatgagaacgggttggtggtgagaaacaaggcaaggttggtggcacaaggtttcacaaaagttgaaggtttggactttggtgaaacttttgcccccgtggcaagacttgaggctattcgcatccttcttgcatttgcatcatgctttgatataaaactatttcaaatggatgtgaaaagtgcttttctaaatggtgaaattgctgaacttgtctttgttgaacaacctcccggttttgaagattctaaatatcctaaccatgtttacaaactctcaaaagctctttatggtttaaaacaagctcctagggcttggtatgaaagattgagatattttcttttgtcaaaggatttcaaaattggaaaagttgacaccaccctttttacaaaaatcattgatgatgatttctttgtgtgccaaatttatgttgatgacatcatattcggttctactaatgaggtattttgcaagaaatttggtgatatgatgtcgagggaatttgagatgtccatgattggagagttgagcttcttccttggacttcaaatcaagcaactcaaggatgggacgttcgtgagccaaaccaagtacatcaaggatctactcaagaggtttggcttggaggatgcgaagcccatcaagacacctatggcaaccaacgggcatctcgaccttgatgagggaggtaaaccggtagatttaaagctttatcgttctatgattggtagcttgctttaccttaccgcatctaggccggatatcatgtttagtgtttgcacgtgtgcacggtttcaagccgctcctaaggagtgtcacttagtggccgtgaaaaggattctaagatatttaaagtattcctctactattggcttgtggtacccaaaaggtgctaaatttaagcttgctggctattccgattcggattatgccggttgcaaagtggatagaaagagcacatccggtagttgccaaatgcttggtagatcccttgtgtcatggtcatccaagaaacaaaactccgtagccctctccaccgccgaggcggaatatgtttcggcaggtagttgttgtgcccaattgctttggatgaaacaaaccttgttggactatggcatatctttcaccaaaacctcactcctatgtgacaatgatagtgccataaagatagccaataacccagtctaacattctagaaccaagcatattgacatacgccatcacttcttaagagatcatgttgccaagtgtgacatagtcattagccacataagaaccgaggatcaactagccgacatttttaccaagcctcttgatgaaacccgcttttgcaagttgaggaatgagttaaatgtcatagacttctctaatatggcttgagatggtgcaccatggttgcttcttttgcatattgtatatttgctcctatttgttcttatgctttggatttattgtcatttggttcttcattgcgaaaatggagcatgtcacattaaggaggagtcttgcactcttgcatgtgttccacttccttttatatgtgagcaaatcaactaaaagtgctagtagtgttttcaaaatgaccaagtcaacataagtcaaaacttctgcaaaatcgatgcattttgaaaactatctcttggaaaatgttttaaaaggttccctatatgttttccaagcctcacattgcaagaaaaatgatttttgaatgaaaatgccattttggccctcttttgaagaaactagattcttagttttggataaaatgagatttatccccaaaatgagattgagaaggaatttgaggaaagtttcaaaacaaagttggtagaggagaagttttgaaatgtttttggtgttcaaacctatttcaaaaaccaaatcattcaaaagttatttgaaaatcaaattcgcccaaaaacccctatagaccataaaaggtcacctcctagcgctcaagtgagttttgttgcaaatcttcataattttcaaatgttatgaatggttggcaatattttaactcacacatttcaaaattgctccaaaaatcaatttttttattgaattttattgtgtgggggtagccgaactgtgcaagggctatgcacagtcggctgggggccaggcggtctgaccggtgctatatgcacggtctgatcggcctgatggcggcggtctgaccggccacttgggcccggtctgaccggccgcacccttgaggtctgaccggccgataatagccggtctgaccggccagggatagtgggcccaggaatctttctttttcttctctcttcttcccctacctgactccatctcctcccattcagctttcttcttccccaactcgaaaaaacacctcctctctcttttcccaaaccctagtcacctccctctaccaaattccctcggtctgaccgtggatttctctccggttacaccgtaagtgattctcctccgcttcctctctctattccatggattggtttgtgtttttgttgaagtttttgatccatggcatggaaccctaggtgaagcacgaggtgttcttcgatttgcaccaatagtgggtagtttcttggtgtgattcaactccttcaaccggtaaatcactctccctcttgcgcattatctcaaatcggtctatttcaatctctagggttttgggtagtttcccccattattccaatcttgatgaaataggccataccctttgatgttcaagttccaaacttgtgcaatattgttctagcaatattttagactcatttgtgtgattgttggaaggatttggttgtgctcctgtcagtggcggtctgatcggcaggcggtctgaccggcaccaaagcggcggtctgaccggcctagggcaggcggtctgaccggctaggggccgtcggtttgactgacttgacgccggcggtctgacagtccctggcccccggtctgaccgcccctgacaggcagcacccccattccttcctcttcactatgtggcttctaaaattgttgcttatccatcctttgctccttgtttttcagctatgcctccccgcactcgccatggtcgtcgtgagcccatgcccaatcccgtcaatgagaatgaggaatcaagcggagatgagtatgttcaaagtgatgatgacaatatggaaaatgttgagggtgatgagatggaagtaagtgatgatggtgatgacaatgggagtggcaatggtgaagatgatgaggcaagtgatgatgggagtcctctcgattccaccatccaatttgtgtttaatttgaggaatgctcaacaatacactatcctccgtcatcatgatcaattccggaggcctaacgattgtaatgatccaagatttcatacccagttccaaaagtccgtgtatgaacaagtgtatgccaacaaagccttcgccgaacacaagtggatttcttggaggcacattggtgagacaccggagtttgaagatttgcaagagatgttctggaccgttgggattgatagaattgtcaccatgaagcaatcttttgatgaagatctcatccggcaattctatgccaccgtatgggtgtccggcgattgtgatgcaatgaagtggatgtcggggacccttcaatgctctatcaaccgccgtgaattcaaggagctcttgcacattcgcttcaacaatggggatgaccttcatgatgagcacacccacaaccccttccccattgatcacttttctcagatttatgaagacgggggaaggcacacatatggaaaggtggcgggttagagggctctcccaagtgtgatcaaccacatagtaagggccaccatcctcccaagatgcggcaacaatgatgacatacgcggagttgcttggcatgtcattgatgccattttggatggtcgtcggtttgatgttatcaaccttatgatgaaggagattgccatctcaaaggggactattggacaaggaatctattatgctccctacataatgaggttgattcaaagcaagttgggacaaattggtcacaatttaaaagaacataaggagtacaagcctcgtctccaactctcctcccctaaagctcctcgtgtgcgccaaccaacatttgatcaaggtgcaagctcaagtgcagccccccctcctcctcatgggtctgatccaagtgcttttttccatccacaatatgcctactttggaatgcaacccaatgaattcttcaacccggtccttggggctattaataccctaagtgaaagcattcaacgcttatccaccgggcatgaagcattgcatgaagatgttcgtggcttgcgcaccgatgttggcaacttgaatacttcggtgggaagattgcatactagggtgggtgtattggattcttgagtccaaaccttggagagtacccaagcttttggctatcatcgtcgccgtgatgcttctcatccttccacttcggcgcgtcctccttctcctccgcaagagtgaagacctttttggtgcttgatgccaaaagggggagaaaagtgtgttttatgttttgtgggttgggactagtagtagtgaggttagtcacctcatatttaataggttaaggaggtttggactatattttgtatgggtatgggctattactctatattgtgtgttctttgtcgttttgttaaactctctatgtcatttggacccttcatggtcttgtaatagcctacatttatttgtgagcactttatgtggtcttgatgtgaacttgtgctatgatggatggttggtgtgacattgatatacttgtgaccatcttatgcattcggttgattcatatgtgaagttcacattataatttgcatatgtgttgtgctatgttgaattgtgaaattgaaatgtgcattggctccatatttgctatttgtgttggttatccatatgttaagggggagcttttgcttgccaatgcaatatatgtcc

SEQ ID NO: 9141 - DNA, 54483 bp, Oryza sativa
gttggaacggcgctggtacttctcaaagaccacgtgcttgatctgacggggcagccaagcatgctactgcagttgtcgtccaatgcttgaatctttctgccatagtcagctttgtaacagcagaccacttttgttggtcgcgttggttgctgccactcaaagagcaccgcagtgcccgggtgactggttttcagtcccgagcttcgctccccagaggatgggatgtagatcgtgctagagcctagaggaggtggctggcgccgcagtgcagctgtgtttgctcaccagaggaggaactgtaagggaacaagaggaagtcggttctggagatggctaggggcggtacgatggctattgaggatagaggagaggagagtggaatgatggtgctggaggtgaagggaggaaagaggcgcggccatgcggtgctggctaactcagttgggggagttggcgatggaggagagggtgtctgcggctgggggagtttctggggagagttgttgagatagctagtgttagcagattgtagatgggctgggcctttcccagtggagtacggcggtctggcaggttgtctggtaatgtggtatacccgtgctgtattgatggaaacgaataggagatgttaattagatggaaaatctacatcgatatggcaacagtattcagtgcttctggcaagctcaccaggctaaaatggttttctaattagataattttggacttcaaaatgtatgtgaaactttttttaggatcccattgcaacataccggcaatcacctacgtatgtgaaactaattctttgagtttcgttctactttatctttttcatgcacatcattgctgatggtatatatggcttgctcaattttggtgagctctgggttcccctaaatcacattttgttaatttttcagcttcaggcaacatccgccagctctactgcctgcaaggcgactgaacatgcgatcatctgctttcataaaatggacctgtttactcaaaatattcgaccgtgtcggttgaagctgaccttactcccaggtgcgaaccaataatgtaaaaaaaacatgtacttcatcctatttctgcaaagtagtttgatgtatttctccaattcttttcccatttgctgtggcgtcagtcgttgggatgtcatctttcttttcattttctggtgattacacatttttggcccttccataaataacacggataagccagtgtaatagggattaattaattaattaattatgaaccaactttggagaaatgacctatataaacacttgatttccccacgtggtggtccacatatcaaatcattagcattcggtttcctatcatttcccttgttggtatcttaattatgtctcgttccaaatgggaaatgattttctttccaattgaaatatgaactgtatatagcccgataagtgggatttgcggtgccgttgggtcacatataatgcagatgcatgattgagtctctactgtactatgcgtggctgcgtgcagcctttggaccaggatccaagctacagtccctacaggagaagtccagacagcattcattcatgtttatgtgctcctaaatataaatggatttttgttggatgggacgtatcatagggctgcgaatctagatgggaaatattttcagatttataatactagaatacgttttatctattccaaaatctattatattaggtcggagggagtatatttgtatgagcagcaggtataaatggacgtttccggtttggtgatctgcatgcacaaacacatgcagctagcgcccaccgacgaggattacatgtatacgacctccggtcctaaatggtacacattctaaggacctgttttattatttcttgttttcaaactgttaaatgttgcattatttaaaaaaaattatatatataagttgttttaagaaaaccaaataaattcagttttcaaatttataataattaatacttaattaatcatgtgctaaggaggtttctcgttttgcgtgccagaattgtggagatcgaacggggcctaatactatgggtgtgtttagttcacgccaaaattggaagtttggttgaaattggaacgatgtgatggaaaagttgaaagtttatgtgtaggaaagttttgatgtgatggaaaagatggaagtttgaagaaaaagtttggatctaaacaagggctatgaatcagacagattgtttaagatatgtcatattcgattataggttgttatattttaacatggatgaatcagacagactattcaggatgtgtcactactgaagaaatgatctttgttgggtcacgcaaaaatcatattattcccggtttgagtaagaaccaggactaaaaatatctttagtcccgatttaaaaatccacaggtactaaagataaatctttagtcccggttgtttataccaaccgggacccaagctctaaaaaccgtgaaaactcctgagccgcgcgcgctgtgcctctcgtccttatcccatcctcctctcctcctcccctctcattttctctctacctccccctttcttccccctcctcactcctcctccgacggcgacggcggccaggaggtggcggccgggtggtggtagctgggtgcctgggcggcagatccggccgggaggtggcagaggtcaggaggaggtggccgggcggcgccaacatcaggcagccgcgaccgggaggcagtggctgggtggttttgtgatttttttttttagatttagggatgattttgtgaatgacttggggattgtggatgatttttttggatgggcaattgtagatgatttgttgtgcataatttgtgaggatttgagggtgacaataaatggaagcagaaagaaacaatgaaccaatttttccaaaaaaaaaaaactaaccaaccaggactaaagatggtagcgccagccacgtggtgttaccatctttagacccggttggtattatcaatcgtaactaaagatttatcttttctcccagttattttaactgggactaaaatgggtatctttagttttaaattggacgtctcggtttgcaatccgggactataaggggctataaaccggaagtaaaaagactttccctattagtacgtacattctgatcctacacatcttatctgaccatacatggttctacaggcaaattgatcagcctccctcgtgatgcacggtcaggtcgatcgtatgcacgtacaaagccttaaacatgtaccagctagctataggcgcgttgtggggcatgcagcatatcaatgcaatgatgcagcatggcaaagggcttatgcatgcatattcgatctttggcgatcgatatgactaattacgtggataaggcgtgtacatacacgtccttaagcgtcttctaattttaacacacgcttaaattatggtttggcgaatggtcaagtgtgtcaaatctctacggtcctgtttccaagatacgaagattaattagcctgtgacggtgaatcaataacgtgctagcgatgatctaaagacacgtaggcttacctaccttctaagggcatgttcaatgatagagacgtgtatggttttttaaacaactatgaaggtggcccacgcgatacgcgggcatccatgctatcataatagaaattatattttataagggcaaactataggtcgggcatatctgaaaaccattgacttagaagatagatcaaggtcatatgacatttgaatttacttttggactaagtgagtaaatatgatgtatacgcgttcgcgaaaagtaaatattatgtacaccatttaaacacatactatataatattgctacaagtaaaaattgcgatagcaaggacttaaaattattgtgatcgaatcgtctcatgaagatgcacgatttagtgacaaccaaattaggatagattaacggttggattgtttttcccttcgtagaagttcaaaattttcatattcttttccaaagttttaaagaatttttgttaggacacaaatcatttgcagaattgctttgttgggtagtgcaaaatatcagcaattgtttgaagcttttctttttttttctttttcgcatgtttgattgttttcttcgaaacgatatttgtttgaaataagagcaaaattatataaatttaattggtatgtatagtgtttatcggatcaccatatcaccttagctgcctcaggtacgatgcttcatcacacgtgcagaaggcaaacatacacatgtgcgtggtctttagaagtttcattttacttttataaaagatagatatggcatgcttgttaataggtccttaataggtctaattaatagatccatcagtttaagtgaaaaccgatatcaaaatattttgttaaaaatagtataaaatagtgggttgagtaattaatgtaaaatattagttaacatagatcataaatgggcaatttactggtagagaatattattgcgtaacatttatattaaacaacatgtttttaaaattttcatataaaataatgatttgatataatagatgcatcggtttaagtaaaaaaaatattatattgttaatataaatggtaaaataatatagttttataaaaattattttcaaacatttgtgaatctaatttagacatatatatatgatgatatatataatctatgtttataaagttataatttcttcaaatttattaccactactaataattacaatttcgtctatacatgtagaagagaaagaagaagaaggaagcaaatgtaatttttaatgacataatttatatttttatgtttttccactttatctttttaaatgtgtgttgcagttgtatatgtattttcagcttttttacaagttgtaagtacgtacctttctcgtcggtgcgctgagagagattaggagagagattataaataggatttaatctaatggtcggagataacagatccatcaatttaattaaaaattgatggctagatattgtagttttttttctcacattttctagatttttttctaatttattagagtatattttaagtttaatacgaattttgattttgtatctcatctaacctagaagggaaaaaaaggaaagaacaaagaggagggtaggtacatatgtacgtgcacgtccatggagtgatagaggactttgggtgacgctaatgggcgatcgatcgcctggagcgatcaacctccatcccctcgtataaggtcctctcccctttcctcctccccttcttctcttcctactacaacataatttttttaaaaaaataaaaaaacaaaattaaaaaaatttatgtatagaaatactatatataaaaaatatttgaatttaaattcaaatttgaaacgggtatgtaaacttttgacttataaactttgggtctataaactttaggtgtataaagtttagatgtatagaaatactatatataaaaaatatttgaattcaaattcaaatttgaatcggatatataaacttttgacttataaactttaggtctctaaattttaggtgtataaactttagatatgtaaacttgaggtgtacaaactttaggtgcaaaaatttactaaaatagaaaagtaatgcggtgccaaaaaaaatcacgtggagaagggggtgatcgagcctggcgagcgatcgcgcattaggaattttggaggactttttctacaagtgattctttttccagatgagcgtaatttcaaaatcttaagatagatctatgttagctagaaataagggagaagggaagagttgggggtggctagagggagggagtacgtgctggctaccggaattttgtattttagatagatctaatggttaaaattaatggttcaccgatttaatgaaaataaatttttataatttattataactccatataacaatttaggagtgtttttagagcatttacattgtacatgcccttaggagtctcacgtggcggcttgagagagtttgtaggaagtttagatgttaggtgctctctaatataggccattcattttctttaaaatccatgcaaattttataagtagggtgacgtatatatacaagatattctttttggcttttttttgtcagtactatgtattcgtgtgtacgcgggattttttttgggaggaattattttttaatagatgtgatctgatgctataaaataactggttcaccaatttaagtgataatcgaaggtcggaatttctagaatctcctattataattacataattttaatacgaagatgaatgatcaaatatacactcactcaaacaatgtcaatagcataaaaaagcagggttttaaatctcctgctatagctgtttgaaaagggttttagctatttgctctcatgtataatttagccgctatagctctatttaacccactatagctgccgctatatctgtttaagaagctaaccgctaaatgtattagcccgctatttaaaacatcctaaaaaatagaggttgtagggtaaaaaaggggtaaatggggagagtgaaagaaaggagggcacataccttacctgggtacaaacgggatgaagcaggtgtacgtacacacggtgagatgagagggagggactaactcttcttttaatctaatctaaatctaaaataaaataatagacccaccaatttatatctcacattgtaaaaatatttttattcatcagtgaataatggagtaagtacgtacacaggatgattctttttggcttttttaggtgaatagtgctatatatttatacgtacatggtttggaaggtattatttttttatagatctatctaatgtataaaataacttgtccatctaatttaacgtgaaaatcgaggattgaatgttttattttattctcaaaattttttaatactaagatgcatataaatatacgctcaaaaatatcaacggcataaaaatgagatgatataaatactcctatattgtaaagtatttcagacaaaattaaataaaaaagtttggggggagttaaaaaaaaggtggggcacgttcaagtatgttacatgcgtgccattgggagggaggcgtacgtacgcgctcgtcagatgaggggtggactaattaactttttctttaatctaagctaatctaatggtctaaaataatggacccacctatttaagtgaaaatcgagggctagatatttctaatatattagaatactacgtggcgatctaagagtatttttaggagtcccacatggcggcttgagagcgtttgtagaaagtttaatggacctttagtatataatagatacagattatttagagacgtgtctttacaatagttgagacgataaaggctctaataattaactcaaaaaatatttcttttgttaatattatttttatttttttatcctcatgcaaccatatttccatattatagtgattaatagttgttgttaagccgttgttatgcataacaacaatgttttatctttactctttctctttcttccatgtcaacaagtattcctaattagcaatgctaagagaccactattgacaaccattgtacatgccctaatccctattttattttctggattatgtagcttagctaccgagtgacagaatatctgaacctggactatttagaagagagttgaagatagtaatcgttgtagctaatataaactcttccaaatagtgctaagtctgacaaaaattaaattactaaaagtatatatgcataaagttcaaaaaaagtatagctgcatatatacactacttaaaaataacttttgcaccgctttcttcacatgcggacctgtatataaaaagatttaggaggtgtccaataatggcccagctacaaaaatttattttcacagccagatctcttaagaggtttgcatgcgaattttggtacccagttggctcccactccttttctctcctccttgcgttaaatcatttcttctccctacttatccctcttctcctcagtcctctcgccctcttctcctcgaccgctagatccggtgatggtgaaggggtgggtaggggaggctatggatcggacgcgtcgaatttgtcgtagcggggagtgtgacggtggctagggtggtcacgacgacaacagcagccttaagggcggtgaattcgtcaatcgtggccccgatcagggtggatccagtggctatggcgactgaggggcagatccaccagcgatcttgcccctccatcgcttttccccctacctagtaaatatgactttgtaaacgtggcagagtttcatgtgagaaggacacttttccatgccggattgaaatacttttttttggcggttaggccaactcacaaggaaatgttcatatatataccttagcattataaggaaaaccctaaagaaagtaagtatataacattggcggtcaattttaaccgcattatcgagtaatgttggctgttttattttggccccaagaaaattaattggctgcctgcttaatcaaattatacgctgcggatgctctgatcccttcatgattccacaaatgctggtgactagccacacccttcttaaaaattaatggcattgacccatcacgggacagcttatatatcatcgatgggcatatggacatatgggtggacaaaagctcaaattaagctcgtggctttgatcggcttgaactcgtttcgtaacgagttaagctgagctagacttttagctcgtgagttataatgagctagctcacgagttgcttgttagtaaaagagataacaatatatatctttatatattccatgcttcttaattagtacgtagtctttaatttacattcaaacttttgtatttgttgagccttttcttagtcagcttttagactatatatattaatacgtgataaattggtaagtttgaaattataaaagtgatatataaatgtgttaacgagtttaacaatttagctcgcgagctgagttgagctagacttttaacttgttaaggttagcgagctgagtgaactgacttgtgacttgtaaagataacgagttcaaacgaacctgagctggcttattatgcagccctagatgagcatcttcggatgcagccacaagagggaatatatcatcaggattttcagtaaaagaaaaggagagagagatcatcaggattacaaggtagtccaatcggcccctctactacttcaacagctgtcgttgtaaattggtctattgcatgtctacgtacacatatatacaagcaatgcattttttttaaaaaaaacacatacaagaagtacttcattagtatataggtggtcacaatccatatcctctagaatgggatcgatgtatagcacttcaccacacaaattctttctatatgttccacatgactatatgaggctctagtaggagaaggtagctaggatgtaagccatacatatatagcttaattaaggttgtacactactcctgcctgattgctgctgtattattggctagcaacatactgatgctttgcaagcacatcagctacaactaaaaaattaattttgagtaaatttcataaaactacatatattttgatcaaattatcacaaaactatatatttaaggttatatatcataaaattacagatttaaaattaaatttatcataaaactacaaatctaatatggagtattgcaaaactacagatttaataagaaagttatcacaaaactacaggtttcagagtttagatccttagcactagtgttatgtttgagttataaacatgtaagttttgtaattaaattgtcactaaacctgtagttttatgataactttattactaaatatgtagttttacgagtactgtgaaaaatttagtgttaaatctgtagttttgtgataatttgattaaagtatctgttgttttataaaatttactctttaattttagagacgattttaagtttttcatcatataagtatattttagcgttgtcttttaaatcatcaagaatacatataatttttactgataagttatttttgttaattgttttatttatttatttttaatcggtgaggcacatatatattagtcagtatcactagcacatattagaagacaacagaacagcacgcaaaatctatagaaaagtttgcaacagtatgtatgatctgtcaagagtcgctgtgatgacagcgaaatttttgtataggcatctcccggttgatggaagaatccatgcacagcattttcagagatacatgtgccctcacacgaacggctgcaacggcttcagcatgattaggcctagccaataatcaaaacgtactgtggcttcttgaatatttaatttagaactttattcgagggttttttttaatttcttcgtcatttccattgcttggctctcttttcatgattgttgagaagataaattttttttaaaaaaactcccctgaaattatatctaaaaataaaattttagaatacaaatcgctttaaattatactacaaaggtgaaataagcttgcaggcctatcgttgaaaaaaaaaacttgactagagaatattggatgataaattacgcttagtctggttacttccaaggctacaaggtcaagccactaaagaatattgaatgataaacaacacccaatctctagtagtctcggacatggaatgcaattttttttacaagaatgtccctcttttccatctcaaaatataagacattactatcttttagaaaaattattatttataacatttgtctaataattaaagtcatatgttataactagatttgtatttagaagtacctatatgacgttaattttctttttaaaaaaatatatttagaaaaaatattgtcaaagtataatgttgcattgtaaaccgtgtaaacagttaataatgtcttatatattggtaggagctatatgagaaaaagtttaactcatagtatatatatatatatatatgaatgaaaatcttttttcacatttcaaacaggccgattcattgtcgacctcaaaagtgaaagcatatatggacatatcaacaacagtactatagtcacttcaagaaagtgcgaggaggccaatacgtacgggagcatgacagtacaacatgtatacttcacatcttttcctcatttgagatctctctgatgttatttgagaggaatatttttgtatacggcttattattaattcgcagccacatgtttggcagcacatgctatatattagatgttgtattatcctgcaagctaggactgcatgctgtgaaccgcaaagccgttcattggttgcacacttgtatataagcctacagtttgctactagtatacatgatatccaaatcatactagtttattaatgtgaaatctgaattattttatatctattcaatttaccaccgcgcttatttattaatttgaacatgtttactcattttttaaaaaaaccgaatgaattacaaagacatacacgtagtgaggcaccgttgttggtggctctgtatgaagaaaaaatgattcttctaaaatacctctttgccttgtcgcttgtgttatgctatatcggacctcttctttccattgccttctctcttcatccttcgcagaactagaattttcttaattctagagttgagctaccgtagttcgcataattttatctttattctctctctttttgaagaaaaaggaaaaacttacatatccttgcacaccagcactccaatctctatggttttcctttctcgattaattatagcttttaacacaaggttgcaatatgacgatgttagcggtattacacgtatgttaaattttaacttgatgagataaattggacctgcaaatgcttttttttttccaaattttgatggaaacactcacagacacatacaaccaaagcttcctttcctgatttgtccggtgtgcaaggtagcatataacctgttgctgtttaagggtccctgtaacgtgtacgtagctagctaaactccgggtaacaattttgtcctcatttattgcatttgatgtgattacagcttagactgactgaccggtcagtagattatagaaatcgggcagccgtactaattcagactactattagtgagcagtaacaataatccaactcaatcgaacttgaggcatcaccattcatgatgcatgtactttaattaaacactgttagtagttagctaaacgccggctaagtacagttttgtcctgatttactgtacctgctgatgagatgcttgagctcatgcaagacagctagaaacatcaccagtgcacgtgaaaaccaaaaggtatgtgggacgtcctgtggtaaataaaatttaattaacccagcacaggaaaagcaggagagttttattcttcggtgatagccaatctctccaaaaaaaagtatttgttgggtcctgtggttaataaaatttaatccgttctttctgtactattacagaaacgctacttatttgcatttttaatatatgatgccgttgatttttgacatatgttcaatcatttatcttagaaaaaaagtacgaattaccccccgaactatcgaggtcgaccgaattacacccccaaactcgaaaatcagacattctacaccctcaactattgaaaccggacaaataacccccccgactcaatccggagtggttttgggtctacgtgacaggccagtcagcaatttttcttaaaaaaaatcaatgggccccacctatcagttctcaacccacccccccccccctctctctcttctcaccagcacggcggcggccacgcgagggcgggagcaggcggcgctgccggtgacggagggcggcgggcggctgagacagaggcggagctcgtcgcgcaggttgccgtgcaagttgaggcggcggaggagcacgagtgagccgagtacggacggcacgtacccggacaggtttttcccggcgatctttcaataagtaaagccaaaaaagatcatatcaaagtacgacaagtcatggaatttaaatggaagacaaggagagaagacgattcgattttatttttcaaccagttatctttcactttaaaattttaaaacccaagatgcagcgctaagagtggttttagtggtgtttttttaccactttactaaccatcatgctattatatgccatgcatcatggtggctaatatatataggaaactgtatccacgtttcgcactgttatttccatcatttcctcgcgctaaagtgataagatagggagatgcggggaggaaagggaacaaagtgtatgatatgatgtgtccagtgttagctatttaatacaccctccattctaaattgatctacatatagtttttttaagattattactaaatgatatacatatttatgttcattcattaagtctatttgttatttgtgcattggagtaaatagacattaatgcatgcatccatgcacacaaatatttataacccacatgcaatatcttgatttgctattggctaggaaatagtggggatggtgcatgcatcgagtttgttgctaaagtaaatatagtatgagagagttattagtttttttggttttagtgtatctatgaaatatgtacatcaatttggaatggagggagtagttaattatagtggcggaaaatagtgttatatactatgaatcttaaacggagatttatgagccctattttttcacataaatgaaaatattaacatgttccatttataaccgcggaacaacgtacattattattacacaaagattaattgaagataagtattattcatacatatacaaatatctgtgacgcaatctataggatgtgatatacacctacgaatataagtacgtgaatttttttaaaaaaaaagaatcttggagtaaattattaacgtgatatagctagtttaatttgtgatagggaattaaggatacatagtcatgtcaccttcgtcatatatattaattattcactctcgatcgattgccaagtaattatattattaacacgcatgtggtaaacggtatacccacatacagtgacatggctagtctgatagagaaggatgtacagtcaagtcaccttcattgtcgattttgccaagtagagtaatttttttaacgcatggtaaaatggtagcttagacgtagacacatgtacagtgatagctagtctgatagagaaggatatgtacagtcttgtcaccttcagatttggcattggccattttgccatacacttgtacgtgccgattcacacgcttgtcgatctgtgactgtagtagtgtggcaagtctcggtctctctggcaatgaccctgcttcaattcatactccactggtaattttacatctatatatatccagccgtttattgagatagagacgtgtaacggggagagcaggccggtctaatccatatatgcatatttgtgtgaacgatatataggcacgaatttacaaaaaaatatcgggtattctgacttttaatttctaatgtttgtttttagagtaaactttataaaacgatgatttgaccaaactatcacaaaacaaatatgcgttttttttaaccaaaactacatatttagtgtcaaatttatcacatatctgcatatttaaggcatctacagattatgaggatattaagaactatacattttatagtttatatccatagcagaagtttagtttgtgataaaactgatgttaaatctatgtgattttctaatacaaatctattattttgtaaatgaaaattatgttaaatccataatttttgtgatacaaatttttaaatatatagttttgtgatatacaaagttgaaattaatttaatcttgtttttaatgcaaaaatttataaatactaaaaaagattacgtattacaaaagttttttttttgcttcatacgcattagttttttcttatttcaaccattttaaaagaaattagtgatcaacgtcgacgcaatattagcaatattgtttaaggaagggagtacttttttttgtatattgttggaattttatgttccctagcttgtgtcctgttcatcacgatagctacgtatatatatgtggaatcatcctgactcctgtggacgaaaaggtgggtcgcgagaagtacgttcatggtaatatcgtatgtatggaacgacgttttaccttgcgtgaagtacgtcttctgactacactttacaccattctttcatgaaagaattattttttttttcaaattcatcctgaaaagttttttttttccggatggagtacgttttaactttgcttgcgtagtacctatagtagatatttcggtttttgatttttttttttctctcccttgtccaggcagttgcgttttgtaattgaaatattttttttctaatatatcaacgtgtaatctttttacgcgttcgtgaaaatatacaaagagtcgtttttttttccatacgtaggacatatccgatatatgtattggtacgataattaatactgcccaggcaaagaaaatcgactcaaaatattgtacaaaccatgaagtgttattttttgcggatgatagcacggtagcgtaatcaatatgtagcacttggagattctctaatgcaaatgggctaaagatctagggaatgtcatttactctcggcacagtggaaaaatgtaacccacttccaattcaaccatttagttttccatataccataattcataacgcctaacaaaatatgatagcaaggaaagggatgtcatgtcctcttatttttacgtgtgaagaaatttgataagatagaccaatagattatgtaccactacataaacatagaagtttaaaatcgacctatacaagttaaaaacaaataacaaagatcaaatttgaacttggatgtagtgtacgtagtcagtgctctaaatatggaagtttggagtgatataccaagaattgatacatcttgttcgatttttaattagttttatggctattcggaaatgtcatgaaggaggaaaaaccgtatatatgtgctaaatcggggatgagcacacacttgcttgtcttcctacagtgtgaaatagctgtagcaaataatcttgtgagaggccactgctagctctagcttagctgctctatggcacaggagaacatataggagatgtaacagcaagtgcacagggagggaaagagagagagatgagtgattggcaatacacgcacgtgtcccaatccctcgatcaatcaagctagcctagcctagctatatattaactagggcgccacaccacagacgccggagatcagaacgaatcatatcgttcaacgagcgtccggccggcgggcgacgcgctgtcgagcaagagcgccgccgcccgatcaatcgctcgccaccatgattcaccccaaccagccgctggcgctgtccgcggcgaagaacgcgagcaccgtcgtcgtcggctcgccgctcctcgcggcgtcgccggcctcctcccccgcggcggcgtgctgtagcagccagctgcagcagcggcgagccgccgggcccgggaggaggggcgccggtaggctcgcggcgccgaggtgcagcaccatcgagcaggccgccggcgtgtcgtcggccgtgacggtggacaggacgctgacggtgaccgccacggtgaccgtgcagccgcccatcggcgtcgtctacgccgcccgcggcatcgacgacctcaccgacctcatcggcaagacgctcctcctcgagctcgtcagctccgagctcgacccaagtgagcagcacaacatatccatggcttagccgaagctccatggatgcatggacaaacacatgtagtagtaattaacaccatgtctatgcatgcagggacggggaaggagaaggagacggtgagcgcgttcgcgcacaggacgatgaagcaggacacgtacgaggcggagttcgccgtgccggcgacgttcgggccggtgggcgccgtgctggtggagaacgagcaccaccgcgagatgttcgtcaaggagatctgcctcgtcaccggcgccgacgactcctccgccgtcaccttcgactgcaactcctgggtccactccaagttcgacaaccccgaccgccgcatcttcttcaccgtcaaggtactacaaacatcgatcgatctcaccatcacaccatccatgaacacttggaagcatcatatcaacgacgtctagcgcggccatggatcgatgcagtcgtacctgccggcgcagacgcccaaggggatcgaggcgctgaggaagaaggagctggagacgctgcgcggcgacggcaccggcgagcgcaagttcttcgaccgcgtctacgactacgacgtctacaacgacctcggcgaccccgacttcaagatcgagcacctccgccccgtcctcggcggcgacgaacacccctaccctcgccgctgccgcaccggccgcccccacaccgagatcggtaaccccacctcacctcccagaaattttacatcattttcacatcaaattaatcacctattccctccgtttcaggttataaaacattttaacttttgtcaaagtcaaactattttaagtttgactaagtttatagacaaatataataatatttataatattaaattagtttcatcaaatcaataattaaatatattttcataataaatttgtcttaggttaaaaatattactacttttctctacaaatttggtcaaagttaaaacagtttgactttgaccaaaatcaaaacgccttataacttaaaacgaagggagtaataatgatcgaagacaaacctaggacagcttagacctgagcctatgtttatctccataatcatgctcaaaaaatttctggctcagccactgctaatggattaaatgtatatgtaattaattagatccgcggacggagaagaggagggggccggtgtacgtgcctcgggacgagcagttctcggacgtgaaggggatgacgttcagcgcgacgacgctgaggtcggggctgcacgcgatgctgccggcgctggagccgctgctggcgaaccaggagctgaggttcccgcacttcccggccatcgacggcctctacagcgtcggcatcccgctgccggcgcagctcgccgccgccggcgccgccactgccacggccggcggcgccgcggcctcctcctccacctccaccaacatcgtcggcggcgtcatcccccgcctcgtccgcatgatcgaggacaccaccgaccacgtcctccgcttcgacgtccccgagatgttcgagcgtacgtgataattaattaattacgtgccatgattaaaggctaatcggtagtactaattagtactccctccgaatgtattttaatgtataaccgtcgctgactttttaactaatatttaaacattcgttttattcaaacttttttataaatatgaaaaaatttatgtcatgcttaaagaatatttgatgattaattaagtcacaataaaataaatgataattatataatttttttaataagacaactggttaaatattgaaaaaaacttaacgacgacatatattaaaatataaatatcgaggtagtaacatgttgattaagctatcgaggtagtaacatgttgattaagcaatggatcaattggatttggctttgcattgcgcaggagataggttctcgtggttcagagacgaggagttcgcgaggcaggtgctggctggcgtcaaccccatctgcatccagctcctaacggtagcaccgccattcccaaccacatacactattcacctgaggacgacgtcacttttcgatgacgtcatcccccaaaaagaatgaattttcgctcgtcccgtcctggtcatcctttaatgtgtagtggcgaacccagaatttttatactaataaatatttcaaaaaatatacatatgttgatgtctttaggagagaaaagatatatagcagtagaaaaataaacaaggggtacagtggcagatggaaaattttttacaatgggtattaaaaattatgtagtatttaaaaaacatgttagagactttatatgacaaaaaaatgaaacagtacaatatttgggtaaaagctgggtggctgagactaggaatcgaacccaagatccataatgggtatattaaaaatcacgtactccagtatttaaaaacatgttagtgtctttagcagaaaaaggattcaataataaaaagaaaatatgcatcctatatgttagcatcatactcccttcctcaatttatggcatgaagttatacccatcttaaactctcaactgagttttttgctgatgtggttttgaaatttaaaaatatatatataactaacaagttgtaaatgatacaaacaattcttttaattaaaaataatcatatattaaccatacggtaaaattttaatgtttatataatcataaaagtagcccatgaattaaatgcacaggtttcctaaaatttatatgcagaaacttttataatacatactattttatattaaaaacaattgaattcgaatctaaattaaaatctggcataaacttttggtgtaaaaattttaggggtataaactttagttatataaacttaacaaaaaaataaaaatcgcgtgacaaaaaagaaagtgtggccgttcacagtgtgcaaacattagcccttttcgctagataatttccctctcaatatttagctaaaaggttttaatggctttaaataaatgacactattgctttttctaatttctaggactatttgtcatttgttagcatcatattcccttcttcctcaatttatggcatgaagttatacccatcttaaactctcaacttagtattatgttgatgtagtttagaatttaaaaatgtatatataactaacaagctgtaaatgatacaaaaaatattttaattgaaaaatagccatatattaaccatatggtaaaaatttagtatttatataatcataaaaatagcccatgcaatgcataggttttaaaatttatatgtagaaacttttaatacatactcattttatatattaaaaaaacatttgaattcgaatccaaattaaaatcggacataaacttttgtggtaaaaattttaggtgtataaactttagttatataattaaacttagcagaaaataaagtgtggccgctcgcagtgcgcaaacattagccctttcgctagataatttccctctcaatatttagctaaaaagttttaaatggctttaaataaatggcgccattattggcttttctagtttgtatgactatttttcatttgtagaaatatttgtgcaaatagacaaacatacgagtcgtaaagtattattgatgacaaatctagtggtatccctttttttctattttgcttaacattgaacgaatgtctgtttttaaaagttttgaggaaaaaagtctcaaatggtgtgagtagcaactaaggaaaaccgaactcaccaattaattaatggcgatcgatcgacgtgtgcaggagtttcccatcgtgagcaagctggacccggaggtgtacgggccaccggagtcggcgctgacgaaggagttgctggagagccagatcgtggagtcggtgacggtggaggaggcgatggcgcagcggcggctcttcatcctggactaccacgacgtgttcctcccctacgtgcaccgcgtccgcgagcggccggagacgacgctctacggctcccgcacggtgttcttcctcaccggcgccggcacgctgtcgccgctcgccatcgagctggcgcggccgcagtcgccaacgaggccgcagtggaggcgcgccttcgtccacgggcccgacgccacggcgtcgtggctgtggaagctcgccaaggcgcacgtcctctcccacgacaccggctaccaccagctcgtcagccactggctccgcacccactgctgcgtcgagccgtacatcatcgccgccaaccggcagctcagccggatgcacccggtgcaccgcctcctccacccacacttccgctacaccatggagatcaatgccctggccagggagagcctcatcaatgccgacggcatcatcgaggagtccttctggcccgggaggtacgccatggagctcagctccgtcgcctacgccgccacgtggcgcttcgacgccgaggccctgcccgaggacctggtgcgccgcgggctcgccgttcgacaggaggacggcgagctcgagctcaccatcaaggactacccgtacgccaacgacgggctgctggtctggaactccatcaagcagtgggcgtcggattacatcgacttctactacaagtccgacgaggaggtcgcctgcgacgaggaggtgcgggcgtggtgggaggaggtgcgcaccaaggggcacgccgacaagaaggacgagccgtggtggccggcggtggacacccgggacgggctcatcggcgtcttgaccaccatcatgtgggtgacctccggccaccacgccgccgtcaacttcgggcagtaccactacggcggctacttcccgaaccggccgacggtgatgaggaagaaaatgccggtggaggagaacaaggaggaggagatgaagaagttcatggagatgccggagcacgtgctgctggacaccatgccgtccaagatgcaggccatcacgatcatggcgacgctggacatcctgtcgtcgcactcccccgacgaggagtacatgggggagcacgccgagccggcgtggctggcggagccgagggtcaaggcggcgttcgagaggttcgcagggaggatgaaggagatcgagggcatcgtcgacgagcggaacaacgacccggagctcaggaacaggtgcggcgccggcatcgtgccgtacgagctgctcaagccgttctccacgcccggggtcaccgggaggggcatcccaaacagcatctccatctgagtttcgctagctaagatagctagctgcatttgggacaagattggagatggttaagatttgtacactaagatcatgtaccaacactaatagctcccgtgtatgcctgcctgccacgggagaggcatttgctagtgtgtttgagttactagaatgccacaaattagtaaagaggttattgaactaaagctcagttcgctgagttttctagaaattggcagtatgtcatgcggacggatgggatctgctggattcagcacatatcatccaagaaaaattactcacagcagaacaggcatgtcatgcatgtgactgaatcgagcagcattgtgagttgatcaggaccagcatggcatcgtgtttatagttcattggtcactggctaacgaacatcgttacccccggggttccagacaacgaactatacagctaagctgagacactgccaggatgcgtatctttttagaatgcaagacggttaggaaagataagggtattggagccgaccacaaaggcacaaagtgattagtcaggggaagataaggctggacctgcctgttagagttcactagaaagagcattccgagcagcatctccatgctcacgccggctcatttgagtccaaacttgtggagttaaacggttcctaatacatctagccacgcgtgacttggatgtaaaagagtccacttcgctcggttctctgaggtcaagtgatcaaccatgaaaaatttcaagtcttgtgcagtccacttagcacagcagctttgggtttctccgtttgaaactgacagggtgtgcagaaagtgatgcggcgcttgaaatacttgagtaccgctcctcgagtacagaaattgggggggtggagggaagggctttatctctgggagatgcagcctccggttgcactttgacttactaaattagagcaatgaaaataaggcttcgaaatgaagaatataagaacaaaaatggaagtgtgtgttatcgagtgaggtacctgtaaaggatggctcgaaatacggtctggttgttttgaaagagggttcctgagcatcaacctccaagtgttgtgtcgtcgtgctggtcttttgaagacctgtcgactggacaagcttcagtagtttgtctgttatgactgtcattggcggacggagctctggtgatttctgcattgaaggaagaaatacagccagtaatgatcacaaatatagggtgctgaaattcattcgatgaattcataaatcattaggaccgcagtaattagacatttttcagctataatccccttcaattcccatttaggagcagagtctaagcattaaggagtagtgcatgcggtgtttcaatttgcagcttggcttctatcctcaaggtagcatagttcaactaagtaatgtgtaccagaaaaaggtaacggacagttaccttgatgcagagtaagatgatgttgcctaacgtagagatagcttgaggtggcatagatgcatgtattcttggatcagttattctttccaaagaatcaaggttatggagatgaggagatgcccaatcaactagaaactgctcattctgccttcttgaactgaagaggaaaaagaacttcattagagaaccagactacagctgtacaagattaagtgagcatatacctgtcaaaggccttctgcccagtcaaaagcacgagcaaaatcacaccgaaactgtaaatgtcagccttgatgctatctgttgctgggtcagtaagctcaggtgcaacatagcctttaccactgttgagagcttctgagtcctgttttttcaggtgaggaactgttaacggtcaacggattatacagaagatatatcattgactttgaaaaacaccagtatccccttaatatgtgtgtgatttttctacccacttctgaagggaccacggttgatcctagtagggacacacacatatacatctttcaaatatttcaagggagagtagcttgttttgatataacactataatgtataggagtctatccagcgacctacctttgattttggttgagatgcaactgtaagcaatcgtgacaaaattccaaaagtatgggtctaaactggcttattattaatttagtctttcttccttttggaaaatagttcaagagctatagcgttcaccaaaggacataagcaccagcccggtgccttggtcttaggacttgaacccaagcagatggggaggttaaacagcctcaccatcaacaggacaaacccttttccctaaaaagctaactttatggatcgttttttctcaatgcatccttctctgtctaaacttaaaattccttatcgttaagtatgcagtaagaactccaagagattggcaatccatgacaacaattagatcctagaattgttcaagtaaaacattaactatatcaccatcactaatgattatgtacagaagtaagaacactatccaatataacatggaaaactagtgagcactgaccgttcttatggcactgacaaattggcttagcctggctaatccacagtggctgaggtagggcatgagctgagcatcgagcaaaatatttgtcgctttaatatttccatgaacaactggaggagagcacgtcgaatgcatgaatctgcataagcttcaaaatttcaggaaagcttccagtatatgtctaaaaattgacatcagttcagcagaacaatttacagaaagccattaacactatgaggatgtgtataccctgcagtacaaaacaaacagctagatgatttggtaggaatctaagtccacaaaaatgtacttactccaaagcataggcaactccaagagcaatcttcatccgagctttccatgacaaagccctggaccttgtggctgctgaaaacaaaatatcatcaagagagccattttctgcatattcatatagaagtgcacagtgcccaaactcgacacagtagcccacaagcgcagagatattggggtgcttcaaattggacattttcccaagcatgtctatgagctcatcttgttccgataatgacagatctaccatgttgatcttcttgatagccaggagctgcatgtacgaggataaatacatgttatacatataaaacacagatgtaaaataatctgtagaaaaaatatgcgcctttactatttagcaaatgataaatttgataaatcacatatttttttctaatattgatttcgggaagttgcaatgagactaggaattgcatcctcctcgtgcattgaattttaaagcttatcgagagatcaagagaaaaaaaatgtcaacgatgcaagacaagttttattgccgataagaaaaggaaaacggccagttgatgaacaaaaagtagtagtaaataaacttaatacaccaactaaaggaaaattcagtattaggacactgaaacacgtagtagaaattagattcgagagcttgttctaaagtaacaaaccaatagtattttccaacagggtactaacaatatgatacctggccaccaggaaaatcacctctgtaaacttggccagtgaaaccttcaccaataaagcattctttactgaagttcctggtagctgctaagatgtcaacagcttgaaactgttttgcagttagaaagtttttggatgtcttggcccaaacttttgttttcatagctctttcaggcttaatgacgtcactagaggaagcctcacagtcattcataagagaattccaagagtacaagacctcatttgctttagggactgtaaaatgatatgtatgaatttcagtgatatgaaagaatgtaagtctatccaataatgcaacatgcaggaatggagaacaagtatatatatacatgattggatattacatacagatcctaacataaggatgaatattaagtgatgaacaagaatatatagaatatgtctagccatcaactacaattgcataagccggttatgcttaaactaataaagttccagtgctacctttttccacattggcaggtggagatttggcattgttagcggtgctcttaggactgtatgtgcagcttttcagaaccaagccaacaatgaggagcacaaaagctgtaccagtaacagtagctattgcagcagctgtcactcgagagtgtgacttcctgtgctgattatggttgtacatagaagaatggcttaaggaaggcttcaaaggttcgggcttgtgtttcaaattttccttaactgctggtggaggtggggacataggtggtggaggtgaagatggaggtggatgtggagttggtggtgaatgagcactcctggtaaatgagggagatgcacgtttgaaacctggttgaaactggttcccatcaatcctggaatgttagattagccacttatttcaactagatatgaagtcaaggcaacatgtatgcataaatatcctacggaaagaaacgtgggttattaagcagaaccgaatacctcaactcaggaatggactcaaaagttcctggcacataaccactgaagctattgttttcaatgttgctgcaaccagttgataattgtcaggaaggatgagaataaacaaatatagagaaggataaaatacagttgaatttcttacagggatgataatggaaggtctgccaacaaaataacagatcctgtgaactcattatgctgtaaataactgtaaaaccaaaacaaaatgaaccttttatattctagcatatttttgtgcatgaaatcgttaagaacgcacatcattcttacaggtgatgaaggttcttcaatgagctaaacgacgttggcaagtcaccactgaaagagttgaatgataaatccctgaagttgaatacgaacaaaaatgaggtacagactacagtgggtgaaagatcgaattactcgaagatatatagctaaatttgcatggagaattatagtagaattgcaagaaggtccaaaggaactactctagcatcaaagtgtgtgcccatattaacaggtcaaatgagcttgagccttgaagattgttttttaagaaaccataaagcaaataaatgcaaaaatagaaacaaacagactgtaaaaacttatgtatcaaatgatccatgtgatttatgtgagtgcaacgaaacatgcatttttgtggggtggctaagaaaacatgcagttattcacaataatggagggggaaatctaggaaacacaaatgtatgcagttaagcatggctgaagcttctcttgtacatgcaaatattaaataatgtttgggctgcaagaattcgcatgtcgttgcaggctacagtgcaagaaataattcatttattcaagaggataaagaaattagaatctgggagcactacattgttcctaagctttccatgttgacaaaaacatcaccaattattccagagagcttattgtggctgaggttcctgcagcaaagattaattacaggccagttatttgattctgcaaccagagttcactatagaaaattaggaagtgctccaattgccaaaaatgcactcacagatatttcagagtgtgcaaccatggtagtgacggtggtatactcccctcaaactggttggctgcgaaatttctacaggagcacaacatatggcgattatgtcaaccatagttcatatttgatatttaacccagccaaaagggggataaccgaaatacaaagagaacatacaggtattccacacttgggggcaaattgcgcgggatttcaccagcaatgttattgaagctcacatccctacggtcgtcatgattcagcgaagcaaagaaattaaagactggactaagaacagcagaatcatgatatgctaacagattatcacaaactttctggtcaaaagctcacagtattttcagagagtaaaacttgagcagctccagaccaagccacccgccaactcctagcccactaatatttctgtgtacgagtgaaagaagagcaaaatattcaactcagttaataatccctgcaaagttgcaggtgaaactgatcaggaagttaagaataactgaagaattacaaagcgacaatggacgaatccctgcaaaggactccatgccatggccgttgttcaccaccgcggccacaggggtcaccgccctgagatgtccacccagaaagctgccatggagaatccaatgttcgatataattcccaaagccctaaagctgtagaacaaccagaaacaacagaaaattaaacataaggcagcgaagtcatacacaaacatgaagacggcatgacacgcaggaattgaacaaaggtaactacgatacggtcacaatagcatgcacactcttgttgtggcacacaatcacatacatcgatgtggacaggatcagatcagaaccaacacgaacactaataccaaatgggagcaagcatagatattcatcatgagactgtgcaaactactgcacacgcactgggcaaactcatgctcgcgcaatcaccgaatcacgagtacgcgtgcggcgtgcgcgcgatggctagctgcgccgtcaaaccagcacagacccagccctcgcaagcaagcgcgcgagctcggagtagaggcatcaaacggtaactgctcgatcgctacagattaggggttgagtagactcaccatcggaggggtcggtgaaccctgatacgggggcgaacgcggcgcacagcaccgccgcggcgaggaggaggcgaggcagcgccgccgccgccattccgatgcctccgcggctcagcgcgccccctcccccccaaaatccagcgccgccgccgatcgccacgaaatccagaccaaatcgagcgatccgcgcacgaaatcgccgacgacgccaaccggaacgttctcgaactttcccaaaaccccccgcgctcgcgcgcttgctcccgacgccgccgctcccccagatccgcgcgcccccggccgtctcccgatcgggccgagcaatccgcccgcgaattggaggaacccaccggttgggggggaggatcgaatctccccgagcggccggccggagaagccacggggattcgcgaggagggtttagggtttttcaaaagtttgggaggattctcgctttgggagggaagaagcatggggtggggaggaggagagggcggtcacgtgaggggcgcgtgagaggccgttacggcggcgggaaatggaggagagaacgaggaactattttggggagcagcaaaattcttccggaatcaaaaacatctctatctgaataatttggtttctcgttcagatttcgaaaaacagaagttacaaaatctagaaaatcaacgaaaagtaaaaggcttgtttttcctcgtttagattctcacaatatgatgaattgccaccagctacttttagaatctaaaaatttcttccatcagaaaaaaaaatgaatctaaaaatttcctaaacgaattatgagaggtttgttataggaacttccggctgttacagaaacttcggctgtgttctgcccataagctttcaactcatcatcctccctcgtttatcgtgtgcatgttttttaaattgttaaacggtgtgtgttttataaaatgtttttataaaaaagttgtttttaaagatcatgttaatctaatttttttagttttgtatagctttttttttgcggggatagttttgtatagctagtacttaataaatcctaagttaacctattgtctcatgtatactttgtatcaaattatcaattgttgtttagtctaatatatgttataactaggataaagaaaatgtaattggagttcacatttgccatgtgcttgtgaaatttgtttatttaaggtgcttgcaaaatcatatttatcaatgtacgtcaaacattcgagccatgaatactagttgtgtccaaataaagggcagataattgatgtcatggcatggaaggttattggcggttttatgtcgcgacacattgtggatatgctgcactattaacagatgattatacgcttcgacatatagaaaaaggataaatataaaaccaatgatgccatgtgtttgtcttttctaattgaatattattggacaattaatgagaaaggcgtgtccgagatataagggtaaccacaatatttatttaccaacttgatagtaacgtgggtctcaatatccgacaatagttgttattagcaggtttcataatgtttagtgctgaagtggtaattaagatggggttcacatttaatgctacttgagaagattgttatgcatacacgagcaaatagtatattttaatggtttattgctagtagtaagcatactactcggttataactaccatctctaccacaatgtatcttaccaggtaagaagctagcattaattgcttattacccattttatcctcatattgtggttactctaacaacaccaaatggttttgtccaagaataaatctacagtgcgtggctttactatatatactttacctttaccaatctatatcatcatggtaactcaccttttatccaagctgctagggatatcaaaagcatcagcaaagatgcgatagggtgcataggtgttgattctaggattacgggtctgcttattttcactcggctatatatttatcgaagctaatggttatgaggttaaagtgacggcattagcgagacgcgacacgtggcaacgataatctgtatttagtaaaattgggtgtcggtatggattgtctttttgacaatattattatccggtgctttctttaaaggtggagtcatctaatattagaactttgcagtggagtgaaaaaaccatttctggattttctactttattcttaggggcaattgtattcttgcccctactttcatttgcaattgtgattttacccttactttttaaactttgtgattttgccctcactttttgacgttgaatggtctgtttgcccctggtttaaacgtctgttaggtggactcagattaaatgagtttaagaaaataagaaattgacttgcaaaatgtaaaaagacatctctatcccaaacctttcaacctaagccactgctgactcctccgtccccgattcctaaccctcgcgagcggtggcggcacacgcgggcaagcgagagcgaggagcgcgcggtcgtcgcggaggagcgcggggtgaagcaggctgggccggcgccaaatggcgatgtcaagctgagctagcccgtcgccgtccgccgtggtggtcactgggctcgtcggcatcggcctcggctatagtacccgaaccgctgcacagcagatgatcgagtacatacgtactgttgcatatgcgtagctagctaggctgccttgccaccattagcatggccgcgaggagctcgcctgaggcatgatggtgacaaggaggagaagaacagcaaggagaggaggagaggaacatttgagttttattgtcttttactttttcttctttgtcactccccctttagtttttatttttcttactgccttggactattggttggttcctaaactggacaggaccaacaaagctattctgttgttgaaagaaagagatgagagtagtgtttcttgtttgcatattcataaatcccttgactgttaaaatgattaaacatgcagggcaagttcatacgtcaggcattgaggcattgaattcatacctcagtccatagtgtttcttaattaataaatcccttgattttttttaaacatatgctggagaatcgcatttcttgtgtagttacaaagttggatttcgttgttaaaataattaagcatgcagggcaagttcatacctccgttttctactgtaatcgtgaaacacagccaaaacacaaagtcctcacaagccaaatctgcaagggcatagatgtccttttacctgtcagttaacaccattaaagtcctcctgacggaacaggggcatacctgagcttcagttcaaaatagtgagggtaaaatcacaaagttaaaaatacaagggtaaaatcacaattgcagttgtaaatagggacaagaacacaattacctcttattcttatgattgtatcgggtcgacatgctccacccaatggaggtaagtaaggaaagtaagctccctccagttataatgccctgcaaatttagcaacatattagtgctattgttaagatgtaccaaaaataaaatacaaccatttgtgggcaagagaaaacagataacattagcagagcaaaaaatggcatcccatttcactgcagtaaaaaaaaaaacagagagaaacggaatagcagaggctactacagggcaccgcacagtgcagcggccagcagtgcagtacaccactgcagagtgcagacgaaggcaagcgtggctgcaaccgcaagcagcaaaagcaaaaccccggaagcttcccccaaaatctctctctccctctccccactataaatcctcccctctcgtcgatcgccatggctcccatgctctcgatcgcctcccgctcgccctcgccggcgttgattgcacctcacgcctccgcccgcgccaccggtcttcgtgctccgttcgccggcaaccgcattgtggggtgggggtggggggatcaaaccaaatcaggtacggatcgtaatcgcgcatcgatctgtgtcgtcctgttcctgcgcgtccgctccggcgagcccacgcaggcgccgcgggatccccctgctgcggtaggcggcggcggctgctacgtccggctgccggcgccgccgcgagaccgggacgcggttttggtaagcacgatccatttctttctcccccgaattccgacccgctcgtttggttgattggtttcgattcggtcgtgcggcctcgggtcacgtacatttacttctactacgagcaagcctaataatacagccgacttgttggttataaggttctgtgtagcattctctcagcctacccatataatagttagctccttacaattaatacagggctcacatgtctctctcgtagagtttcttggttcctgtgtctaagccggctgtaagtttatagcccgcttctcctctctctcctctcttttctcctccacctcaatatttaaccggcttatagtctactattatacttgctctactacgaccatagcagtacaagcgtgcagttttggagtttattaaactttaaagttggagtagttgtactactatccgaaacgtaattagtaagcgcaagtcaattctactatcggacaagtaattacgtttcggttagtagttttttaatatatctctcgtttaatgcgagtagcggcttataagacaaagacatgtgtacaagcggcgataaataactatagactatagagtatggaccttatatttctactagctaaataatcatgcttttatacggattaaaacaaattaaggtttttgggacaatttcattctagatgaaataagatagaatcatatgtagaaggattattttataacattaaagcatgtagagtaattggaagaaaacatgatggggtagtcggtaaataaaaaaaaacttggtgaggtggcaacattgctctcttttataaggagtatagattcttagcggcccaaaactaaagttaaaaatggaaaattacgaaaaccttaaattaattatatatctcatgggatttaaatttggttgctgcttataagccaacgagggtctaggaaccgataaaatttgtaaaaccaaagggcgataaataaatctcagggatacgaacacatatgcttcagccagtgcccggtggatagaaaggctatacataggaaagggaaaagagacttgcaaaaatactattgttctagtagaaagtttcatgttggtaattaatttaactttttttttgatcaaagggccttaaccctccatttccattaaaagaaatgtcacagtttacagcagaaaaaaaaaacagacttaatttaacatttgtctcagttcttcagcaattgaaagttgtttcgtctggagttgggataattttactagttttacaaaggattattctgtgggacttgaatatattaacttgcggttttgagtttgtgccgtgtgatgtcgattgaagtgtggattggtcctttctttcttgaatatgttgccatctgcttttgaaatgttggcactcttgacaaattgacaaagaaaatattaggcttgtttgctaatcatttcttattttcttgtagttgtatgtagtcgacggttccagaaaactgagtagctgacaggtgctgcctttttcttgttgcaggatttatttctcaaagactaccatttcagattactgaagttgggcgatctgcataactagcacggtgccacggtttttgagaagaagaacgagcaatggttcgacaggtacctggtttaagttctttctttcagctgtttgcctggacacttcattgcattgggtcgatgttctgggctgtcaagaactctgctgcctgaacaatgatgttttttttgtttatctagttagtttgcatgtgaaaatatcattagtttattcatatttatattgaatttttattagacatatttactgcatttctttagctttgctattacatttacttcatttgttgagcagatatgcataagctagattcttctatctaaaaatatgtataagctggacagcccccaaatacatagccttgagtagaaaacaatactatatctcaaaatataagattcatagtatcagctatgcctataccatacacatcaaattcactgtatcataaaaaacgagatttggagggagaggcgttcctccaacaattaaataagaaattgtgagcgtgttggggattgaacacgggattttggggttaaaaccacacatcccttgcgctgcattatcaagtgcatctcaaattcactgtatcatagtctacctgtaattgctgagcatttgcaaattagaaccttgaacataagtcaagtgttataattctttccttcagctgttggtattgttattgattttgttacctgaataacgatgcctttcattgtaactctccctttcctttttccagtatcacgtttgcttgttcactctacttctctgcttcatccctatcactgctttggcggaatccgatatcaagaatttatttgctctgaggaaagcaatcgctgttggaaaaggcttcctccacaactggtttgagctagaaactcctccatgcaactggtcaggtatatcatgcgtggggcttactgttgtggccatagacctgtcatctacgccactctacgtcgattttccatcacagatcattgcattccagtcactcgttcggctcaatgtaagcgggtgcgggttttccggtgagcttccagaagccatggtgaatctgcagcatctccagcacctagatttgagtgataatcagcttggtggccctctacctgcctcattatttgacttgaagatgctgaaagttatggtgcttgacaacaacatgttctctggacaactaagccctgccattgctcaccttcagcagctcaccgtgctatccatatccacgaattccttctctggaggcctccctccagagctaggcagtctgaagaacctggagtacctcgacattcacacaaatgcatttagtggatcaataccggcatctttcagtaatctatctcggctcttgtaccttgatgcaaacaataacaatctcaccggatcaatattcccgggaataagagcgttagtcaaccttgtcaagctcgatttatcgtcaaatggtttggtgggggcaatccccaaggagctttgtcaactgaaaaatctgcaaagtttaatcctatcagacaatgagttaactggaagcatcccagaagagattggtaatctgaagcagcttgaagtactcaatctcctcaaatgcaatctcatggacaccgtccctttgtcgatcggcaatctcgaaatcttggaagggctttatatatcattcaacagcttcagtggtgagcttccagcatctgttggtgagctacgcaatctgaggcagctgatggcgaagagtgcagggttcactgggagcataccgaaagaactcggcaattgcaagaagcttactactctagttctgtccggcaataacttcactggcactatacctgaagaacttgcagatttagttgccgttgtcttgtttgatgtggaaggaaacagactctcaggccacattcctgattggattcagaactggagtaatgtttcatctatatcgcttgcgcagaacatgttcgacggacctctaccgggtcttccattacatctggttagtttctctgcagaatccaaccggctgtcaggatctatccctgccaagatatgtcaaggcacctttctgcagatacttagattgaatgataacaatctgaccgggagtatcgatgagacatttaagggatgcaagaaccttactgagctaagcttgctagataaccatctccacggagagataccagaatacttagctttgctaccactggtgtcacttgatttgtcacataacaatttcacagggatgatccctgacaggttatgggaatcatcaaccatcttggacatctctctcagtgataaccagctaactggcatgatcacagagagcattggtaagctcttgagcttgcaatcgttgagcatcgacagaaactacttgcaaggacctctccctcgatcgatcggcgctctaaggaatctgacagcactgtctctcagtggcaacatgctatctgaggacattccaatacagctcttcaactgcagaaaccttgtcacattggacttgagctgtaacaatctgacagggcacatccccaaggccatatctcacttgacaaagctcaacaccttggtcctgtcccggaatcggctgtcaggcgctatcccttctgagctatgcgtggctttctcgcgcgagtcccattctgaattggagtacgtgcaacacattggattgattgatctgtcgcggaacagattgactggtcacatcccgagagcaatcaacaattgttctatactggtagagctacacctgcaagacaacttgttaagtggcactatacctgtggaacttgctgagctgagaaacataacaaccattgatctatcttccaatgcattggttggacctgtccttccatggcctgtaccattggcaagcctccaaggccttcttctgtctaacaacagactcagtggctccattccttctggcattggcaacattcttccccagatcacaatgctggacttatcgggtaacgcgcttaccggcactcttccattggatctactctgcaaagagagcctaaaccacctggatgtcagtgacaacaacatctctggacaaatcccattttcctgtcatgaggacaaagaatccccaatcccactgatcttcttcaatgcaagcagcaaccatttctcagggagcctggatgaatcgatctccaacttcacaaagctgacctatcttgatctccacaacaacagcctcactggaagattgccatcagcaatagcaagggtcacttctttgtactatcttgacctatcaagcaatgatttcagtggcaccatcccttgtggtatctgcggtatgtttggcctgaccttcgcaaacttctccggtaaccgcgacggtggcactttcaccttggcagattgtgctgctgaagaaggcggggtttgcgccgctaaccgtgtcgatcgaaagatgccggatcatccgttccatgtactggaagcaaccatttgttgcattgcaacggccattgtcattgtgctggtggtgatcctggtggtttatctgagacgacggaggaagatgttgagaaggaggcagtttgtccttgtccctgccggtgacaacgccatggctgaccatgagacaaccttgagtaacaatcttttggggaggaggaggatgaagaagagggagccaccgagcatcaacctcgcgacgttcgagcacgcgcctgtgagggtcaccgtggacgagatcatgagagccaccgggaatttcgacgggatgcacgtcgtcggcgacggcggcttcggcaccgtgtacagggcggagctccccggcggccggagggtcgccgtcaagaggctccacggcgtcggccgccggttccagggcggcgaacgcgagttccgcgccgagatggagaccgtcggcaaggtgaggcaccccaacctcgtccccctcctcggctactgcgccgccggcgacgagcggttcctcgtctacgagtacatggagcacggcagcctggaggaccggctgcgcggcggcggcggcgcggcgctcgggtggccggagcggctcacgatctgcggcggcgccgcccgcgggctcgcgttcctgcaccacggcttcgtgccgcacgtcatccaccgcgacgtcaagtccagcaacgtcctcctaggcgagggcctccagccgcgggtgtccgacttcggcctcgcgcggatcatcagcgcgtgcgagacccacgtcagcaccgtcctcgccggcacgctcggctacatcccgccggagtacgcgctggcgatgcggtgcaccgccaagggcgacgtgtacagcttcggcgtcgtcatgctggagctgctcacggggcggccgccgacgtggtcgtcggcggaggtgacggcggagggtgacgacgagcgcggcggcggcgggagcctcgtcgggtgggtgcggtggatggcggcgcgcgggcgtggcggcgaggtgttcgacgcttgcctgccggtgtccggcgcggagcgggagcagatggcgcgggtgctcgacgtcgcccgcgactgcaccgccgacgagccgtggaggaggccgaccatggcggaggtggccaggagggtgggggcgatcgaggcgatggagtacgggcctctggtggtggcagtgtccagtggcgagccgccggcgatgccatgatcttgctgctgctatactgtatactgtagtgcatcatgctcctttttgtgaattaaggtgttttgatctcatcttatatgcggacacagagatgcagcagaaactcaattttttaacaagttcatacctcacaggcatttcatcaaacacctgttatgcgtgcaaccaacccgctcattataacctcatctttttttttaatgcttatccttataagttaatatttaaaattttcaaccttaaatttgaatttcattttaggttttttcatcgatgtttacatcagttgcacttgcagcacaaccaaacaatttggcggtgtttcatgcaaaacaaggtgataatattaattgagttttagttattacaaacttaaaaaatggattaatctaatattttagaacaactcttatatagaaagttttcgtacgaaacgcaccgtttagcagtttgaaaattgtgccacgagtatttaaattttcatccacttgttatagaataaactaacgggaccaaatgtaattccatccatcccacctgcggtttctcccatctacaagggctaaccttctgagcgcgctccatctctctctctcataacagacaactttcattatccagattggaaaccaagcccaacagcacaaacacaaagtcttaatactccgtacaagaacaagaacataacacgacttcattgggaataagcgaaacgacatatttgtaaacgaaaaataatttacgaataaaactttcatatatgtgatcttagcgatataaaagcaaagactgaaaaataaacttcgttgaaataacccaaaatcaaatctaaatttaaggttgaaaaattaaatttaggctgataaacataagcataagcgaaaatatgagaccgcacgaaccttctaccttctcttgacagtcttttatcatgctataatgcaccacatgtaccccttatgccaaaattagctctaaaattatatttagtgatttaaagtttgaatgccactgacaagccaacaagtaaactacagagcaaattaatatggtgcaatctgtcatcttccaatgttgacatcctcttgcttggctagtaaccacgttttagggcttggtccggagagcttaaaattatgggaagcagctagttggtagcttctgagaatctacaaaacttgggttttccaacttatgacttatagttcattttctaaattttacaattacaacttttcaaaatctaaaccaaaagctagactgcttggggagcttctgattatagaagaagctgcagcagcttgaaattgcctccaccttgacagctcggttctgctaaaagaccgctcctgcaatcgaaccaataaaaaaccggtgaacatgccagtttttccttgaaccagtggcgggtatttaagtatcgaaccggtttttatttttcctatggcattatgacaggatgaatttattatgttaccacatcacatttattttttttaatgttatgaccatgtaataataaatataatggtttatttatgcatattttcaccaatttgtgatggttatatattaaaaataatacaaattaaatgtaatattaataaataaaaaaccagcggtcgaaccgttgacccggtggttcgtccggtgaaccaatggctagagcggatcgaccctcggaccggtttttttactatgcctcaaacatgttcttagaaaccaaagaaacactacttgtatacaatgacaatccctcgattccgatgtatagctggacaataacgactctttttattcaccatggtttggaacgaaaactttggttcgaaccaaagcatctcggaatataattccgtttttttatgttccgaaatccgaatgggaccgaatcaccgcgagttctgacgcaactgataagtgataaccaaccaaccaaccaaccaaatgtttgaaccaaaatcgggaagcccggcaaaatcctcccaaattcggcaaattcccagacctcgtgccctacctcaaaatagcgagcgggaatcaaaaccacacctgaattctcaaaccacaacacacacacacaaacagttggtccatagccctatactcactgacatgtggaccccacttaaataaaccccacgagcccactgaagtactgaaccagacgcgtaggagtactctcaaacacaacccgcacgcccgtcgtcccgctcactgacatacgggccccacgaagctctagaaaaaaaatccctagccaccgacctccactccaccttccccacagccactgacaagctggccccacccaaaagcgaaattaatctcccccgagccgcaaggattctcctcgggaaggcaggggctttcaaatccgcgcctcccctctcctcctccgccggctgcttcccccccacgaaatttcgcccaaaattttccctctcgcgctcgcgctcgcttcgccgatcggggctcgagtcgaggccgccggggcgagcgcgttggggattcggagatctggggggaggggattagggtttgggagcgccaggtcggtccccgatggcggagggcagcagcggcggcggcgggaggcagcagcagcagggggttgcggagcggcggctgctccggtcgcggtacctcgccgtgaagaatctcatcagcggtagggggctcgccgtgggggtggggtttggtttggttttgggtgtgcgggggtgtgtgatttgagctgtttgtgctgtgtgttttgtccgccgcagatgagaaggatgacatggcgagggcgggctccgacacgttcgccgccatcatcacgcaggtggactgcctgcacgagctcggtatacgaaatcctccccccctttcgcctttgctaaaccgtgtgtttttctgcagtttgatgtggttatccttgccttggactcgctgtttccgatttgtattgcatttgagtcacagattagaaagacatcgtgatatttgaaccttatgcttaggctgttagtactagctgctgaagtggctgctggagcacttgttgcaggttcagaaaaaagaagaaggcatattagcaagttgttcatctgcattgtatgtgtagtgaatctcagcaggatctcaaaacattggttggtcttcagataactgatatagcattattgcgaactacttctggtttattctactgttgacattttacttcaaattgctactcgaacatcagagcatcagcatgattgcatttagtttcgttggttgttctcccatgctaatgttgatgtaattactcagttcctatcttctacaagaccaatgctttgtaatttgcctgcatgattgcatttcttggcaaaacttggtgtttattgccatgttaatattagaagttcagaactcactgtcgcattccaaaattagtactagtacttcgaatagctgcttatgatatattttactggtttggatcatttaagcataagtgctatatgaagtacacaaaatgatggcatccttctacaatgcagtgcagaggcctagggagcaaatagctgatgcagaaactctgttggacattgcaaacactttggtaacatccgttaggtctcagtcaagtgaaggaatcactccctctgatttcgtaacagccatgctgaagaaatttgggcaatcagggggccttgattctgaggctgcctcattgcgctggggggatgttgggctttctgtgtcccatgtcttcagggctgcacctggatgctgcactatgtaatgaagctctcttccgtctttatatatgcgcatcatttcttgctttctataattctatccgcctggcaaatgacttaaacaactcaaatctgaatctttacaggcttggacccatgaatacagaagtaaaacaacggaaggctgtggttgccaatagaaaacggactgcgaggccaacggaaaatgctcgtcctgaacaggtagccaactaggcaactagccatatgctattctatattacaaagggtatgatagataccaacaaaaccataatagccatctgtgcatttctttcatcatggtattcattttttccctccattagtctctgaggtagttaacaggtctggtgctattgttcatgccataacaggtctggtgctattgttcatgtcattagctggaacttaacatatctatcttactgattccattttgtaattgtattgcttacatgttcaaaaccatagaacgtttctttaaaggaacatctggaacagaaacatttatattccttgtccactatcaagtttcttgtccgtgcatctggcagactgatcttttttacggcaatttattttgtttatacctggatgcaatcactgggcttgtatactgttccatggcttactctgaatagcacattgatatgatgctaccttgtatgcagcttgctgaatctttggagggagtaaagacagacactgataggaatgtgtctgtcatatttgatatcctgaggaggaataaaagggcaaggctggagaacattgttttgaacaggcgttcttttgcccaaactgttgagaacgtttttgcactgtccttcctagttaaagatggcagggtggcaataaacatagatgacaacgggcatcatatagtctgtaagacccttttccgctgccctcatttgtttccttaaatgatatgacaagatgccgcttctttagtgacatgtctaagataattctattggtcctatgcagatcctagaaatgctcctgctgctagtgcgatagcctcaggagaagtctcctacagccattttgttttcagatttgatttcaaagactggaaggtatgttagtagttctttttgttgataaaccttcagatttttgactttgattaatcaacttcaactgtagaactgtacaaaattcaacttcaagatctgatatatagaattattcttaagttttaccaccccattttgggatactggttttctcaggagtgagtgccctttgtcttcatttatctgataccaatccattttgttgctgtacattaggcctaagctagagcttaagctaggaagaaaaatccttgtgttgatttttgttttggccagctcctctataaaatgacaatttttttcgcacgccttttctctttttatttacagttctgggcatcaactaatctacaattggccctcttttttgtcatccatttccagcttatgcaagaagtcgttccggacggggaagaactgatgccacacaggaaccccgagaacatcccctgcgccgaagatcatgaccaggctgatccaccggagctatgcgcgcaaagaacacctatcaggaagctcacccggaaccggggcctggtgatgcagcaggaccagatggtggtcgcggagacgcccgaggagaagcagccaacctccaagcggaggcgcctcttcagagaccaacaatcttgaagcgaaaccccccctgccctgctcgtcggctgctgtagtttttagcactttagcgtgtgcgcctacctgctctcgtgttgtatgtagagggagagatctattataagttataatagcccgctgtggttttgcctagtgtctgtacaacagtcgggcgacatagctcatctcgtgctagctcgtgtaacagcttagatgtaactaatgttcttcttttaactctattagaatttagatcaggcagcttcgatttttccaaagatcggtggaattgtactcttgtagtgtgacgaaagatcgctagaatttgctccttagaggaatgtagcaccagtggctgctgcaatccttccgaggttttacaaggagcaccagtggatacagcaatctttctggagtgctttgattgccaggtacgcaagttagccttgacccataattctgagctacgactaaaaagattatctaaccaacatggtaatagtttcacattgaggtagaaaaatgaaagtgaagacacattggggtagaaaaatgaaagtgaaaacacatcgaggtacgaggtagcagtttagcaacaggaagcgcagacagcagatcatccttgtttgggtagttccaacaatcaacgagactgctcactttgccagagaaacagtcacagtagcattaattttatgaaaagcatagtaatcatcaaccacagtaggctttaacatcgcaggagaaaagggataacataatcacataaccaggcgtacgagaaatagctcaaaaataaaatgcaataaagaatccagaggtaaaacaagacagcacataagcctaaacggtcagaaaattcagcatcagccctcaaagtttcgagttacaatgactaatcgctacaaaccacaatggatctcaagcagcagctgatttccgaagctcattttcaccatgggcaaaatggcacctgtcgccaaaagtgcacgaccctttggtgaagttctcgcacagcttggtcttgaagttgcttccggggcctcccccgcggtgggatcctcccacaggtttcttgccttgtggaggggcaccgccaccgatgctgacaatcagctccctcaccattgcactagcgttcttgatctgatcaaatgtgccctcaagctcaatgtttttcaagttggtgtctgattcatgatcacggatggccagcttggcccctgtgactctggatatctgctttgtgttaaccccacccctcccgattatgccacctgcaagagatgcatcaacactgatcttggctgtggccgaagcgccaaagcttgctggagtggacatggcagggctaggcattggtggaggtgcaaagtgaccagtgggccttggtcccattgggggaggcattgagctatccatcaacataggcttgccgagctccctctcaccgtgcgcaaagtggcacttatccccccatttgcatccctctgcagtgttatacttgttgcacaggcgagtcttaacagtgggtgttggtggcccatcaggaacagcatttcccattggcattcttcctggaggcggcgcaatagctggaccaccaagattggtcatctttgcaacagcttggtagccaccagggaagtggtggaggaagtggcaaccctcaccaaaggggcaaccagaggtactgcacaataagaatatcatgagtgcaagcaaaaagatgctgcaaataatgtcctaattgaagaactacaccaaaagatttcattgtaaatgcaactgatgtttacttggaagattctaatatgtgaactttaataggtcaacatctcataaacaatgattggaaatgatattaacaagtgaagaacaaatgttaagatgcagtatggactggaggagatttctggaaccaccaccacatttaaaaacaacatggcagtaaactacattctaaatgttgagcttgacaatgggtgctaataagagatgtagaccatatgcacaaattttggtaatgactcataacatcataagcttgatagaaaataatttcaggagcaactatttacggaagtatagattcaaaccatacagtagtaaaatttatccctgcatgtagcaaatgttaggataaatattatatgttacaaaggacataagtggcaggatttcaaaatgtgagttcagttgcagttcccaagtcatgtattcaatcttcttttctcaatttgagcagatgaagctgcatcatgatattactgacaggttgttcatctgacaaggagttacatatccttaattccttatactgttgcatctttcacaggttcaaagtgatttcgcgcaactgtgcgcattccaattttactccagtgagtgtttcttaagcttggattaggtacaacctgtatcacaatctttacttgattcatgtgttagcaacaatacaattcttttaggaaaaaaaacagaagcaaaattttaatgaaataaccatgcataataaatgttaccaggtggagttcattttaagttggattataacctgaaaaatttggtgcatggcttcgatttgcttcctacaccggtttgaaatgactccgattctgttgcatcaaattaattatgcgttccaagttaatagttgttgatttgctaatctttggtacacaagagaacattaatactccttttaactacttttacgttcctactgcaaaaacagtgcaaaaataccgcattaattgaagcagctactacactctttatcaactacccacagcttccctccaagtttttaaaacccataattaattcaaagtacgccttgaaatgaagaacacggagcaacgagaccaccagatctggtttaagcagaccaaccaatctgaaaaagaaaaacacatgccaactcggcgaatcttggaagaaaaactacaaaaacattagctcgcctttacgaaacgagagtcacatccgctcttagtctctctctctctctctctctttccaaacctacaaaccctagcagaataagcagcaaaagggcacgaatcggggaggctcctcgatctaactacgcagcgaggaaaccaaatctcgccgcggcgggagagagggggatgcgattcgggaagacgagagcaaaggtcgggcacgggaaaggggaggagagggttgcgactcacctcgcgcgcgcttcccgccggcgccgttcgcaccgtcgggcttgcccctcttgcggccgccgacttccatctctcggctcccccacacccgcgcccgcgctcgcgctcgcgcacgccgcctcggagctcggctagggtttccggctcgtcgcggcggcggcggcgggtagaaggcggaagggattgggtgggcgagaggaggtgagagatgtggagtttggaagagagtggtgtgatgtgttgggccgcgcgatgtggagtggagtggtgtggtgggctttgtgccttcgtggctggatcaaagcatcgccaactcactgttcttggaaaaagaatataaatgaactgcaccccaatcttgcaaattgaaataaaaatcattttctcggatttaaggtcccattcgtttccaatgaaattatttgagtgaataataagaagttagggcacaaataataaaaacatatattaatatgtgattagttaagttttagttattttaatattgcaatataaatttatttgatattttaaaataatttttatataaaagattttttttataaaacacacctttttacagtttaaaaaaattgctaacaaaaccggaacagaatattaccccctccgtatcctatgtatccaggttcattgctagaattgaattctttgtaggacagcagtaatcagatttattgttagaattatttttttttaggacagagtattaatcatcaatagaagtgaactgagcctgataacttcccagtgcaatcgaaaatcaatttctgggtttttttcttgacaacgttccacttattgccctatactgcataataattttgcaacaaaatgtcaaataacttaaaaaatactccacgttaaacacctttttattttgcaacaaaataatatcccacgtatggtcaattaacctcgtaaatcgaaaatctagggtttaagtctaatgaaagataacaatcggcctgtcgaaaagtctgatgggccaagcgtaacaaacggccctttaaaaatttaattgatgctttggttggggtgcaccaggcccgggcagcagtgcaacgactgggcgacgcgcgagggccccagtggctagccactgtggtgggccctccctcacaaaaaataaatttaacatcgaagtgggcacatggcccacatatcagatattaaactgataagaacagatactacacttgatcttagccaaaaggccgagaaaggtatgagttgctctcctgctctgggcctcctcttatacacgctcctccgccccgcctcgctcagaatccgcgaggtggtactaacattgagaacgaaaccgtatcagctcctccctctctcctgctgcgttgtttggttgggcccgcgtctcttggtgggccgcgcagaaatgggcttttcatagcccaaatcactctggattttacttatctttattttattttataagtagtttcatgtttgcatttttaagcgtggcgtgatccgtgttctgttcttcttgcggagcaagcctgcattccaatttttgcctgggccatccaaaattcagcaatttatttatctgtttctacttttgcacctgctgaaaattaaaactatttttaacaagctaattattgaccaatgacgtggctgaacagtcacaggccttcttcctccccgaagagacaccaaccacgcgatgataataatatattttatatattttattttagtcatggtcgtatctaatttgtcttcctgtttgcaatttgcaatgaggtgtcaactacctcattctagaagcaatttgaacccaaaccttttggaatcaatttgaccaaattttactatctttattgaccaaagtgtaaaacggagaatttttgagggggctaagtgcgaaaagtgcaggaaaaaaatgggcgattttttttttatttataggcgaggaacaatcgctcgctcggtcgccttccccttcttcctcctctccgggagcgctttgaacaatcgctctctctctctctccctccccgattcgattcaattcgcgacgcctccgtgaaattctccaaagcgtaagtgcatttcatctctcccggttgcgatcctgttcgccgtaggctgtaggattcctgggcgggtggttgtgtagatggatttttttatgtggaatttcggtgggttttttttctattggattttggttttctacgcgggggattacgaattgtggatccgttgtagtttcgagagatttaatttgctttttttaattattatttttttcggtttgggaggaattgtttggaatcgatgtggcgatctgttcctccgcgcgtgcgcgtggtggtgtttaattatttttttgcgggattttggttgattttgggatgtattatgttctgacgaaatcgtttacttcgttgtttgtttgcgcagcagcttgccctgtagccgcgtgctccggccatggcgttcttcaggggcctgaccgcggtgtcgaggcttcgatcccgcgtggtgagccatccaacatcttgcatgcctattttctggcgatgcgtttgcatttatgtgcgctgaaaaattgttcgttgctttgtgttgtcaggcacaggaggccaccacgcttggtggtgtgcgatggctgcagatgcagagcgcatctgatcttgtaagtcaattagtttttgttcgttcgtgctaaatgtgtggttgaaactaccagttactatgtgccatctgtggctaggctcgaaagtggggaatgtgctctgaaaaaagatgtttgattgtgtttctaaatattatatgcaggatctcaagtcccagctgcaggaattgattcctgaacaacaggtttgttactttctagcacgtctaataattcacacaaagttggaaagtatatggcatccagttctttatctaccctttttgctttactgctttagcctgtagtgatatcatcttcttgcttcatgcgatattgtgtgagggcatgcttgcaacttccaaatgttgtggattatctcttttttgtaaaagctgtgctggcgcatggaagcaaatgctgcatgaacattgcattacaccattgtttcagcaccttcagaaaccgctcatcacaaaatgtgtatattttgagcagccactagctttgtgttttctgcactattgaaaatgcattacaagattggcatatcaggttattgttttcttcacaagtttagttttgcaccaagcagtaatcacaatattcagaatctgtatcagagaagaccataattgcagctagttgcatgctcctatcattatgaggaagtcatcatggttgatataaaataacttcaccatttcactgtttacctaaaatccatatatgagttgcatgccctgtgctttgtctcaaccatccaagagtgccaaattcctgtcaaataccaggaaagaaaagctcaactcactttaccattctgttacaggaccgcttaaagaaacttaaatcggagcatggaaaggtccaacttggaaatataacagtcgatatggtatgcttttggtattgattatttatggattgtttctcaagggtgtcctttattgattggtctaaaatcttaaatggtgtttatccaaggtccttggtgggatgagagggatgactggaatgctttgggaaacatcattgcttgacccggatgaggtatgcttgtaaactataatgctacgataccataatggcataatatagaagcaaatttggatattttgtctatgtatatcttgaaattggaatgtgcaaaagttggaaaataaaatagatgaatgatgaatcaccatattttcatgatctccaagcaagtgtactaacagttgagcatgatccgttcagtgcacagtaggaatgacacaatgattgctcatatttgtcaatctgaatcaagttctgtaatcaactttagcacattgatttaaaagaggtacagggactaaatagtctagatttctatagtcattatgtaggaatgtgcttcattacaagagtttgatgcttttatgatttattttttaggatggcggcttttctgcagattttaagttagatttttagcttagtttgactttgtgaaatttaaacgtgcatcactctatatcttgctgttggatgtaagtctgtacctctttcctatccagggtattcgttttaggggtctctcgattccagagtgccagaaagtgctgccgacagcagttaaagatggggagcctttgcctgagggtctactttggcttcttttgaccggaaaggtttggcttcttttgtttaactgtttttcttgtaaacttggttttcctgttcttatttttgtcggcatttagctgctagtgtggactgataggtatttgtttgtttcaggtgccaaccaaagagcaagttgatgctctatcaaaggaattggctagtcgttcgagtgttccaggtctgcaattgtctcttctggtttattgcattattgtttgctcaattagtaaaaaaacctagatgagttttatgtcattatcttatttcccttttcttagaagataaaaaatatagtcacggatacatacagagattatggagtttttgttcctacgaagctttattctgcaagtaccataaacacaccaagtttcttgtataatgttcccccagatggttctttagttagtcaatttgaaaataaattgaagctactgcattatgaatttctgatagtaatctgagcttttaaggttaaactcttcaattgcctgaaaatatgaaatgttgttaacttaagcctatattcttaagtgtatttgatttattattatttttttttgctgggcaagtgtagttgaaatttgaaaggcaactgtagaaagttttttttttgggactgttccatgatgttctctattgacttcagttttcttaatcctgcctttgataatgatatagctcatttaagtattcatctgtgataagttgatttgagtttttgtatactcaatcattggaaaaatatgtctcagggctgcattacaaatttgtgcttctgtaaacatacggcatgttacccacttacctacttggcacttattcgattgacttatgatacggatgcaggtcatgtgtatgaggcaatcgatgctcttcctgtaactgctcatccgatgacccagtttaccacaggagtgatggcacttcaggtaaaccttgtagcatatatcactcatctgaaataaatacatattctgttgccacttatttgaaggtatatttattttggagatggtgcatgtaaaaaagacaatcatttaaaaaaaatccattgataaaaccctcttattttgctgtttgtaattctttctaggtctccacacttaattaatttgccttttctattttaattcttatttgcaggtggagagtgagtttcaaaaagcctatgacaaaggaatgtcaaaatcaaagtatgcttgggatttatactgcctccaaaattgcattagttgttgaatggattttccatgtactgacctggtgctattttaataggttctgggagcctacctatgaagattgcttaaatttgatagctcgccttccagcagtggcttcatatgtttaccggaggtagctttttatcaattcattcaccatctttacttaccaggcaatctgtaaaaattttcaactgcaatagcaataatgccgttttctggttctctgaaggatattcaagggagggaaaactatagcagctgataatgcactggattatgcagcaaatttttcacacatgcttgggtttgatgatcccaaaatgcttgagttgatgcgactatatataacaatccacacgtaattcattccatccttgttttagtttctatttatttctaaaagacttggtttgatttctttttcctttcacctgtgttcttccagtgatcatgaaggtggaaacgtcagtgctcatactggacatctggtaatttttgtatttctggtttcaatgcagtttttttcttgttagcattgccactattgttgtaaacctgccaatggatcatttctggctgctacatcatccttgtgcctttttacatatgttacacttttggcatgcactattgcactggatgccactttaagcctttgatttgctttgctgttattactatgtatcggagatatattaataagcactgataaaccaaactagccattttaaggaatatgaactaggaacaaaactaaaacttaaactgcttttagctgagttcttcattactttaactgttatcttgaaggatcatctgcttagtactcatggagtcattagtcttacattttattgtctaatagcatcaaagctatgactgaaaatatgtatctatttctgctagatagctattgtatgtctaggaaaatcctggtgtatcagtatggccttttaatgcattaggaaaggtaatataattggttgcgctgtgatccttgatccagttagctgaatctctatcttcaaggtagaagtggtaatgatagtacaaggtagcctcttaatttgccgcagaaaaccttgcaatccgttatctttaggatttatcacttatgatctatgacttattttcttttgctggcaatggcctctctctctctctctctcatgactcatctatgggcactgacctcttcattccgtgctcatgatattcaattacagggttggaagtgctctgtca

SEQ ID NO: 9142 - DNA, 2700 bp, Oryza sativa
acgtgagctagccagtgacccagtgaagccaacacccattacttgtagacctgagcatatccacgtcgatttacttcaattcgcgtaacggatagatgatgctgagtgggaactgcaaactcttgtgtagacggcccacatacctgtccagaaagcttgagggcgcggttgaacgcggccaatgccatgtcctctgcggcctgcttgctggtgaactgcaagggcatctgaacaatgaagcattatcagtacaacagtatgtctgcacagaagataccagcttctgaacaatccaccgaattggctcacgcgctcaaagcgtgctcacaagatgggttcaaaacaagttcaaattcgggattactcggagggggagccgaggaattaccttgccgagcagctgcgccatggaggccatggagtagggcacgacgacctcgaggacggtgccggacgcgccgggcacggacagcagccacccgagcgcctgcggcgaatgcgcgctttgctttagtctaggcgccaaacagtactaccatatcggatcgaatctgccggcgaatcacggcgcggcggcgcgcaagtggggggcagcggcgaggcgaaggggggttacctgcgaggcgccgccggcgaggtagatgacggcctgggcgcgagatgagtggatagcctccaccaccgcgcggacccagctctccatcgcgcagccgcgagaagaagctaccagacgacggaggaatttgtccggttccctttacgcctctggccggctgaaccgtttgatcggtcttcccatcggacgattttgcccctgggcccactcgtcagatttaagagacagatagaggactccagaattcccagatcgatcgataaagcatttcccagcccgagcgggtcgcggcgacgagaagacgaaactgccccgtgcgccgccaacatctcccctctccggctaccgccgccaccgcgccgccgcgctcctcgctcctcgctccagggcttccggccatggccggcggcgacggtgaggaagcaaaccctaagcggcaccatccccggcaccggcgcccccccgttctgtcctatataccgcatctcccttacaccgttcccccctctcccctctgcaggcgatcgcgcccgcgcgccgaagcggcacaagtcctcggcgccgtcgaggtcgattgacgagaccgccgaactggactacaccgatgacgtcgatgacgacgtccgcgatggtaacaccgcgcgctcgaatccgccctaaactcaccgcccctcccccaatgtatgagggtttgcacggaacattgaactgattggggatttttgttttgtgggggttggaactttgattcggtgcagccgatagggaggtgaagaagagggacttcaccaagctagagctgaagccggatcacgcgaacaggccgctctgggcctgcgccgatggccgcatcttcctggagacgttttcgcccctatacaaacaagcctacgatttcttgatcgctattgcggagcctgtttgcaggtcaacttcagtcacctctagcctcaacattaaccttagtaccttaattgcatagtaggtttggactttcctgagactgaaattgcatccaccaagtggagtttagtccaaatctcaatatcttatacacttagaagccactaagttattgttaattctctcttatcttgtgaagtcacatcatctcaactgtttttagtttttttttcctttttgtggtttatcaaaggttcagattgtgctcaagcacaaagcaaaacctcctagctacaaaacaaaccacctcacatttcatgtttagcattttggtatgcaaatttcctgcagcattcatggggttccatctatgtggttgatttcccccaaaattagcatggtttcagcattcatgttggaataggcttgtttttgtcatgcagtgaaacagaagttgaatttagtgatattatcttcattgagagctgtggggatcatatcatattctgagggtttcactactttatcttttagggactttggtactgccatgtgattactcaatttgattttctgtgaaccacttggatataatttgtttagaataggttaatttgtttggaatttgaggggaaaaccaatggtttgtaatggaactaaccatgtattacttgaaaatggtgagcacagctatgtgataggcatatcattgtgccattagattgtttgaatagatttaatatgccccatgtggctatctagaacctagaaagtatactgacatatataagttgcaaccaagttgatgaccccagcatgacttcaagagagcataaccattccgttgttactgtcaaagtaaattctagccttctaggattctttagtttgagtgatgggatggtgggttaaggagattattagtcctttttttcttaagttaagatgggactgagtttgacctgaagtctttctgcaaaacaaaatgatgcctatactccgatggacgagatgatcaaattggtcgtcttttttatttgaacttcttttgaaatactacctccgttttttaatagatgacgccgttgactttttctcacatgtttgaccattcgtcttattcaaaaaatttacggaattataatttaatttggtaagaggtggtttatcactcataggac

SEQ ID NO: 9143 - DNA, 7602 bp, Oryza sativa
accccatagtacgcctttcatttacttattaagttgccaaaaattaaactacacaggtagcatattttacctggattttacaacatcgatgtttgttcgccttttctttttaaggtatcatcttaagttacttagatgaaaatctagtcatgtttccaatgacagtgccggacaaatattttggagtgtctagcgttttatgctattatcttggtttttaaggtactagaaaaatatccgtgcattgcaacgggtgaactctactttaatcttattattgttatacggtatagctagggtgaaattcactgttgaaattcgtttggatattttttttagaaaattataggttacaattaggagtccgacttttatctcaagttagtatgtgagttttttaaaaagagatttattgtacgactccatttgtattttcaaaagcaatagaacttaaaatccgtttgtattttcaaaatcgaacaaacttaaaaaaccaacttaaatatggatgacttatcaaaataccggtaaaaatatcttcaatttttataatagtagagattatcttgcttttatttaagtgagttgctgtaaaaataacatcatgatatttcttggctgtttgcagagaccgaatataatttcatttctaacaaaattatttttattatctactccttctgtatctaaaaaaccaaactaatactagatatgacacatcatagtactgtaaatctggatatatctttatctagattcgttgtactagaatatgttacatctcgttctagatttgttttctgtgggatggaggggggtatagtggtggcggtagtgaatttgccacccccacctactctcatggtaattttttaatttagcgcttaaactctcttagtatcaaaatcaatcaaattttaatggatagtcacaaataaagtcaaattaagatgaatatttcttatagcaaaatgatttattgatactccctccgtcccaaaataagtgcagttttgtactattcgcgttcaacgtttgaccgttcgtcttatttgaaaaatttttatgattagtatttttattgctattatatgataaaacgtgaatagtattttatgtgtgactaaatatttttaaaattttcacaaatttttcaaataagacggacgatcaaacgttgggcacggatatccacggatgcacttattttgggacggaggttgtaggtaacatatttcatggagaatacatattttatttattttaagtaatattataagatatatttttttacttatagtaaaacatgcacatataactagtctaaaaaaatactactactattctttatctgttgcccatcaagaagacgcaccaagtctccggtttagaccccccaagtcttcccccccgcgcaacagcactccggttttagtaatgcatacgccgcagttttaaattgcctcattaactttgtagtggtaccttgcttcccccactggcacactacctagctggatcggggtatacatccaacagtggcatatatctggtgtgtgttgtgttgttttcagtttacacaggagtattaaaatcccacgagacgagaggagagatagcacagctaacacactcatcactagcagccgcgcgcgtgagagagaaactatggagagcggaggccgcgcatgcgccacgcaagttgcaacgtgcaagtcgccgctgcaattactctactggttcgtagcgagtccacttgcgcgcgtcgcggtcgcggcggccatatcgctcgcgccccggttgctgcttggctttggcattggcatacgcattctctctcaaagtacgcccgcgtcgcaacaaatctggccaaatttctcgcgctgttgttttcgcggcgcggcccgggccgcgggggtaccagcgggcgaacggcgtgtacggccaaaaagcacagcgcacacccacatcagaaattctaaggcaacttgcaggggtttggcacgcgccgacttatcaaccaccactactcagtactcaccatcgcgaacgttatctcttcgacgcggatcgaccggtttgtttaagatagaaccgatcgacgtgcaagggtgcagcactggagggggcaaccaaaatcgtttttttcatgcggctcagcgacccgcctggacccacaggtctacgaaaatcatcttttttcatacgtagagcccaaccgcatgtgaaaaacatgatttttatatgcggtaacctatatcaaccacatacaaaaatagttttagagaaaaataaaataaaataaaattccccaaaagaaatttagcataaatccaagatttccattctaccgaaaccctagctcctcatcgtcgttgcagcggccaccgccgcaacccacggtgccacttctaagggtgggggcagccggatccgcacaccaccaccgctcccgaggacgggggagtcagatcccctcacccccaaggctgcctccgcctccgctaaggccaccatcgccgctctctcggacgggtgcagctggatccgcgcgtcagcaccgcccgcacccgagaccgccttcgtcgctcactggcggcgcccacctgcgaggtcgtcacctctgtctcagccgttggaggtggagaagagatggggtaaagagaaggggaagagatgaggtggagtgggagaggaaggcgaagagaagcggttttggagaagaagagagaaaaaaaagagtgatacggtggagataaggaggagaaaaaaaaaggtgtgggagaaaaaatagtgcggggatgcgtagggcccacttgcttgctgctccaagttgccggcatgaaaaaatctatttaatttttcatacaatctcttaataagtctgtctaaaaaatagacttattttcgtacgtgatctcgatagtaaaagaaatatcgtttttataatagttccagtaaaccgcaacgtttagttctcgttgtttcgcacatcatttcatttttacctgtcgttgaggatataaacactatatcgatctaacatgtgccttgaccgttacctcttactaatttgtagtggtcgtacgtcaaggggtgagattaatgtccatccccggtgtcaaggtctagactttgtgttgtttcccactaatcttcattacgattacatatatacgcggcgtagttcagtgaacaaattaatgcattccacactccactagggattgggtatgccaccaacaagatgtgtgcgcgtagagcatatgatagtttgttactccctccgttttacaatataaattattttagcattttccatatttatattgatgttaataaatctagacatatataaatatatatgtttatatttattagcattaatatgaatgtgaaaaatactagaatgacttacattgtgaaacggaggaagtacgcatctagagtacgtttttatcgtagttagtacctcctccgtcccataatatatgggattttgaatttttgcttgcaacgtttgaccactcgtcttatttattttttttaaaaaaatattatttattttatttgtgacttactttattatctacagtactttaagcacaactttttgttttttatatttgcaaaaaaaaaattaaataagacgagtggtcaaacgttgcaatcgaaaactcaaaataccttatactgtgggacggagggagtaccttttgttggtagctaggttaatctatatcgttttaacacgagaaattcaaatatttctgcagctcagctggcctccgggttgttgaagtttgacaatacaaatgctaaaatggtactacctctatttcaagttataagactttctagcattgcttatattcatataaatattaataaatatatatacacatatatgtctagattcattattattattttatatatatatatatatatataaatatagataatactataaagtcttataatatgaaacagatgaagtatcatttttcttccctttcaatgtaggccatcgataatctccaatgaatgtattttattgttgttattcttcatcttatatctagcgccaaggaacaatgaaaacatgtatttaaaaaatatcaataaataaaggagtaaatttcactttacgctatgttattggccaaagttgcacaattgagtaggttgactcgttttttccatcgacgctaggaaccttgcaattcgttgggaaggagctcctacgttaccggatactcctcctaggccacgtatccatattggatacggctacagatacggatacgtattgcatacgccccgatacgtatcccatacgtatcggccatttttacgattttcagataataaaaaatatttccgatacttctccgatacgctgtaaccctaaaatcatcgatcaaaatccccagccaacacacagcgagcaaaaacccaccaacagcgccacctccccgaccccaactctgctcgcctcttcctcgcgtcatagcgcagcgccgccgccgccacgccgtgcagcaccgccgccctccgccgccgcaacgccgcacagcaccgccgccctccgccgccgtgccgcaccgccatccccttccgctgcgccgcgccgccgtcgccctccgcccccggccacagcgccgagcgccgccggccgcagcctccagggcgcagcaactccttcgtcgggctgccgactgtcaaccccagcctccgacgacgggctcaactgcttctctagaagactagaactcctacgtatagcacattatctatgggagagctacctgatgggcctgatctcctgtcagagtgctaaaagatttttggtgcattggacctgttcgatgatatggcactatcaatgatacaaacaccaattaaacttatttacctattgacagttgaacttgatatcctgactagttcatgccctgtaatgctatctcttttttctctatttatactcttgcagttatttatgttttctttctatattttttattttttaaatatatataaacgtatccccgtatcagtgttttctaggaaatgccgtatcctcgtatctccgtatcgcgtatccatatccccgtatcaagataacatagaggagctccatccccattgctctttgttgagtccgcgttgttgtcgtttgtggttatatccataacagcagagttagcaatcaaatctaacgtgcttctctctctagctatattatgcactgctactgaagatgcatgtaggaatcgtgcacggacgtacaacaatggctggacgctcagataatggcgatggcgctctgaccaagtgcgtgaaccaagaactgcatcatgatgaacattttagttttatttacaagtggaaaaataaaatctccagtgctggcaacgcacgtttatattaccattatggatacaattttgagatgatatcatcaaagtcggagctaaggaaagtaagacattttccaaccgaatgagagcctcattagttgctcatatttcataataaaccaaaacatctttatttgcagcaaattaaaagacaatactaaaaataaattacgttgaaaatatcttaaaatcaactttaaaatgaagttcaaaattcaaatcttgacttttgctttggcgtattaggctaactgatggggctctgagtgaaggagaaagagtggaacttgaaataatggatcagaaccctttaatgttatattagcattgattgaaacacaaattttaggggccctagtttttggaggcctatgccatctctttaccttgcacttatctagatgtgggcctatttatatttttaaaaatctaactatatgaaggttttttgcataatataatctttatatatatggggacaaagtatatttgaaaccaaagatagcactagggcatcatctttttcatgatttattactacatacaccattgctaccttggtcaccatacgcataactgatttcaattaattgtatatttgtgttcatggtttttactttccaaaagtttttccacgctaaatttgtgcctcagttcttttggcatcatgtaataaagctatacttttctttctgtcatatggtacaaaacatgtcccagtatacttttacatggtgtttccactttccagttccttgtttctatcacactcactaggaccaaagaattcccctgttgacgcaatatcccacctgattcctccaaaatttccagaaaagacgcatactagtccatgcatggcacaacagaacactccacaatgcacaggtcatcacacgcaatatatatccacccgaacagaataaaccatggatatttaagcaacactaatgcagccattgctttgatcaaagcaactgccaaagcaaacccaataaaaagaagaagaaaaaagaacacagaaaggggccaagtgtgacatggcgagctgcccccaagggcacattttccaggccaagccagctcacatcaccagagcaacaagaacaatctatcctccatctttatccagctaccagctctcgatgaagccatcccgcggtatccatgggctgagctgactgcccccacaaaccaacacttgccactccctccctcatctcccctgtgccgtgacgtcgttctatccaaagtccaacacaacagcagggcattttttatacggttccagccaccgaaaagaggaaaagataaaaaacacacacacacacacaccagaacaaaagtagtatagcaaaccatcagcttcctcctccttccctccacgcggacatggtatagccgtatagggggcgcagtatggtagcccccattgcccccatacacaaacacattccggcatctatcgcaagccaaaccacccacccacaccccccacccaccgctcctatatatccctcctcccccttcgtctccctcctctcctacttatcctacgcttgccgcctatagcatcgccaacagaaggaagcaagagatagttcgagtcgagttgagttgcatccgtccgtactggggtagaggagagtaggagtgtgctagtgtgtgaggtctactgaaatggacagctccagctgcctggtggatgataccaacagcggcggctcgtccacggacaagctgagggcgttggccgccgcggcggcggagacggcgccgctggagcgcatggggagcggggcgagcgcggtggtggacgcggccgagcctggcgcggaggcggactccgggtccgggggacgtgtgtgcggcggcggcggcggcggtgccggcggtgcgggagggaagctgccgtcgtccaagttcaagggcgtcgtgccgcagcccaacgggaggtggggcgcgcagatctacgagcggcaccagcgggtgtggctcggcacgttcgccggggaggacgacgccgcgcgcgcctacgacgtcgccgcgcagcgcttccgcggccgcgacgccgtcaccaacttccgcccgctcgccgaggccgacccggacgccgccgccgagcttcgcttcctcgccacgcgctccaaggccgaggtcgtcgacgggctgcagg

SEQ ID NO: 9144 - DNA, 6747 bp, Oryza sativa
cagcagtaaggaagagcctgcacaagaagaatggaattcggaatggttttattgtgccaattgggcatggcggtagcgagggaggtggcaaacgagaagctgtttccactcgtgagtatccttaattttccttgaagctttgattctagtatttgattatcttagtgctataatgtgaaaaaggttgatcactatctttgtgaatgacacctaggttaggtagtatttgattgcacttagaaaaagtgcaggatataaggtagctctaatcttcttatagtgttgttgtttttgttatgtctgtgtctaggcaaagcatttgagtgttcacttagggtcgcaatagagcaagtgtagtgtggcggaggtaccgatagaacaggatataccttcagttgatttgtgcaaaactgatgatttgataaaataatatttgccccaacacaaggagcaaagttgggaactatttttcaatatagtatattttttctttggtaaatcccatgtacatgccctttgtagcagaaaactacgggttcacaaatttcacataactacatggagcttgatagtactattaagtattaacacaaaaacacattgtttgatacaggatttgtgaaatttgatattttctgtattataactctcaagtttttctaacaattatataatactttctcagccccattggtggtttcatgagcaaaatgtttttttttaagaaactgataacaattgtttggtgtactactttgtatttaaggctaatatttgtaaaggatgaatggagctaaataattgtctctgcaacatgctgatattttttttaactctaacatatctggttgttaaagtccacttggattttgtttgcaaccttgtagttcaaactgctaccttattccttataatcatgatctgtacaattctatcgattgatcagtaacttttgatggagttaatgaggaataatgttagaattttctttctgacttttgtgcttttagctacttgtaggtgcagacataagttgcatggccaattactagggactgtaaaactataaatttaacaaagagtgcattatatatattttgtctatggctaattttacaacaaagcgaagaaagagaacatgaaaagaagggaaacccaactgtgtaaaaacctgtgatcatgttttctaacaactaaaatcgctgtttatcaaccactcacgacgacaccgagatcttcgacttagctcccacaggtcccaggctcgtcaccccgggaactcgcagcccatcacaactactcatactaggagccacctagctagaatagaaggaagaatctcgtaaatctagactatgatagtgtactcaacttgcagttttccaacagtattaaccatttgttaaactgccttcatcagaggatctagattcgatcacacaacccaatcatatcgcaatacattattctgaggtaatacttaccaatcgatgtttggtttctttcagttgtgtcaatttacaggcatgactaagaacaaacttacagtagaattgctgctatttttgggattagttggttagtttttactatgtgcatgtataggctatttgcttgcacagacttttcagctgcatttcactaaatcaactaatattagtccaaaattactctttcaggtaagctggcaactttgagagtaaaacagacttcagggagctatttctctttcttttcctcatgtagttctgaggatcatcataactcacaaggtgccgtagaagtgaaaaatgtagtgaaagttgtttcaatccgtcctctttccaaggacaagtttttggtccttgattcagctggattgttacatgtattcagtcttcaaaacaaagaattgctctcagaagctactagcaagagatatagtggaaatcacacacactgtttggataatgccatgaaagtgcagctatttgctgtctttccaagtagctctacaagtgagtttttcatcctggatttgttgtttttgcatcatggtggtttacttcattaataaatgtgttcagagtgcttgtgcagagacagaaattttggatttcggatggtgggcattccatacacataatgtcagcacttgatgttgaaccccccaacagtgataatggaggtggtgatggagaaagagaatcaacaaccattaagctcacaggtttgtgtcgtaggtccttttttttttgtaccttaggcctttatttgtcctacctgctattttcaatcattcgattattagctcaaccacatctttagaaactgctcagataggcaagtttctagaaatttctaatttatcatgtaggtttcatattttattaattgtttttttaaaaaaaaattattgacctgttgtgttacattataaagtcatcccaggccattaaaaactgagtagtgttgcctattaagtcatgcgtgttggttaagctttccccagttagcatagatgtgcatgtttaacatcatcaggcttgcaaagtaattgttttaaaaaaccagcataatgtatgaagccctctttttcccattgactaaggtagtgagcttgtttgtttgtttttatcaggccatgatctatcatttatgttgtaactctctttctgtcatgttttttatcttgtgttttcttgcagctattgaagcaatctttacaagtgaaaaggttcaggacattgtgcctatctccaaggattcagtccttatccttggtcaaggtaatattcaatgatatcttgaagattgacattctagattgccatgaatctggatagtttgcttatcttcttctaaacctcctcctaacatcataaatattgtgtttgcaggcaacatgtttttgtatggaacttcttgaattttgttgattatatcatatattcggtaaatctatctgaaaagcttgatgtcattttagtccctttttgctctcattggtttgcctgcaccaacccacacattatctttggtatcaggtgggagatgtgaatgtttgtctagatcatgaatttgcagtttcgatgggtttttggctgaagacagggtgagtttggtgactacaaattgctttcaattatttaaccacttagagtacgatacttatttcttaaattccccccttctcttccatgatgcagtgttggagattttgaagaatgcagttgttcacctgtctttgaagtcatgagtatcattagtctttaatttcagttagcagatgaaatactcgagacttcaacagccagcaagagttgaaaggtgcaggccgttctccatcttgtcaactgtctgaaagcaacattacaaaactataggtctttcagcacagttcacaagccacagcaacttctgaacaggtgaagccagattattcccagaatacaaccacccagttgtttttgcatacacattttgcgtgccaggacaactgcagttctggttgcgatatctggaagaagataaggctgcaatcctatgcccagctcagctgttgtggaacgtggatcatcatcaagtgggtcggttatgaagctacaggtttggtgctccacaaggaggttgatcagttcagagactggaccttgagtccatggtgtcctggagttcagcgagtattttcgttccaagtgccaggccccgaggacttcagaaaccaataatgtatttgccatgttcaatgtcaggttttcacaatgcgcacgctagtacggtgtgagcttgcaaacatttacccgttgtgcctgtttctgaaatcaaaatctagttatttgccccgttggaaagtttatttgtggctcatattgcagcagaaccttattatttgctcgaagttggattcgggacttcacgtcttccatggccatagaaattgtaacgctcccttttaaattgctagctccagtggcctcatatttcaggtgggatatcttcttccagcatcagaacgtactgtaccaatcatctgcacgatcgcacattcacaatggactagaatggcagcaaccatcaacccatcctttgttcgcccagccgtcaaatctcataggctgttcactctgaattctgaaaaccttacgacggtttgacaaaatttctcaaacaatctagtatatatatacttcaggtggaatctcctccctacatcatcagtagatcatccgaactgtgctgcaagcccgaaatgcatcctaagcttaccacagctgacaaatctcataggctgtttgttcattctaattctggatcctggaaccagacgactgtttgacatatgggtccccatggattgcttacgacttattataagccgtaatgtcttattagcaattaaaaaaataatatgtgagtaaaacttttgtatttatgttcttagagacttaaaggccaaagctgaaaaataatacgttgaataaacatcaaaatcaaattcaaaattaagttttaaaatttaaattttagctttggcttataaaaggcaaaggaaacaatgaagcccatagcccgttaggagtactatgctttccttctcacgccgcgcgagagaggggaaaagccagtgaagatggtggccatggccggcggcgacggcgcggggcggcgtttttcgccgtcgtgaggtgctgctttgtcggcttctctccgcaagacgctcccggcccgcatccgcgccgctccgcagattagcgggcgcatcggcaatgcctgtgacgggggctgctaccccgagtgagggctaggtatttggtcgccgagaatgcttccttgccttgatcagtaactaggggactgggattcgggaatgctggtaggtacgttcttcgcctcctcccgggcttgctttttgtggagaatttccctaatctagtattctagtgataatatgctttaaactgtacatcagtacatgttgtcctaaagttcatattacttcctgcatctagaacaccctattctaaagtgatggatggttcaagtatttccctcttagataatcatgatttgctaccttaagttgtgcgtggcctgtttttatctcagagctaatctcgcacggcaagacctgattgaacgcataggcattagctatttatttcctgcctttcgagtagtaccacactagttcagcttctgaaagaaaagaaaagaagctgcaaataggctgggcactactagctttatcacagaatgtatgaattttctttcttgatgaaaaatgaaagcagtacttgtcctctgtttaaaaaaagttagcattatgccgttttgattatttcatgataaggttaacgttctgtatgtttcaaggagaaattcatgtctcatagtattggtgattcttcttttcagttgctgctcaaagtaataccagaatatgttgtcagtgatattgtgacatgttttttcaaatagtaagacttgagctctactcatcagttcatcaaggaaagatgggactatgaagactactctaagcaggtaaaagtaaggctgtgtttagatccagaggtgaaaagttttggcgtgtcacatcggatatacggacacacatttgaagtattaaacgtagactaataacaaaacaaattacagattatgtctgtaagctgcgagacgatttttttaagcctaattaatcagccattagaaaatgtttactgtagcaccacattatcaaataatggagcaatagacttaaaagatttgtctcgcaatttacacgcaatctgtgtaattagtttttttgtctatatttaatactccatgtatgtgtccaaacattcgatgtgacagggtgaaaagtttttgtgtgggaactaacagggcctaagccaaaattcaaaagctacctagctttgctctgtggcataacctgaccctgtatgcgaaagcatttatatgtcaccttttgctagttgattagttgatcagagcatttttgctgcaaaccatcttctcaagccttcaacagagcctcaacctcctcctgcactatccatagttctgcagtgatttgcatttaatgaaaagatatgtctattcctctcttttgattcattacaagcgtgtggctcagatttgcaatttgcaactgatactacttacataaagccttttatatggacttgtcaattgtaaaaacctattataattcctcagagttcttttcttctgaaccattttgattagtttccagatgcactaaagagggtatttcaggatatttcaccaggtgagctccattgcttccacagagagtagtaatttgacttgatcttgtttaacttgataactacttcattcattggaactctgtcatcaggtgcatctcttgagcaaagcaagcccaactcaattatggatgctagacagatattcaagatgattgaatcctcagatagcttactcgaatcctcagtaccacccgtatgaccatcttgttgtagactacagtcggcgacatttgagagctcatatgggaatgcttgactaatccattgcctgaaggtcaactcattgacgaacattggatcagttggttttttccttgtgaagacttcgaggaggacaattccgtagctgtatacgtcacttctgcgtgatgcttttcctgttgatcctaactctgtttgcaccatgtcaaaagagaactggtcagcttaagttagatgaaacaagaatacagattgtacagacttt

SEQ ID NO: 9145 - DNA, 14229 bp, Oryza sativa
acgagaaagcgtggtggtgcttctttttttaagcagggatggagggagagattctacctgtgattgggctgttggttttggcgattctgccacagataaggttgatgagaacgcaagataacttgcacatcccattggcctatgcttctaattgaccttgtattatcatggaggtgacgtctgtgcacgtttaatactggcagttgctcgcttaaatatcgctctaggcgtcggggtttattgatggaagttttgaaggacatctggttgctaatgcttctgaagttccgagcggattaggccagtcccaaccctctatctaagatggtgcctatggcattaactatattgtcatgtagaactcttagcttatatggcactatattaattaagagagagagtgaagagaggaagaaactgggtctcatacaagacacagcttcaacatgagaacctatccactagatactatcaagttttgcattgggaaagaatagtgtcttcataatagatgaagaataaatatgattagtagagaagtgagatgatgtatttattaatggcccactttaagaaaccatgggttgtagattgtagtttatattgtgatgtcttattgatatggcactatagacattgcttatagacattatgggttgagactgcctttagtgtactgaagcgcttggaattttccaaacagaagagacaatctgttgccttcccttatcagatcagctcacatgaaaacatttgaagtactcccagtgtgtgtgtgtgacggggagagctaggtggcttatcccagcggaggtgcatgaaacttggggttgtcttgttgctagatttggactggagtggagagagtgaaagcctgaaagcgatcgttagccggctgacgaattcattcccctcatagaaaagggtgacaagcaaccgacaacaataccaggtgtgctaaacagccttttgaggttgggcggttggctggcctgcattcacatagaaacagcacacgtctgagtttgaaaaataattaacggtaggagtaactatctagctgctttgcatatttcaattattgtggtaaatactctgattgacagtgatagatgctaaattagagcaaatttattcacagtgtttgacaagttatatcaatatttatattgctgaaacgtgacaaatgataaaacggtgtgatcacgagtagagctatacaacatactagtgagatgggtgatcactgatcaaaataatgaaagttcaatcctaaattacattggaaggtggtacaatattgagggttgataaaaaaaaaagcaaaggatgatatagggcagttaaacagtttagaggccgctgcaccaccttctcatcccaaactttttttaaaacaaaatcatgcaatgttcactgcccgcttaaaaaaacaaagtcaatagatatagcagttaaaaaaaaccacctcatccccacttaccaccaccaataggctcagaaaaagagtggctatgtaaccattcaatagtttgctctctgtgatatttctccctttctcgtggtgcactgtttcatcatttgcttgattcgatccaatccaactctttcgaaaggatttgtcctcctcagccttctttctttggtccccgcacatatggctatgttcataacttacttgtctagcatatatggctatgttcataacttacttatcccgcacagaaaacaatgtaacttattagtgtataaataattaagtattaatttttaaaaaacaaaaaataggttataatatttttaaaataacttttttatatataacacattatttagtagctcgataagtatgcgcgtagagaacgagaaagaaaaggatgtaaattcctagttctgaacgaggtcgtaatcctctttggcttcttctaatgctagtgcattatgttcggcggtatttattcccaacacatctctcgtgttccgtgcgcacacttttcaaactactaaatgatgtattttttgaaaaaaaatacaaaacttgctaagtattttttaaaaaatagattgatataatttttaaaagcaactttcgtatatattttttttagaaaaatacaaaatataagaatttagaatcggatggaacattttatagtagtatgaatatgaatagatccggtcttaggttcttatattttgagggacggagagagtagttaattataagaaaatatgtcgctctgttttgtgtgtgcgggagccgaacatagcctaattaagcaatgcagccatgggtgatgttgatgaactctatttactactatcttatcctagaatataaaaatttgtagagttgaacatgctactatgaaagtaagtagaattaaatgagagaagattgtgattggttgaaaaatggaagtaagtgaagaaattgaacggtggaaggtataattggttcgaaagagaatgttgatagaaaagttattatattttagaacaatttctaaaaaccaaaacttactatattttataacggagggaataattactaccttcttacatgatcattgtcgatgtcattataacctcctaacttaattttatgcgatgtccctaatgttgatgctaattttcggaagtcaccaatcaagaggtgcaaagtatgccctgagacggatgctgggcctagatacttggggtatatttttgtttaaagacgagaatgcatgtggacaacttataaattttgagggtcgttgtcggatatatgggcccggggatatgcaaagtgagggaaatttatcttcccatccagccgcgtggccctacagtctggtcatacccttggacctcgcggatcgcagaagcggccggggggcctcggggtgccacgtcatgcccctcgggccctcgtgccgccttgccccgaggccctcgcccaactgccatgtggcggggggagcgagcagggaggggacctaggctgaaccgctatcaatgcgcgcggcgccccaactgcccctcgccgcatttaatgtggtaggggcagacgtgcggtaccgcccgactgacgcacgtcagtcaggactgtccggtctgtgaccgacctgtccccagacacgaccgattggacgggcggctgtgcccccacgtcgcttctgtctccggcggagtggaggtaggtgtgacccgtcccatcggagtgtcattcggagctccctccacgagaggaccaccccaagtcttcacccatttatgagggaatgacagtgttgtaccccgtgtcacacggggggcggcgctgggtcccgctcaaggacggggtgcggcttagcttccaggcgaaggcacagatcatgattcgttcaaggtagggttggtccccaccccgtagaagagtaggtagaggcggtgcatgtggtatccccttgagctataaaaggaggaccctgtccaccgagaaaggggacgactcccagtaagcctgagctctaggagaagagaagcgggaacgctctccggagtttaggaacccttgtaacactcaaccttaatcccacacacaggagtagggtattacgctccatagcggcccgaacctgtataatcttgtcgcgcacacgctacctagcagccttcagggcggatacgcaatttctagaggcaagctccttcctccggccgaactgacaaaagggagatctcacgatcttccgctagagaggatcactcctcgacagtcgttaacatacgcaacctttgtcctaaaataattactccttccataaaaaaattataatcttaaagatgtatctggacatatataatgtccagatatattctaaaattggaacttttttttaacagaggagtacatttgtatcatttaatctaaaaaatgtagttttattgaggtgaaatactgcatttcttttaatcaagaatagcaattaagttggcttatggtctcaaccttcctttaaccaagtgtacgtatggaatatgcgcatacaatgcggctattaaataggattatcatggtaaattatatttgttgctaatctgtctttaatttattttgaaatgtaattattttgtgatatagtagcacgataacatttttcatactagtgaaagaaaattaaacaggcatatgaattaaaacttgttagcggagggtcagccggcatccatatcgaattatcaatcgggactctattacgagggtttagtgtcccacgggggatggtgcatgccgggatgtcgcactgctagattgaataatgtcccttgcgcagctctagctagatcgatcacgtacgatcggtacgtacgcacgcgccgcggcagctagcgattcaaccgttccccaacctatcacgcttcacgcctaggtacacagatcaacctgcgggctgagggtcgcattggatcagcggttatgtagaaattgcatgttgctactgtagcggctggctgctatctagtcacaccgaacaggcccgtagtaggtgtcgcctcctccgcgcgcgcgcgcgccccactgtgcagcgaaacgtggctagacgcacggcgcacggcacggcacgtacgagaaaggccacagctaaagccattaggtcgaggagaaccgcgctaaaaccccgccgatctcatccgaatccaaccaaaggaaacaccacgcggcgcacggcgcaccgcgcaccggccgtcctgctcctgcactgcaccacgccgatcgagagtaatcccactcgcccggacgtgtacggcgccccgtccccccatccttatctcgtcgtcgcaagccgcgcccgcgcgcaagcacgtttttctactgcgctagtatccctctccgcgtccagtactaggtaccctgcggctagatcgttacatgaggggaagggttttttgggctcatcctgcatgtacaggcagcacgcgcgcgcgagcccagccgcccacgcatgtgttcctccctatcaccaaagcaaatcgtacgcgagctttcgcttttgtcccttttgttagttaatctacctactactacgagctcttccttccatctactgcgtgcacacgtaagcccgtacgttcacatcacatgctggagccgtctgtgaacagattaatccctggagtttatctggctgacatggcggtagttagcgtacagatccatcatctagacgctctagactctagagctcatcggtcctgtgaatgtgagcgatctgctagcagaaaagcgttgggctctagctagctttccgtcatcgtcgtcggcagatgagatcattgggcgcgccttgcatatttaacttgactccggtttggttcagcgatttgtttaagacgcacttttgacccgagagatatgcggggtggtggtggtggtggtggttgccctgcttggagctgtacttgcgccatttcttttctcctttccatgtgaagtttgttttccacagacggattcctaaacaatggggtagtcttacaaattaattctctggtatttggtgtagtatatcatcagcctactgattgacggtagctagaacacctttcagttctgctttgtgcgtgtgtactggatctgtttgtgaatcactttaatttcggagtttcaatagacaatcttggaggagttaattgttcgcacgcatgaacatggagattctcgtgtagtctttttgaccggtgactacagcactgtggctagttgtagtagatagcacactgttcttgtggttgaacataactagtgtagtgatctgatggcctgaaatgtatattctgacttcagttccctgactgtaatctagcgctggcgagctaattaaagaacgcataggctcagctagcatagtttgattaagaagcgctcttctgacttttgacagtggactctgttttcttgtagttaaacgagacttggaacattttttttcctagttttgagatatagcacatgagattagtaggcactagtaaagaaagacaagccaaggatcctaagagataatctgctggtgtttggactttggacagctacacatgatgatatggacatgcaccaaactatacactagtacttgtgcgtgtgaagtacatgtatccgccactaccagctaaactagctagtgagccaagttagtgcgtcacgcgagaaacaatcgaaaacgtgacagtcacaacaatatggtaatgttaatgtactcggaagtgccaatctatggagcaaaatgtagctagctgttgttgcaacgattgcattggacgcatctacctactatcgtagaaccaaagcagttttagttaagatttcccatgacgcattcactcgtccaggtactagtacatgtttatttcctcgtggtgcaactagctagggccaacgaggcgaacgtgaactgtggtaactaaccattaatttgtacatgtgagacggttctcttgataaatcagagtcagattcaaacagtgtaaacactgtaggctcgttcgtcccgtcgtacaacggatcacaataagcttttgtgaagggcgccgacgagacgaagagtggctagtaaacacgtgctttttttaagccttctgcaccggccgcccacatgaaacctgatgatataggagtaacgagtgtaaacgacatggttctcaaaaaaaaaaaagtgtaacgacatagcaagaaccattgtgttgtctcgccaatcaataataatgccatggagatgtacgcagcccctaaccctaagatcacacatgcgcccaccaagtttactgaaaaaacgcaaacacacaggcgcgcgcacacaagtttaattaggatttgtcttttttacaggcctgtagattgaagttagttgtgtacatttgtgaatcgatagatgattccacatatatgtttgttaatgttttgagaaatttccataaatacagtatttgggtagcatgcaaattaaaagatcgacaaggacatgcatgcaccccgaggtgtacagtagcctagcatgtgttcaagatgtgtgaaaataaccaaataataaaaggatgcacttctagaccagctacctaaattatttcaactagaaagaaagaccgctaagatgtgcgaacaatttatttattgattataaaaaaatcaaaaaaagttatatctcattatattcactatacgaataatagattatttatatcatgaaaaagaacatagactctgatatactaaatgataatatctattatattcaaacaaaaaatcactttatcccagttatgtgtaaactcgtctatcaccattcttcgcaaacatataagttaatatatattttttattatacatttgatccacctgtgtatgtacataggtaatatacaaaataatctatattgccaaaattattgtgctaattgttaattaaaagggatataatattgtggctaccacctgagtaacctaggtctcggtgttcaagcatgagcgaagaatgcagcggcagacggcatcgtggttgagcatgagtggagcagatggtagctggcggcatcggatcatgaatgggagggagtagatgaggtgatgaccgttgatgttcgcaagagagctggagaagaggatgcaatggtcgacaccaatgcggcgatgcgctggaggtagcggtcaatggaggaggcagggaggtggtgtacgagcgtacgagggagatcgggaggtcgctcaatcggaatcgggggaaaggttgatgcaaaattataatcttaccctcccacgaccaaaacacgattggtacacttgctctcgcatgggcgcaatatttggacggtaccgggctctttgagctgttagatcacgcgtaattaacggtcaaggatatggtaccttctcccctaaaggattgtaaaaagctcccacacacacatacacacacatatcatctccacaaatttgcacaaatattaaagtacaggtgaagtatgctcacactgcttatttattcatccactttctctaggatttttcatttttgtagtccacgttgtaaccatgattctcatccgaactccacaattttaaacaacgaacacgcagcgagcaaattggcacttaaaaaagtagttaaaaacaaggaggtcaggtactcactcgggcacatgcattagaatatgatccatttgtgccgaagccgaaccagcgtgcccatctgcccacaccaccggaaaggcggaaagcatcccaagggcaacacacgcatatcccaccccgaataccgagtaagatcgcttgtcccgttgccttgccagccgcgtacgtggtcctccccggccagccaagcccaagtcgacgtttatctcgacgggcgatgcgcgcgccacaaaatctcggccaccacccggccgctttcaatagcagcaacaaatcaacctgattctgcccatagggagatagagatcgtctcctgtctagtactactcgtactactagtatagttacttcttggtagtacagacgcaaatgcatttggacacttccttcctggaagctgcacgagccactgttctacttgggtgggtcaggactggatcagagataagctgttggcttctgggggcattgtattatctgatttctgccagccaagggtgaagaaacatggtaaaaaaaatcaattctgattatattttttatggaatggaggaagtagtaagcaacaaaatgatacaacagttaaaataaaaagccgcgacagcgtacaactatatggtgatagcttttccattagctcatactttctccgcgtcaaaataaaggaactagtatcaaattaaacacaacctaatactacaaaattttaagatgaagagagtaaggtttatggtgttggtcaatcatcaacacaggatcacaatagaaaggaggttcgactccctcgatctccttgtaacctagcacttgtggctagaaagaaacactcgtatcatcaaggggatacttttcacaatggagacagtggctaatcgcattgtgtaaggagagttttgggttgctgcattatctaatcctctaggagatcttttttggcacttacccttttattccacaaaaatccaatcatagctatgaatatgaacaagattcgtagctagaattagttttttttaatggagtagtggtcattggctctttctccttttctcattttttgcttgttgttcttatgagtctggttccttttcctagtctatttagtgtgtcggtgtgtccttcctctcctttgtaacccatgatctacattagcaggttgcagttacaaaattcttttttatgttaatatgccaatgcgtaaggcttttacgagttcaagaaaaaaaattacgtggttaaagaaaccaaggcccttcaatctttcatttgcccttgcccactaaatttcttcagtgtcggcttattcctaacgcgcaactggtgttgccaatgcagatgtaacaatagttcatgatgtgtatctctctctactccctccgttcttaaaaaaaaaaggtaaatctagaactggatatgacacattatacgtactataataaatctggacagatgtatatccagattcgtagtagtagatgtatcacatccaatactagattgtttttttatgagacggagagagtatttcttagcgtagccgtaagcctttaactacagcaccgtcagccatggagaaattacctgcaattcagcggtaggcctcgcaccacgcgctcgctcacacgatactgcatgcattacattatactccctccatttcagattataaaatattttgactttagttaaagttaaactgtttcaagtttgactaagtttatagacaaatataatgatatttataataataaattagtttcatcgaatcaataattgaatatattttcataataaacttgtcttgattgaaaatgttactatctttttctacaaacttggtcaaaattaaaacattttgattttgaccaaagttaaaacgtcttgtaaccttaaacagagggaatagtattctcttcctaaaactcaacctaaatactccctccgtttcgttttatttgacaccgttgactttttagcacatgtttgacctctcgtctaattcaaaaaaattaaataattattaattcttttcctatcatttgatttgttgttaaatatacttttatgcatatgtatagttttacatatttcacaaaagtttttgaataagacgaacggtcaaacatgtgataaaaagtcaacggcgtcagataaaacgaaacggagggagtatgatgtcacctccccgcaaaaaaaaatgatgtcacctatcttcaggttaagtttttttcctttttttttaaaaaaaaaggaatgaaggaagtaatttgcattgacccgatcatctgtcgcgcgcgtcaacgccgcctcttaactcgaccgatgtgtgccatgcgcacaacggaaaatcggtgaccgcttacaatgcaccagtcgtcgttgccccagccgatcactcgctcggtcacatgactagagtggcacagctgcacgtatgtgtgctgtgtgaagcgagtcaggagtcaaagtcttcgcgatgccacttgttcttcttgagagttcaggaagagcagtttccatgtgatttcgcctctatagtacggtgattcttgacctcggaattcgtgagggtactattcagtctcggtgcacacagcggatgatcgtgggaatgcaaagctagcaaactgctctgtcacatgccagcaatgtcatcccaagtattgcatcaacaaacactcccacatttctttcacgtgatcctagcgtaacgagccgcggaccgtcgtttctggaaccacctgtttaaatatagataaaaaaaaaactaattacacagtttagatgtaaatcacgagacaaatcttttgagtctaaggggggtgtttgggagagaggggctaaactaaacataagtctctaagggagggacttatacttttgtgagagggactaatgtttagtccctagttcctaaacaccccttaattaggccatgattaaacataaatgctacaataacccacatgtgctaatggcggattaattcggctcaaaagattcatctcgcggtttccaggcgagttataaaatttgctttttttattcgtgtccaaaaacttcttccaacatccggttaaacgtctgatgtgacactcaaagattttcatttcaccaactaaacagcccctcctaagcaggtaaacgtgcaagacctggtaaaatgatattccatccgtcccaaaaaaaattattaggacagtaattaatcggacagtgaaacggactactaacctgtggccgtctccagaccagctgtcaatcataagagctgtccgtcctacgtggaggacgtactaggcagccgccgtgcttgaacagactagttgacttggatccaacagatagctcacttttactggaatcatctagctttcccaaaattgtcagcataattcttagctttctcatttccgccgtcaattactggtaattaagcatgcatgggaatgcagatgggaatgccagtgagaaaacatgcatggcgacatcacaacatgaaagcgaagtctgctgggatccaatcatctttccatttggtgggccaaagtagcgttcaccgttggatagttagcagattgttataattactcctgttgttgtgaagagaccacaacagaagtcagaaaagaagggaattaatctaagttgtggttgatcatcgccgtcaggctcgaagcaaaatggtactacatccaagtatcattttccatttgggtttcgtctccacctccaaatctccaatgtactcagtggacatgcgctgttactttcttcgtgccttttgtttgataatttcttcatgctatcttttttactagtcccgatagctttacagttcaataaacaaatttcattatactcgaattggctgattttgactgagaaaaaaaatatagggggtgtttggatcatatggattttttttagcccaccccttttagccttaaaatagctcaaggggatccaaacatgagagctattttagggctatttgcaaatagcccaccccagaaaattatcacccccaggggtgctaattggggctatttgctgtgggccccaccgattcccactttcccccacttgtgccggatccagttgcggcagaaatcgtcgctctcacccctcgctctcgccctcgctcgctctccagaaccctcgccgccgcccagccagcttcgcctccccctccccccacccgcgccgccgcccggccccagcttcgcctccccctccccccacccgcgccgccgcccggcccttcacccgcgccgcctctccctcgaatcgcgccgcccttccttcagatccaccgagaggcatccacgccggcgactcaccccacccgcgttgccggccatcagatccgtcgtcgacgcatcgccttgcaccggatccgcgcggagatggaccccaacggcttcgatttcttctcccaagatcccatttcgtccgccgccggcaacatttggtcgtcgcagccgtcggcgtccggcccttcccacggatccgttccccgcgccggcgtggacacgctggacctcaacacccaggcggcgtcgggccaggagttccctcacctccacgagtacggtgccttcctccagggtggcggcgaggaaggagctggccgcggccgaggctccggtctccctcccatccgtgcaccacgctctctgggagtgagggctggtcgagggggcgccgggccatctcgtgctgcaccgcgtgcccgccagctcaacttcggcgcggtaggtggccgtgctggacacggtggaaatggtgggtcgtcgtcgggcatcggcggcggcggccctgggcgaggcagctcctcatcaggggcaacgggtcgccgtcggcagcgcgccatggcaaccaaccgtggccgcgaccgcggacgtgggggccgcggttggcgtgtgccgaggagtgtcggcacccaggaagcacccatcggcgattacgtcgaccttgacgaagaaggtgcatgggacgatgaggtggaggaattaggcagcttcggcggccctccggtgagcattgctgaccgagctaactggactgataggaataatagtattttgttagcattgtgcatagagcaagtaagagcaggccactacaatggtagccaaatgaattctgatggctataatgctatagccgagggctaccatgccaaaactggtttgatgcacagtcgtctgcagctaaagaatcaaattgggattctcaagagcacgtactccttctggcgttacttgcaaacgcacacgggcttaggaagaaaacctgatggaacagtcgatgctgattctgatttctggagtagtcacatagaggtacttttctaccattttttttattgctgatcatgtttttttgggttattatctgtctgcgtttagtgttcttatgtttggattattcttgcaggcaaaccttacctgaagaaggtgcttaaaggacttccagcaaacttggatcagcttgaggagatgttcagtggcagtactgtcgatggtagcactgcttttgctgccggtgatgatttcggtgaggcacaagaaggggctgaagatgagtgggcagaagaaacagaggagttcctgcaaactcctcagagtacaagtagccagaagagcaagaggtccctcgacagcactaccagcacatgtagcactccagtgaagaaaagcaaaagccccatggttaagtatgtgaaggacatatccatgtcattcaaggaggccatgcaaatcaacagccaggaattgaggaagcgtactattgagaagcaggctgcttcagtgagaaattgtatgaagatggccttcgagtgtggaattgagccaccactgagaatatttttgcaatgtccaagatgtttgagaatccctaccaaagggagttcttcgttggactaccaaaccatgagcttaggttcaactacttcagcaaatggagcagggataacaacctggtttagttaggcacctcttttatgtggtccgtttgttgtgtccaggaaccgtttggagcttttgttatgtgctgttaatttgaacctc

SEQ ID NO: 9146 - DNA, 23822 bp, Oryza sativa
gcagcccatcattttgagtacaaccaattatccaaacttccatggggcatatactcaagaactagtgctttgaagtcaagattagagcaagtgctaacaatcctcaccaagttgcggtgatgagccattcgtaacacgcggcactctgtgtcaaagcttttggaagctacttcctgttgcatgtttaggacctttattgtgacaatggactcatcatctagctggcctttgaagactttaccaaagcttccactccctagcaggttatcatcactgaagtttcttgttgcacggacaagttcatggtatgagattaactggtaattcagcaagtctgcatctgagggtagtggcatctttcctggcttattcattttccttcttaccaacatacacaagcaaaatgctaaaataaaaaatgccacaactgcaggtaatatgaattttagtagccgttgtattgaccttgagtgagttttgctctggcatgattctattccttggctcggaaggccacatagtgccttgtttcccatcaatgacttgacagtgatgtttgagaacacacctccttctggtatctgaccctccagtctattgaaagataggttcaaattggcaagataagtgagattggccaaggactttgggatgacacccgaaagcacattggaggaaaggtctaactcctcaatacttagtaacttgccaactgaatctggtattgaaccttggagtagattactggatagattcatatagatcatcatctggagttcaccaaaagaaaatggtatatcacctgatagctggtttcttgatagatccatcttagtaattgctgtcagttttccaacatcagcaggtagagaaccactcaaagagttctgtgataaatcaagctcaataagtttctgaagatgccacaaactaattggtattgttgaagacaacgagttttgggacaataccacaacttgtaactggtttaggctaccgatggtacttggaataggactgacaagttgattgttagcaagattcagcttaactagacttgttaatccagtgatttctactgggatggtgccagacaaggtgttgttggagagattgagttcttggaggttgttcattgatgtgatctgcgtggggatcatcccgcttagctggtttcctctgagagatagcatcagtaggttggtaagcttagccaatgtactggggatgcttccagtgatcctattgttgtctgctacaaaaatttcgatcagtgtgctaaggtttccaacacagggtagtaaactcccttcaaatctattgtatgacatgccaattgtgttcagattactgcaatttgataatgcagctaggaattcaaggttcccactgagctggttcccatcaacatagatgtcacgaagattccacaagttcccaaatgacattggcaccgatccagttaatccgtttacgaacaaatctattgtggtgaggtcagagattgcctatagattcgggaatggtacctgttatttggttgtttgcaaagcttatatacctgaggtttctcagctgtccaaactctggtggtatttctccctctagattgttctcgctaaggtccaaagcaagcagcccagtatgattgctcagttcaactgggatctttccagtgagctcgttggttgacaagtaaattgcagtgaggtttggcattgtcgccagccatgatggcacagaacctgtgaaattatttacagctagggagaacaaatcaaggttttgacatttggaagggcccgatgggataggtccatcgaaccaattttcaccgagagagaaaaattccaacatagggaggtgaaagctctcgtttccaggaatcggacctctgagattgttccgtgtgactgctatggcttgcaggtaggacatattgaagatagcagcaggcatggagcctgagagaagattattttctaggactagcatctccagcttcgacaatgatccaacgctaccaggaattgctcctgttagcctatttgacccgagttgtatcctactcaggttgggtgtgttattgaacaggccttgtggtattggtccgctcaagtcgttatctgacaatcttaatatctgaagattgttaagatttgccaactcttgtggaatccccccaaagaatttgttgctattaagataaagagactcgagccttgtgaggttgccaaggatggaggggatggtacctgacaggctgttgtatgaaagaacaagagtttgcagtcggggcagcctatcgagctcggttggcacaggtccgatgagggtggtgttgctgagtacaaggctggagaggaaggagagattgccaatctgcgggctgatggttccttcaagtgccatgtcttcaaactcaagcccagtgacccacttcccgctgctgtcgcatgagaccccaatccatgagcagaagggtgcactggcagtccaattgctggcaaggatgccattagggtccttgacttgctccttgaagtcgagcagtgcagcgaggtctgtgttgttgtatggaggggtgagtgaagtggcgcatggtgccaataggatgaggagcaccatgctgatgcagagaagagccatggtagtgaaggaatgaaggttgatgatgaggatacacaattacgcatgagcagtgtgctggttctattggtggttttattggaagtgtggccgtgtgggatgtgcaattgacatgtgcattgtgttgaatggtcaaaaagttgttttttttagtggaaatatgtgtgaaaggaagaaagcgttttagactttttcgtttgaaaacaaactttcatttttcagagctggttgtacactgcagtttcttggtacacttcaaagtttcaaaatagaaagaaggaaaaaaatgaattccttccaagaaacaacctcttccagaagtcaaggagcaaagctgtaggagtatgtcatttccgtcattgatagcttcgttttttttctgttctgtttttaataatagattaaaacccggtctctacaccaacatgggtgtacacagccaactttgatgcttcatgcttggcgccagtacttatgtttgtttgattttccaagaataaaacatctggtttaatttttttttcagaaaatcacttaaatagtcgttctacgctagctagatttttttttaaataaaaactgggagataatctaactccaagtatatttttttgaaagcaaactccaagtatattcatatgccatttccatctttgatactatcttggtatgcttggcaccattacttatgccttttcttttcacgaatgaaacatctggtgtgatttttttcaggacaatctttttaaaagtttgttcctggctgttgtttcaggtatcaaagaactgtaaaaatactgaagcgcttctatcctagagatccatttcttattagggcccgtctagttacccaaaattttttttccaaaaacatcacatcgaatctttggacatatgcataaaacattaaatatagattaaaagaaaaactaattgcacaattatgggggaaatcgcgagacgaatcttttaagcctaattagtccgtgattagccataagtgctacagtaacccacatgtgctaatgacggcttaattagtcttaaaagattcgtcttgcggttccgaaatccccttccgacatccggtcaaacgtccgatgtgacatccaaaaattcccttttccccaactaaacacacccttaacccttattcagcagttgactaagagtctaagagaagcaacactttccatgtgtttggtcaatcctgagtagactatgctctgaatcgtgctcaccaacgcaccatttcacaccaaccgccatttcacatgtctattattgaaggcggtcaggttcagcgaagcaagttgatgatagtcgctcttccccatgctagactatccatatccatggagccatcaaacagcgtcatgatcactgataattgatagtagtacattgaatacaagagaagctgtacgtgcacaacttcccttccattaagtatttaattgcttgcttgcattgtttgcttattttctgtacgatggagggtgggctgtgggcatcatgatggaatcgtggacctctcatatattgttgggttaactgaaatttttcagtggtcctttgaaaactagtagaaatattcattgcgttctttggcaggttattggaggattaagccctaaacaactctctaacacgtagtatattactttttgttagatggctgcaaacctgcaactcaactactgttacaggtatcttttcaaggaaggctacagctttcatgatgcagttcagcatttgcaaccaccacagatgacacatggccttgccagctttgggttatcatctgcagggctgcaggacaagactatctaggcttgtaatacctccttgatccgctgcagtttcacagtcacatccttcatcgtcaccctgtcctcaggcaagtctctggtacactgcagccccaaatccagcagctgcgctaagcagctcctgctgccggttgattcaccttgggcatcatcgctgctcaccgtgtcgtcatacagagagatgccaggatgtacgacgtcggcgagccttgacgggagcgctcggttgacccactccctcaagctcagctctccgacgaacatggcgtcggttggcttcttccccgtgaagacctccaggagcatgaccccgtagctgaacacgtcgctctttcgcgatgcttttcctgtcgacccgtactctgtgatgttcatggtaaacaaagatcaagggggatctgcagaaattggcgatttcagtggaaccaaagatgaacggtaaatcgacaagtgattacctggtgccatgtatccgattgttcctggcatgctcctggagaatatggaggtgtcctctcctagcaataaccttgcaattccaaagtctgcgatgcaagccgtcatgtctgcgtcaagcagcacgttgcttggcttcagatcacagtggaggactacctcaaagtgctcatggtgtaggtaagccatagcgagcgccgcatccaacatgatgctcaccctctgcatcaatccaaggcaatgcctgtcactgtacagcaaccattcgtccaggctcccattgggcatgtactgcagcaccaacgccttgaagtccagattcgaacaggtggtgagtatcctcaccaagtttcggtgccgagccatgcgaagtgcacggcactcgacttcaaaactcatggtagctctttccatgtccatgttgaggacttttatcgcgacgatctgctcatcgtctagattgcccttgaagactttgccaaagcttccagctcctagtaggtgatcactattgaagttgtttgtggcacgaaccagctcatagtaggagatagccctatggttgttgtttgactccaaactcatagtaatcggcaggcccttcagtttcttgccagtgcaaaatttaatcgaaaacagcaagcagattgctattattccagtagccaatatgcttggaataagaactacttttagaagccttgattttttaccctgaagaggatggtcatttttgcaatgggggaaaccaaggcgtggaagaccacagagtgctgtgttccctctcaaagattggagggtaatgtttgagaacacaccaccatttgggatttgcccatccaatctattgaaagagagattcagggtagtgagaggactaagatttgcaaaggactttggaattgttccagagaaggagttatatgaaaggtctaagtaggtcagtgtgctaaatagttcaagtgaggctggtaaattaccagaaaatcgattggaagaaaggttcataaatgttgttgctttcagattttcaacttctggcaaagagccagtcaaagcatttccagccagatcaagacccacgatattttgaaggccccataggcccatcggtactgctgaagtgagctgattatttgatagttctaaggtttgtagccgacttagattactaatgctatcaggtatggggccatggagcttgttgtaggcaaggcctagggcaaacagatttgatttgccaatatttgcaggaatggtcccaaccaactcattagaagaaaaatcaatcatttcgagatccttcatctctgtaattgataccggaatttccccggtaaatcggttgttgcgaagatccatgaacaacatgttgctcttatttgtcatatcagggatatttccagtaatttggttcttgaatgctcgaaagatctggagggaggaaaggttgccaatagaacttgggatgctaccagtgaagtagtttgtgttcatcacaagatacttaaggctcttgcaacctgacaggtcagccatgaaatcgacatccccactgagcttattctcgtcaatgtagagttcactaagggctggaccaaatattggccttggcacagatccagtcaatgagttaaaggatatgtcaaggatagagatcatagacatgtttctgatagaggctgggatgctaccggtcaggttattcatctcaaggttcagccaccgcagctgtgtcagctgtcccagctccggtggtatcttcccatgcagattactcctggtgaaatccagatgggtgagacctgtaaggttgcccaagctggcagggatttcaccagaaaggtcattgccacccaaggagacattcaccaactgaggcatagaagccagccacggtggtatgccaccggtgaagccattgctgaatagaatgaactcttgcaggttcttgcatgccccaaagccttgaggcactatgccagttaaatggtttgtgttgagattaactgtttgcagcatgggaaggttgaagcttccgttgtttgggatagagccagagagattgttcttgcccaggtacatccgtaccaagctggacatgttaaacagcgatgcaggtattggccctgaaagctggttccctgacagtacaagcacctgaatgtttggcaagaaaccaatagcaccaggaatgctccctgttagtttgttgtaagcaaggctcaagaaaacaagctgtgacgtgccattgaacatgccacgtggtatctgcccgctcaactcgtttctgcttaatccaaggtacataatgttcttcagattgtgcaggtcgggagggatttcaccggtgaggttgttcgagtcaaggtcgaggatttcaagcacggtgaggttgccgagagacgaggggagattacctgagaggcggttgctggagagatcgagagacaggaggcgtggcaggttgccgatgccatcagggatcgggcccgagagccgggcgtcgctgaggttgagggtggagaggaaggtgagctcgccgagctcgggggccagcgagccggcgagctgcacgccgggcagctccagcgccgtgacgcgcagcgggtggcggtggccgccgcaggtgacgccgagccagccgcagtagggcgcggccgccgtccagttgccgcggcggagcacgccgctcgggtcggacacccgcgccctgaacgccagcagcgccgacagatcgtcggccgtggcgaacgccggcgcgcttgcgagcaggagcgcagccatcagcacggcgaggtggaagacgacgaagaagaagaagacgagcgccattggcaggaggagagctcgatggaatcggaggtggcagctggctgaggctggtagctgtgcatggcgtggtggccaagcttatatcctgggagttgcgatagtggagactggagaagccagaccacgtacatcgggaagaccgaccagagactttgccccccatggaaactaaggctgcacgcaaaatgatgcatcgtattatcatatgattaattaagtattagcttttttaaaaaaataattaatataaaacatactgtttaatagtttaaaaagcgtgcgcacgaaaaacgagaaagctgaattgggaaaactggagaaggaatacaaactaaggatccctttgaatcttaggaatgaaaaaacgaaggaataagaaaaacgtaggattctagagcctctttaatttaaagtaatgccaaatgattttttttaggaatgggatttcaaaggatttttttccttcaagcctctttgatttatagaaaaggcaagtataaattccataggattgcattcctatgagtggattccaaaggaaactaaaaaagaggtaagacctcttggaattcttcctggtgcgaattcctttgttttccctatgcctatatcaaaggatcttcttacgtttttctctgttttctcttcccgtaggatttgaaaatcctaccatttcaaatattgtgtttttcctattcctgtgtttttcatatcctgcgaatcaaaggggccctaataggaatgcaagtgtaaaatagaggattgcaaaacacaggaatgatcgtttgaatgaaccgcggcaaaagggaagaaaatcggatgaaagagatagactaaaaggaaagctttcaagaggttggagctcttgttaaatttcctcaagaaaatctctttagaattatccattccatagaaattccaaaggatatgataggatttgatcatttgtttcaaagggtgttatagaaaatttttctgtaggattaaaatccttcaaaatttctatgttttttctttaaatcaaaggcggcctaaaagttgatgcgagcgagctcgttcacaagctgcttccctgtacgtgcatgttcacgtttgtgaccgtgatgaaagaataggcgaaagaggaaataataaatcttttgccgaaccgatcgatcgagagtgcacagcttaattaatttctttttgcggggacacagcttaattaattagcatgacatttttttcatctcaccaaagaaaacagtgaagggggaacgtagtacggaaacgaaattggcatttgttcctgtgagtgtacagcttaatttgctagtgctaccttgaatacacagcgtagtacgtcatgttcgaatgaaactcatatagatgaagatgaagataaaaattaagtattttatataaaatgagatgatatcaacgtatgactaattaagtttttttattacaaacttgagaaaatatatttatctgatattttagagtaatttttcatatagaaaaattttacatgaaacgtattatttagcagtttgaaaaatatgccacaaatatctaaatttctatctaacttttattggagaaacgtctcatgttattttttctctagttgtggacaaaaagaaggctacggacttgttaatgcttccaatttccaaagattagactagtatgaactaaaactgttgctgccttgtctatttttccttcgggggctgactggtggtagactgatagttagcgccccccactggacacgttcttgctggaaagcgactggactggaagaaacacgaccgctgatcacactggactggtatatctctgctgcacttcatggcatcgtcagtgtgaaaccctgaatacgtgtgtgactcataaagaaccagttgacgggctgggaattagggaaagagtcttgcggtcttgcctaatcgacaggacatcccctgtctagtttgtacatcgtttagagagggatgggagtaataataacgcatgactgtcacattttttgtccgtctcatggagttttcgctaaactgattcatcttctggtgctgcttgagaatgtgcaaacgtacacgttatggcggggaagacttgcaggtctcgcggaaaacatccaccttggcaatagggtttagttcccaaattatttttccaaaaacatcacatccaacttttatttatagacacatgcataaagtattaaatatagattaaaagaaaaaccaattgcacagttaggggggaaatcgcgagatgaatcttttgagcctaattagtccatgattagccataagtgctacagtaacctgcatgtgctaatgacagactaattaggctcaaaagattcgtctcgcagttttacatgtgagttataaaattagttttttcgttcgtgtttcaaaaacccttcccacatacggttaaacattcgatgtgacaactaaaccgaccctgctgtgcgcagatccaatttctctctgcagagaactgcagaatgcatgacatgctgctttaattttgtcaattcaaatacggagtagctaggattccattagcacatataaaaaagcagtatagctagttcatttttttttcgaaaagaatacaaacagtagcgcgagactactgtttgacaacagcacgaacagttactactagcatggaagagtttgtccctcgtccttttcttatgtttataagtatcagccaaaatttaaatttttaactttatatttagagttgattttggggttttacatcgaagtttattttttcagcttttacttttaaatcgctaagaacacgtatataaaaaatatatttataaattatttttcgtttgtaaatataccgtaacgatgtggccattcatttctgatggcatgaagatagggtggaaatatatgtttaatctaaggagttgaaacaaggtaaatatttgctattcatgtgagaattgtttcttttttccgtgtaatcatgtagctcaaagagagtggctattgtagtaagtaccggttctatcctaaaatatagcaagctaggatgtttagagagcattagtaactagcggttacaactacaagcttagcgcaaaaaaaaagttatggcaatcttttttttaacgtaagttatggcaatctctttgacatggaaaagtgaaggttcaccgccacaacacctgcagttttcggctgtggcctccgacacgggttatgcaggacgcaagaattgaccttctaagagcagttaaaataacactcatagcgccggcgatactgactccacgtaggtttgaggagtaagctggagggtgaatggaaaagagagagaagctcggtgactaatttacagcccggttgtacactgctcccaatattgctgctgctctcagccaattgcaacattcaagtgaagattttaaaaaaaaaaatcaaacctagccatgggaagtgcgtagagatgtatatataggttctgtttggggagagtttctagttgctacagcttctcccagaactagaagtttccccaaacagtctagattttggtctagattttaagaagctatagttatagaatccagaaaataaactaacagtcagactcttagctattttcagattcttataagctggttaacaatcagctgcttctcatgattttaacctccccaaataaacccgcactctattattgtattgattagcttgtgtcattcgctagaatagaatgatgtggttatttttggaggtaacaagtagctgtactattagcctagctgtaacgatagcggcctagtcgccgacgatggcggctggctcctccggcctacgggctcgcttcggccgaacgctacgccagtgaccgtcgctttgcgcccttgcgcccaccgcgtagcgagagagagagaacagagaagggactcgagcccgtgccgcacggggcatttccaccgtcggattctgaagcctcgcggccgagatcgagggctcggaggcaaccgtcggattccgatcctgggttactcatagccgtccgatcagagtagacgatggaaaagcgctcctggttccgagccggccgccaattcgtggttcctcctcctcacgggcggcggcgacggcggcgactacggcgatgcggctgctctccggcgcctctgcttcccgaatcccctgccccctcctctcactcgcccgcgcgagggcaagatgcttgccggtccccgcctctgccaccgcgtgccgagcggcctcctcgtcagccgcggcggccgcgggcgacggcggcgcgctgaagccgtggttgttcgtcgggctcgggaaccccgggaaagtgtaccaagggactcgccacaacgtaagttgcctgattttgagctgcttgtactagactccctgtagttattagggtcgaatactcgaactggtagttgttcaaagacgaaataaacaaaactgcaacctttctgactgttgaagagctcaaacccattctgcaagtatggaaatggccacatgttagatgaagtatttgaaaagaacatttcaatgtgtagttgtcaagtttttgttgacagtatatattacaaaggagatctcactttgagggcagcaaaattcattatgcgttgctttttgaggcatctaattcatacaatgttttttcgtctgattctcagtttctatgtcttcagtatcagtttcgtggaatatatatattgcacataacttcagtcctttgttcaataaatggtcacgcatgacacagtcccaatatgagtgcaccaatgcattatgtatctaatttagttgctaaccttgaggtcgctcatattgttcacaggttggattcgagatgattgatgttatagcagaagctgaaggtatatccctcagcagtatgcagttcaaggcaatggtaggaaaaggtaatattgacaattaatataattcttttcaactgatacatcttgtgttgaaagaagccatgctatctggattcccagagctgtactttgttcctcaagtcttgcacattaccttttcaactctaacaatatttatgcggttttcataaatattacctataaacaaatgctatttgtttaagatactctatgcttgaatattaaacatgagcaggtgcatatacttatttgaaattctgaaggtagtgctatcaaacattcataacagaaaataatatttaggtcgtattggagatgcccctatcatgctggccaagccacaaacttttatgaatgcaagtggtgagtctgtaagtatactgattccaaaacaaccttcactactagttgttccttcttttttttacctttttcgtttgacaaatcgagttatacaggtggggcagttggtctcatatttcaagataccacttaatcaagttcttgtggtaaagtgctatcctcgagtttctggttgctgttttttttaacagattgctatattttgattcttcattcattttttattctctgcagatgtatgatgatctagacttgccctttgcaaaattgcgtctactgccgaaaggtggacatggcggtcataatgggtactccagctctcttctacttcttttacaaaatggtcgaaactcattacctgcatgtgttaactcagtgattattttactaactttatgctgaagacctaacttttggaggtagataactctgaagttcacctaagcaaaaggatattcttaatttctcagctctcttctacttcttttacaaaatggtcgaaactcattacctgcatgtgttaactcagtgattattttactaactttatgctgaagacctaacttttggaggtagataactctgaagttcacctaagcaaaaggatattcttaatttctcatcatataccgttggcaccatctttctacttgtcctaatgcaatgcattatccattgttacttaagaactgatctaaggtgcatagttgtgagaaaatgcatcagacaaactttaggatgttcaattgtacatttgtttctcccacatcttctcttggggaacctctcatccatatgttcaccacttgcagggtgagaagcattatcaaccatttgaagcagaaccgtgatttcccacgtctaagaattggtatagcgcttctctcctttttcaactcagttaccatgtctgaaaatattcttgcggtgatatcttgcaggcattggacgaccacctgggaagatggatcctgccaattttgttctccgaccatttaacagaaaagaacaggaagaggttttaattagaatgctttcaagaaacccttttttttttcatatttacctcattttctgttctgggcatagcactgtttgtttaagatgtacacatctctttttgcagcttgatttcgctttccataggggcttggaggcagttagaataatggcacttgagggattcaacaagagcgcaacttatgtgaacaccgcacagtcctctgaaatgttgaatagatgataaagtgttcaatttattcttataacataaagattcttatgtcagatctgaatgtttcctatccagtagacacttgcacacatggtggtcattttactctcaggaaatcctgagctcccgaggacggaagagattatttgagctgcagcaacttggtacggtgattttcaccagcagcttaaatacagggaagttagagacgtcacactacatgcgtacttctgttccttacatttgtagccttgtattgatttcaaaaaacaattgtagcactgtaatttggtgacctggtagggggagagagagagagaagcctttttgtcttggtaatctatactttggaaatcgtcagcatactgttaaacaggatttcagtgttccacagtaccttgtctcactttctatatgtatatacaagtgttgattaagtaatcactcatttgaatacgttgttacttgcacacactgaattgagccataccgggtgcattctcctcttgttcttgcaaggccgctgcacgccatgagctcataaacccgtagcaacggcggcacaagatattgttttgcagcacggcaggagccggctggaccgctggaatatgctgctgaaccgccgttcgctttcgccactatttgttgcgtagaaatgtagaatcgcgtccattttcagagatatggtgatcttgtgtgggagcagtgctgcagcggctctggtggggtccccgacgattcctccagcccgtagttactatccatccaaaatcattttgcatgacgttgtcctctcgatctcgattttccacgttccaaatatgcgatggtagttcgctcttgtcccaaaaatggaggatagcgtacagctcagtggatattcactttttttaaaagaaatacacagtacaacagacactcacaatgcacgcatactcacccctataaaaacgcgtaagcaacagtggcggattcaggaaatcgattcgttggtgtcataatgtgtctatcggtgctatagtatgctaatcatgcttagattatggtgttataacatatgggtaaacaattttgctatagttttgccaaaagtcgtcggtgtcgcctgacaccggtccttcttctactgtatatccgccccttgtacgcaaaccctacccctataagcatcttcaaagactggaccagcaaatcaaatcctagagattggtgaagtcactttaggcgtctcactgtcgacgggcacgtcgcctactactgaaagcacaataccgttaaatcctgaaaaatttgctcccatggggagtcgaccccagcacctaaggtgctaaaatttcaatgcaatatgaatggaatgcgaacagtaagctgctacctacatccataaatataagcaattttagaatgagtacacgtttatcgatctaaatggaagaaaaccgataattgagccttgcaatatccattaaagggaaccggatcatttcataaaaagtgaatcgggattttttttttcttagtgctataagattgaaataatgatcttccgatgcttcacgaccaattttgcatgaagttgcttactctctctgttccactgtaagtatatttttaaaaagtgtgtgaggaaaataatagagagattacctaagtatccctattaaataagagctggtagggactgagagggtaattgaaggtatgatggagaaaattttgagatgtaatgcgattaattaatgtgagcaagtaatatgtgggattgtatttattttaggataaaagttaaatttaaaattacatttatcttgggatgggggagtatatagaatatgaatgttgcaaaattgcgattgttgtccatggtattagcattatttatagatgacatggtatctacattagtagcaagccaaaactagcttgactactgttactgtatttggatttaagctcacggagagagtaaaaaaactaaacgcaaatataccatcacaaagaatctgccccacctgtcggcctcctaacggctgcgcgcccaattaacgtccagatcaatcgaatcatccctcccctaaagcctaaaacctccccatccacgtcacccatcctcctccctaattactccccccatcccctcctcctccgccgccaagcacctcgcctcctccgccatggcgaccgccaccgcgtcgtccctctctctcctcttcgcccacccacactcgtccaaccccaggcccttcgccggcgggcctcacctccgccgcccgctgcgcgccgcgccccaccgcgcgcgatgcgcctccgacgccgccacgacggccacgaggcaccgccgccccgcggaggagaacatccgggaggaggccgcgcggctccgcggccccgggaacgacttctcggcgtggtacgtgccgttccccccgacgcccgaggacgaccccgacgagcgctactcgctggacgaggtggtctaccgctccagctccggggggctcctcgacgtgtgccacgacatggaggcgctcgcgcgcttcccgggctcctactggcgcgacctcttcgactcccgcgtggggcgcaccgcgtggccctacggctccggggtgtggtccaagaaggagttcgtgctcccggagatcgactccgaccacatcgtctccctcttcgagggcaactccaacctcttctgggcggagcgcctcggccgcgagcacctcggcgggatgaccgacctctgggttaagcactgcggcatctcgcacacgggctccttcaaggacctcggcatgacggtgctcgtcagccaggtgaaccgcctccgccgcgcgccgctctcacgccccatcaacggcgtcggctgcgcgtccacgggcgacacctccgccgcgctttccgcgtactgcgccgccgcaggtatccccgccatcgtgttcctccccgccgaccgcatctctctgcagcagctcatccagccaatcgccaacggcgccaccgtgctctcgctggacacggactttgacgggtgcatgcggctcatcagggaggtgaccgccgagctaccgatttaccttgccaactcgctgaactcccttcggcttgagggccagaagacggcagccatcgagatattgcagcagttcgattggcaggtgccggattgggtcattgttccaggaggcaatcttgggaatatctatgccttctacaaggggtttgagatgtgccgtgttcttgggcttgttgatcgtgtgccgcgtcttgtatgcgcacaagctgcaaacgcaaatccgttgtatcggttctacaagtcagggtggactgatttccagccacgtgtagccgaaactacatttgcatctgccatacagattggtgatccagtatctgtcgaccgtgcagtggtcgccctgaaggcaactgacggtattgttgaggaagctacggaggaagaactcatggatgcaatgtcacttgctgaccgcaccggaatgtttgcctgcccacacaccggggttgcacttgctgctttgttcaagcttcgagaccagcgcataatcgggcctaatgaccgcacagtggttgttagtacagcgcatgggcttaagttcacacaatcgaagatagactaccatgacaggaacatcaaggacatgctgtgccagtacgctaatccaccaatcaatgtgaaggctgactttgcttctgtgatggatgttctccagaacaagctgaatggtaagatctgagctttagttaaccccccatggccgttatcttgcttattgtcaccatgaactcctttttctgcatcttattcaactgcagttgatgaacttggtgtgtcacagtaatctttaatttgtagtactaggttttgaggctcttctaactatacacataagtggatagagctgttccttgtactttatatatgtatcatataatatgacaataagtggttatgccctagcacttaattgaataattgtttcgaatggatacctgtgactgcctttccgattgcttttactcactattgtctgtcaaattgtcaatgacaataagaaaccctctttggttgcatggtttgaagtctgaactgatagaatttattaaacatttcagttgctgcaaatcgctttagttttgttagtcaagaattcttttctgaaaagcataatataatccttgttctcaagacagcaagtgttatatagcaccgttgtaagtatataagaaaatagttttattagaactacatagcaatgttccatgttcagagtaaactataagtggatatcctaaatttagttcggttaaaactgtaaaatctctagtgtgctggacctatcactatttctgaatagattgtcatataggttgactgcagtaccacagtctttccatttagtagctttaagcctttaagctagattgtgttacaaactgaccaatcattctaggtggtttgaatatcctgtgacaacaaataaaatgtgagattgatctttttgagttattatcatcacggcataatgtttctagtatagcctttcagcttgattctgagttggagtttttataccctatgatattggataacattgagtttcgtctccctgtaacttactactactactacctctcttttttttatttggcgttggttagttcaaattgaaactaaccaacgtcatctaaataaaaatggagggagtaccatttagtgtttgcataactcttccttaatttggttgtttgtggcttccacttcagtttactgtgcctaaaacagtaaaggtaataatggtttcccatcagaaaccggatgctacgttcctcactggagactacattgcccccatagacccaatagttatccttgttacgtgtttatcactgcaagtttgctttgcatgtcttactcagaacataggcacattgtatattgtttcttaatcaagacacacaatcttgtataatactcacaactgtttgttctgctaaaagtcgaaggccttctcgtcagtctacagaacttcggtgagcatgatacgatggtagacttagtttatcttcgctgtgagtcgtgaactgcacaaggggaagcgaaatatttgctaaccaggtcaggtcctcgttgatctgaagccactgttattaccacataaaagtcaggtcctcgttggtctgaatccactttcctttcgcaaaacggttgtctgttgagggcacacaaggaggagatgcagttatctcaacaatgtccgtcacttgagctagagctatggagtcttctgctaaccctcttactgatagttgattccttcccttccctatgttaattgtcaaggcgaggaaccgaggaatgagttgttggactgaatccagcttcacaaattgtagaattctttagatttgggctatctgttccatgtcaccttagttctaaccagtcagacatattgtgggctttgacactttgaccatgttagtgggcttatactactagtactctataggaataagttcatcggaggtctcttaacttgtcagtgaatccgatttccgtccttcaaccattcaaccagaaaaccagatataaagggtccctcaactatcaaaaccggtgcaatataggtcattcaaccagaaaaccagatataaagggtccctcaactatcaaaaccggtgcaatataggtcctatggcggttttcactgacgtggtgcctacgtggctaatttgactcggttttcatatgacgtagctagtgacgtggcgcttacgcggtaatttttatttggaaaattgctatttgtggtcccacatgtcagttacaccaaaaaaattcattcaaaaatggtgggacccatatgggccccacatgtcattcttaccccctcctcttcttcctcctctctccccaactcccctctcctttgtcctctctccaggccgggcgaggctaggcggcgcgcggtagtcgggagaggagggcggtgcgaagcggccgggcagggcggcgcgcgacggccgggagaggtgggcgggcgcgcgacggccaggagaggcgggtggcgcgcggcggccgggcgaggtggggaggcacccatgaccccgctccgccgcagcacgtcacgcagatgcgcgccacgccacacgaaggttgagatggcgctggcagttgaagccgacggtctggcgcaccatgttctgctccttgtgttggttgcccgcgcaaaccaacgtgacggggaactccacggtcaagctgttccatggtggcgagcaatgagtcgtcgagcaacatcgacttgttcccatccaccggcgacaaccgtcggttgggctccaagaccgactccgacgacgatgacgacataccaccggactgaaggtagttgtaccactcgcgcctcgaggtggagcctcccgtcaatgacccatgcgacgaggccacctctgacgcagtgacgcgtgggtgcgtcggcacccggtgctcgtctggctcaccggcaagcacccctttaactccgagccgctgctgccgtgcctcatgcttgacggtttcatcacgccgacgccagtccactacgtgtgcaaccacggcgccgtgcccaaggcggactggtcgacaaggatcgtggaggtgaccgggctcgtcaagcgccccgcgaggctccaccggcgcggagccaacttttattcaaccgagtcagccattgttgccgaagaggggagagagaggagaggagatggggagaagggaaaaggaagacgagagtgttaaccattggacgagagtgttggggcctgcgtgggtcccatgctaactaagcttatcatgtcagctaaaaccagacgtaaatactgcctaggacctcatatgatccggttttgtaaattgtgagggactcgttatatctggtattttggtatagggacgaatttcagactcgacaataatttgagggacgactcgacaataatttgagggacccaaagtgaacttattcctaccatatattggttaggaataagtccactttgagtccctcaaaatatatgtataatctaactcgtatccccaaactgtaataccggatatcttaacccctcaactattaaaatcaatgtattttgactccctcagtggcttcaaagcagtttttacaaaggtgtcatgtttacctcggttgacttagcatatggaaccatttgtcagtcacccttctctttcttctcttcatttccttacccatatttcctcactctctcacccatatttcctcatgacggcaaaatggcagcatggcagcggcgagataatagggtggtccggcaacagagggtgggagttggggactccgttgttttggcacccagagacgggcacagtagccatcgagcggcagcaagttgagggagatgggtggcagtggcttgtgagcttgtctaacgctggggatccaacttccaaggagggcaaatgaaggtggcaacctgtagatctcgctgccctcgatcgacacctatagctccatgccgttgtcgcctcaaccagttgaacgagcttttccttccaaattagttgcataaacggatttctctcgatttcctctcctttccccccaagaaaaccccatcaatattgtgttaaatcccgtgaatttcggccccgttctaatcccgaagaactcaggatgaaccctagtttttcgccactgaatccatctgtttctagcccggtctctttctcctccacctatatatagcttgcctaaggtcccctcttccgattctaaccctagtccgagctcgtcccatgccctagccgcctccttgcgcactcttcgccgaaggccaccgctccagccgagccaaccgtgccaccacgtccgtcgtcatcactgtttggttcgtaagacgaaagagaatctcaactgcaccttcgcttcacttggacatcaccggagcgccgccgtcgacatcaacccgaggccaccgccttttcaagcttgttgccgcttgccgtcgtaattgcatcagtaaggatcgtcgtgttcccctcttctcgcttgtgccctcaatttccgctgtcgcaccttcgtttgccgtcacgcatggccaccgccgcgcaccaccaccaggcactgccactgtctacaagacactgacatatggggtccatgtgctaactcagctagttaacggggtcaaagatgccacattggacgaaaccacctcccaaaccgttcgaggagtcgatttgcaacggtcttatgagttggaggatgggttgtatcggttttgcggtagagcaaggtttacgattccgacaggcccttccgttccgggcatcggcggaattcggaatttcgcgaaatccggtggaaaatcggtaaattccgaacaaattttataaaccaaaatttgaatataaattccctaagttgccgacaagttctcgaaaatcggtcggttttggcgaaattctgatcgaaatcatcgaaatttcgatcattaatttgtaatagaggtaattttctgaatttttttttcattatgtaagttttagtaaatacacataatacatcttttttttcataaatttatatcccaataagttatatgaataccatagtatttataagattttattttattttttcttttttatcaatttaaatttaaatttagatgaaactcctcggaatctcaaacggtttctactttcgagcctcgttggaacgtcgaaatttcgcgaaatccgaccggatttcgtcggaatcgtaaaccctgaggttgagggatgcgattcaaccaggggcataagttgagggagtcaatgtagacttgttctctctggatatgacatattgtgggctttgaccatgctattgggcttgtagcaaagttgttacactttatacccttcaaacatgataccatgcaaatatagcagtatatcgagtaggctagctaaagtttatctgcccttgctcttataaagccataaagctgcctttgatttttatttttcttttccttttctgggcgagacttccactgaaaaagttcctatgggcctgtttggagaactatcccagggatattttttgggctaaagattatcccaccaaaatagccccctaacaaaatagccctcttgctgtttggatccaaaggctatttagctattattgtaccatcccaatcatttgcctccactaaaagtatacagcagccggatcttctatggctaatccaatacaggcacatacaagcatacacaattccttacaagcacaaacacataatttgtctcaaatatataagcaagtatgtaaaacaatcgtgtcacataaaagatacaattccatacaataatcgtctcacataaatatacaattacataaaacaattgtctcacataaatattaaaatccatacaacaattgtctcacataaatattaaagtccatacaacaattgtctcacataaatattaaagtcc

SEQ ID NO: 9147 - DNA, 66864 bp, Oryza sativa
cacttatttggtcgcacgcccttgtgtttgctaatgagaaaaaacttggcatttgccttggtcctgaagatgtaaatactgttgatgcaaatacttctgtaaggcttatatgacatctagttattttccggacgtgaacgcatcatatccttttttttttacagaacatcaatttatatactccctccgttttttaatagatgacgccgttgactttttctcacatgtttgaccattcgtcttattcaaaaaatttatgtaattataatttattttgctatgagttattttatcactcatagtattttaagtgtgatttatatcttatacatctacataaaatttttaaataagacgaatggttaaacatgtaagaaaaggtcaacagcgtcatctatttaaaaaacggttatctaaggtagtataaatcagtgacatcagaattatgctgatgaggtgagatgcaggttgctacacacaagtagtctggtgaggtgttagtactgcatcgtcgtccgttgacaatttcttgctgctcttctttttttaaaatgtttcctatttcttttcttaggacaaagatgttatgaatggaccggtttaaaacagactattgacaagattattttatcttacatggttatagatataaattaaatattttaataaataaacttcacagatagctcataacaagggattggaagaaagttcggactttaaagcaaagtgagtttagatcaactgactaggttgcttgtggtagaaccagatcaccccgttcaagttataaagttgacacatgtgtttgtatttacagctaattattatttcagtgatagacggtgtacctgttgatagtgaggcgttcgtagtgactttcggtagtgaggcgtcgttgtattgtgtttctgaaaaaaattctttctttaaaaagacgtcgagcaaataatttacgataataatctacttgagtagttaaaaataatacgagggccagttacccctttgatcgctaaatttttctgttccatgtgaataaagccactactcggacgccaaagggcctgtagcctagtggttataaaagcctcagaaagatgtcgagcaactaatttacgataataatctactggagtagttaaaaataacatggggcccagttacccctttgaacgctagattttttttccatgtgaataaaggcattactaagatgcgaaaaaggatatagcccctagtgattacaagagtctcagtagcccctgtttccatttgaggtttcataacgagcctgaaaggacgtaaatacggttgtgtttagatttaggggtgtaaagttttggtgtgtcacatcggatatgccggtacacatttaaagtattaaatatagactaataaaagaactaattacataatccgttagtaaaccacgagatgaatttattaaacctaattaatccgtcattagcaaatatttactgtagcaccacattgtcaaatcatgtactaattaggcttaaaagattcgtctcgcaaattagtcgcaatctgtgcacttaattattttttagcctatatttaatacttcatactccctccgtcccataatataagggattttgagtttttatttgtactgtttgaccgctagtcatattcaaaaaaatttgaaattattatttatattttttgtgacttactttattatccagagtactttaagtacaacttttcgggttttatatttgcacaaaatttttgaataagacgagtgatcaaacagtgcaagtaaaaactcaaaatcccttatattatgggatggagggagtacatgtgtacaaacattatacgtgactgcgtgctgctcttgaagcgagagcgggtctgcgtgctgctcctgaggctcgcacggctctgattcgcaggggggctaataaggtggctcatgagcttgctcagctagctattcggaatagggaggcagtggttttgcgcctgcaggcgccggtgtgtgttgctaagcaacttgctaagaattgtaatccttattctgaagtttaataaaacctctatcttaaaaaaaacattagacgtgatagagtgtaaagttttacaggatctaaacagtgcctacatcctaatcgaatcaaaatctcaaaataaaaagacaaaagagtcaggttctgcatcaatcagagccgcacgtccaccctaaacgccgtcccgtctcccgtgtggtcgcgaggccgtgtgtgaggcagcgagccagccagccagccaagccaaggcactcgagatttcttcctgctccagcgcccaaagcccggcgcaaatcacaaccttagtattatttcctcctctctcttcccctccctcccttccctcttcgtccctcctcccctcccccccgccgcgatcgagacggcggcgaaaccaacaccggaatccgaggggggatccgccgcggcttcgctaccctagcccccgccccttctcgaatccgcgccctaaaatcccctttgcctccccaccccacccccgggcgcgccgccatccccccccgcccccgcgagcccctcccgatggatttggatctgtggatctctaaggtgaaggagggccagcacctcgccgagcacgagctccagtccctctgcgaatacgtgagctttcctcccccccgccctgtcccccgattggttcggttattagggtttttgccatgccccgtgctctcgcgcggcggcggcggcggcggcgcgcgtgcggttgctagggttcgttggtagggggtggacgtggggggaaaccgttgccttttgctttccgtactgaacttgagttttgttatgtatatggggtcgcgtgtaaccgcggctgattttccgctgatccttccaggtgaaggagatcctcatcgaggagtccaacgtgcagccagtgaacagcccggtgaccgtgtgcggagacatccatgggcagttccatgacctgatgaagctcttcgcgactggggggcatgtgcccgagacgaattatattttcatggtgtggcttctggagcattttgtgtttatgtgtttctgtgtgtgtgagcttgttggttgagatggttctggatgatgctgtgttcctgaattcagctgtgcttcacgtgcagggtgattttgtagaccgcggcttcaacagtctggaggtcttcaccattctgttgctactaaaagcgaggtatttgcctacctttttgtttgggatcgtgaatgttctgtttgtttgttcgaaagctttgacctttctggcacatagctgcagctgcttcactgttccgtttggtattacagtacttcgatgttatattacctttttctacagggacattacatgaaaaaatatgtgaatggttgcagcagtagtttaccttccttagatgtgaatcatgttgttgtatggtcctgcctgtcgtttgattatatgccaaatcctgttgtcttttcattactgccttctccccttattttgcctggataaccttgagcaatgtatggggtcaatgtgttgttctatacttctatataatacaaatagctcccaggagttgaactgaaatgctgaatagttgtaggatgagacacactgtgatctaattgtggctcgtgcaattgagcctagttggctgaattttgaaattggtattcctgttgttgtttcacaacttggactgctaatttgagtagaatggttgcactgttaagtagtgaacaattcctgtaagactccctagtccttgctagtttcatttgttcttggttgcactcattttctcaaggattctgatttatagtttgtacccaagtgttactatctgtggctcattcttgctattgggtttcctgattgtgattaggtaccctgcacacataacgcttctgcgtggaaatcatgaaagcagacagttgacacaggtatttcctggtgcggacaatgttttcatttattatccaatttatttcttttcttgagatttgagatacttatgttgcacttttaagtgttgtatctcaactgctctgatgatttatatgttgtatctcaactgttgcatccaagaggtcctgttttagttgtttgttggcctgtacatgcatgtatgctcatatcaaacatttgtaggttttgtattaattatctatgagggtatcatgcgttggacataaatatgcatagctccattacatacaattctgattctggagatgtattaactcgtattgcttttctgcctgagcaatgtcaaataatccggtcattatatctatgattttcccttggtttcatgttcgtttcagtgtatgcacattggaatgaaatacacgcacatgttgcatactagtgtatctttagttcctaatcagcaccatatgatgagcaacctgtgttgtcatccttagattttgtttaatgagttggaatatgttttttacatggttccttacgtttcctttatttgtacagttcatcctcctgacagactttgtgctcatatatctgcactacacatgtatttggtgcttatgatgcagtaacacatagtatttttctaattttaggtgtatggtttctacgatgagtgccaaaggaagtatgggaatgggaatgcatggcggtattgcaccgatgtttttgactaccttactctttcagcaatcattaatggcacggtaagtttgtttggacattttgtaagttgtcggtttataatttttgtgccaaataatcatcaaaccatatgctaaaaatccaggttctttgtgttcatggtggactttctcctgatgtgcgcactgttgatcaggtttgctgaactttttttcttgaagtttcataagcatcattaagtctaagtgttgtttatcaaactctaattaattgtaatactaacattattattttgagttactgtactacaccttgtcgatgcaacaattagtaggtctggcactaagttcaaaagaattagataattctgccttttaagtatgaatatcctcagttgatcaggtgatatccgttgaaccttttgaaggggtaaacaactgggtgttgccattttagataatttgttgaaatagtgtatgctattttcagtgacacatatatctctgacccatcctttaaagaaaaaataaatggttgttcgctaacttagttgtggtatacttttctttgtcgttaaaatatatactttatatctgactgtgtactattagaaattagttggttcatagctttgcatgttcacaattttttagtaagacatgattctgtgatttgttttatcttaagatatattgttgtcagataagaattaaaaaccgtctcaacgcaatattacaatgaaattaatcatgtgattgaatatccttgttaattctattgaccagattcggacgattgatcgcaattgtgaaattcctcatgaaggtcctttctgtgatctaatgtggagtgaccctgaagaaatagagacatgggctgttagccctcgtggagctggttggctttttggatcacgagtgacagctgaggtatgtacagtcatttgatgatttcttactctatttttcagagagtgtgtacagtcactacattctggatcatctattaattgtttccttgtaaatgtttttcatctaccttttgcagttcaaccatattaacaatctcgatctagtttgccgagctcaccagctggttcaggaaggcttaaagtacatgtttcaggacaaaggccttgtaactgtaagtttctgttcacatgtcagtccagataatcatagcattgtactaagcttgtatttcttttttcaatactgttatattgatgctcacataccctgcaataccttttttccaggtgtggtccgctcctaattattgctacagatgtggaaatgttgcttctatactaagcttcagtgagacaatggtatgttgtgcacctgtggtggaagcattatgtaattgcatcaaacttcatataggagtactaggatttgctagtgcacttgtgcacacacaatacagagatgaaacagcgctaggcacccaactgcttttgtgtgctcaacaataacaaatgccaccccatgctatctataatctactcagcaatgaattaacgatacacagcactttggtttgactactgattgggggaaacttaagttggactcaagagcaactagcatattcgtttctagttgtgtaactgtggccacctcaataaaccattcctcagggaatagaagttccaattgaacttagctcatctacaagtactggaagatttcttgctactagtgtgaaattgttatcttatctgtggtctgactcttgcattagttgatctgaatatgttaacatgtcttcttttgcaaatactgctgtgaagtatctgatttgtttcatgagctctaaggctcgcagctgattctgatcttttatatcctttgtctaaaacatcaggaaagagaggtcaaattcttcacagagacagaggagaataaccagatgcgaggaccgaggactgctgtcccatatttcctctgacttcatcaattgtacaattttagaagtcatgtttttatctgtaagggttaaagatgaagcagacctatttattgttgtaggtccaggtcatagtgcaatctaatgcgtatgatttttctgttcttttaaccacatgtacaatagaccatttggagtgtcatcactcctgtattccttctgtggcgttgtcaagttttgtttctgatttatttcgggtcgacacagtttgccacacaggaggtttgggccgttattgtgttatatttgcagctacagcttcccactcacgtgatcagataggcctgccccgtgacttcaaaatttgcatgcgatttgcgcgtaggtcgtatcatgtactactttaatattataagttattttgacttttttagtttagcattttaagttttattaaatttatagataaatttagtaacattgagaacactaaattagattcaatgaatatacattggtaatatgtttgttctgtgttggaaatgctactttatctataaactcaatcaaactttaaaaatttttattagaaaaaagtcaaaatgatttatgaaatgaaacggagtacactatcctatctcgtcgattatgtaagattgaccacttacattcggacacgtttatctcattgaacttgttaacggatgatgaaataagttgcatttgtgcaagtcacgttgattctctacatgatttatagtacgatagtacattatttgcacggtaaacttgtggcaaatccaaatattttctcaatctcaaaatataaagctctaaacacaaataccataagagaattattatcatttcttcgctttggtcacctcaaggctcaagcacccaatggtattagaaatattaagagtgaaggatttaaaaaaaaaatcacctaatggtatcaaaggtactaaaggattaaaaaaacaaatttacagtagagggatgtgctagttaattatacgtgtatataccatatgttatgagacattgtgaaaaggttattcgtcttatattttgagatgaagggagaagaagcgcctcatcttttcgcttacacttatccttatcatccaaaatttgaattttcaaccttaaaatttgaaggtgattttaaagtttctttatcaaagtttatttttcagcatttgcttttagatcactaagaacacgtatataaaagttttattcacgtattatttttcgtttgtaaatatgtcgttggtcttattctgtaggccacaaaactttaaaataacctggttgctattgctatcaccgttagcaatccaccaacgaaataatcatggctttctcttgaaatgacgttccctcgttgtttgcgtgtaaactcaaatagttatggaatggaaaattttgagaagatctattaatatatgatatatcactcctccacaaatatgtaagttaaaattttacttttacaagttgaaaaaaaattaaactacaaatattcaccgtaaaatttgtttttttcattgtaatacataaaagttaaattttaccttgtatatttttgattgatttactacgtattaacctatccttttttttcatgaccattactttgagtgatatgtagataatgagagatgtctcctggagagttccctttttctcattcgagccgaagcccacttcccattgcctcccgtggaggaagcggtggagccactcagccatgggatgacgggaagccgctgccgccgcctccgacgtcgcgctcgcattcttcaggttcgggggcatcgccttccctaccgctcgtgtgtctttctgttcttgattacacgtgatatcgctgaagattttacagtacaaccaccgtatatatagctcccacgtaccatattctcctgtgctggttccactgcaatctggtataggatggagccgagcatctggaagtggcagtcttggtcgcggcgggcggtggcggcaagcctgataactatagtggtatacctggtagtagtagttgcttgttcgcaacaaaaccagcgcatatgcccggggcgacgcgaccctccattgcgccggtcgcgggctcgcggcaacgaaaagatccctcacgacgcacgtgacgtgagccatcgcccgtgcccgtgccgcttttccaacggcgcggagaaggcatgcccttccgccgccggtctccctcgtccacccgtaacgaacaaaagaatctcgcacgcacgcacgggcggaggtgcaacgagtgcattgtggggggttggcacgcggccgcctcgttgccgcccgcgcgcaccgtagagtcaccgagccgacagctaccgcgtgcggctgcgtgactgcgtccccgccctgccgtgattccgcagcgttcgctgcttcgcccatcctctgcctgtgcctggttggggtggtttggccggcgcgcccgcgggcagcggcctcggatcatcctcacgtgatctcacatccgtggtgctggttcgctgctgagcctgatctcacgtcgcttacctgtctgtcagggtcgggtcgcgccggctgcccggttgctcacgacaagtcaaacaccatgtgttaggctgtgtttagatttaaaatttggatccaaacttcaaacttcagttcttttccatcacattaacctgtcatgcacacataacttttcaatcatatcattttcaattttaatcaaaatccaaactttgcgctgaaagccttagtaccgctgtgccaaccatcggttcggttgccatcatattccaggttcgagcattttttttgcaaaggacattctcctttgcaaccgttcaaaactctcaaatcatgcaaactcgaaccgtgccagacatattcctcctgatattgattcctgaagaaggggggcatcgcatctttcggcaccctgatttttttccctcgatactcatgatcattcaggtaggggcggcggtaggaaactatttcactgttcggcttgtctgctccccatgatttaattattcattggtctttgattaaaaacgaattaaaagctcaccatgttcgcaactgcccaaagtgcacgtatgtttgactagcaacggattactctgaacggtaagcagtttaacccgctgttttccaatttccagcctgtaatcaagagagagaaagaaaaccagtgatccactgttcttacggaacagttacatccagcgaaatattggggatcagttatgatggaagaagcagccgataatgcagtgctatcgtctcgtacgatccgcttgtgtgcgcgcgcgcgcgcgtgtgcaacgatcgaacaatctggaaccagaggaaaatgatgacaatcggatgtgcattgattagcaacctggccttgtttgattggggtgtgatacattgggggtggccctcttccttggcaaaaaatcatcttcttttttttctcctaatcatgagcttaggcactaaccaaagatcgatccacttggtggacgatctggtgatagttgcagcaaaattggtgcgaaatgatgggagaaataaaaatgctaactaacttgcactatcttctccgatcatgagggggtggttgctgctgctgcggatgcggtggcgccggcgacggggatcggcggctgccgcttggagttggagacgtcccccgtggccggaactcctggtccgccattgcgcgcctgggccgtccgggccggaagtcaccgagctcggcgtcggagaacgacgacgaccccccgggcgcgaggcgccgctgcggcctccgcctcctccaccgccaccgccagcaccgccgcgcgacgcggacgggcgcgcgcgccacgcagcagagcgccgccaggggcaggcacgcgcacagcacgcagcacgccgccgcgcactccgcgagcgccgcgtccttccctccaccggcgcccacgggtggcgccgccggagacaggtcgcgcccgcgcccgcgcccgcgctcccgctcgtcccctcccccccgccgcttcttcgccgccgccgccttcttcttcctccgcggcgagccggctgcgtccatgcctttgccctgccctctctgccagtctactaccacctcgcgctcccttccctctgccttcgtcgtggggagattcgattgggttgtgagttgggacgaggcgtgggaggtggagacgagaggagggagtgcttctcgcctcggttgccaatactcctccacgtttgaacgacaaacgcctccacgcaagttttttttttctttaaaaacttttttaaactgatcttaacaacactggtcagagatagaatgggatatcggtctctttttaattgagcaaccgaaagcctcacttaagtgagaatagacctggatatcttttctcaaagtagtctcattttgaagaatctggtttattaatacgaccatgggtatgtgtatgtcacttgtttaattaggtttggcttgtttatgccgaacaatttggagtttggtattttcctgcctgcagtggatcgatcggttatagatatccggtcaaaacgcagtcacctttcagaacggcacaagtgcggttactatttgcaggaccgcgtgacgactggctgccacgctactaggcgctccacttggccggcccccggcgctttgctttaaggcagtgtcagtgtgtcacagggtggttagttcaggggtcctatcttttcttttccagctgcaacaaaagtagggttgcacacttgcactagcttcagagaaaagctgatagcgatcagcaactagcaacttgagcgaggtgttaccgtgttaacactttgataattgatagagaagcaaaatggcttcgctaacgagaaaggaggtccattacgaagatccatggtccgatggccaacaaaattcgattggcctaaaattagaaaccagagctactcacatctattttacgtaatatttgtgagaaccatgatttaaatccttgtgaaggtagtcatacatcaaggtatagtccgtaacaaatcatgttgagaaatggccacgtctagataggaatggccaatggcccaactggcccaattaatttttagttttctactccgaacgttgtattctagcatgtgttggtttggagataagatggaataggttagactcatccttgttctgacggtctcatctattcgtttggcatgagggatgagattatcctactttttaaggaacgatccacatgtctgtgagagagaaaaaatgggtgggattgatccattagtttttaggtaccagatcaaccttaggggaatattctctgttagggatcatcccatcccacatgtccctaacctaaacagtctaaaaaataggttcaacccaatctgacccatcccaacctttgaaccaaatgcatagtaactaaattgatccactacttaaaaatcctaatatgatatcctcatatgtgccatcggttcatctaaaatcagcacatatggggtttttcacgtcctattgatcccttatatgggtctaaaattaaaaacctgcaccaacaacacttgtaaatgccattttttaaaagaagacatttatacgtgtgatatcattgccttttccttaaaagaaaaactaacacattcgagggagttgaaccaacgaaccaagcctggcactagtttttatgcctcggaatctccccctccgcctcattctctctcttaactgccgcgagctcaggagcagccccctccctttcccctagcctagctgtgccgcacttccatctccctgtcgagcaattgtggcctccttgatgtccccacgcctccctcgctcccttggcctccttatcaccatgggttgctggttcctgtgagctcggcgctagattcgatcaccgagaacttggggatggctagatccacgcgcaagtgggtcactcgatgtcagtgagcgagcgggcagacttcacctatagcgagtggcggcacggatgggaccacgactacggaggtgaccactagcagaatcggtggctccctcccccatacccttggcaagttgattttttatggattcggtaatgatttgttggtttttccgatctcccttgttgatgttgttttctcctttgatgctgaaatggataggtaatacttggatattagatggattctgatttgagtagtaatgcatttgtgccaaaaatttgtgattcactttctgtgatttgcgatgttgataaataatttgtgattgatgaagagcaatttgcgaaaaaaaaaacttgaagcaatcgactcgagtcgattcgtcttttttttaaaaaaaaaatcgtgcacctcatctatgccccctcatatctgtacccttgtgatcacactgctgattgagcaaaattatacttgtacacactaaaagtcgcctcactattttgctctccttttattcaagatgtacacatttgcattctgaacaccgctcaacagagactaacaaaatattttcacatgacacagtaccaaacaacttcttcatcgtcaaagcaggcgagcaaggcagatagattgccattaggtagaaccagctggcgaagccaatttagccagaaatcccttgtagtgctccaggagcttcccggcgtcgggcatcgcctcccggacggcgtccaccgccaagaaccgctccgcccacgccgccaggcccgggaacttggcctcgtcgaggaggctggagccggccacctcgtccaccaccttgaaccacaccacgaagccgccgaccacgacgtcgacgagcccgacggcgtcgccgccgaagaacgccttccccttggagcactccacgaacgctcgctccagcacctccacctgaggtacggcgttcatgaaggcctccgctctctgctccgccgtcgtcgccctcatcagcgccctccacggcgggaagaacttaatacagtatcaaaacaaaaatgtcgatctctctaatattgatttctcaatcaccgacatgaacgttgctatctatctaaggttgatttcttcaggaagatgccatcgattaccgtgctgtcgaagtaggtcgcccagaagcgagcggtggcgcggtcgtgggggtcggccgggaggagcggcggcgcggccccgggccaggcctcgtcgacgtactcgagaaccacgcgcgactcgcacaccggccggccggcatggatgaggacggggaccttcttgtgcaccgggttgctcttgagcaggagctcgctcttgccgaagaggtcctgctcgatgtactcgtagctcaggcccttgagccccagcgcgattttcgcgcgcatagcgtacgggctgtaccatgtgcccagcagctgcagctcgcctcctcctcctcctcctcctcttcccgccattgctgccgcgaactgtgtgagtatgatgctgttgttgtctggatcggttttacggtttgtgtacaagatgggtataactgtatgtctttataaggacatggcgaatttgttaagttcatctatcaggtgattagtgtgaggtttgagtgtttgactgattttagttaagctgtgtaagcaaagttggaatcggccggcgagtgcgcggcgataggagattgctccgtgccgttgctggcttggagaaggggccacaggccacttgattccgtcagtgttgattgcgatgttgtacatgcgtcgaccaaacgtgacagcagatgatggagttggtatggccttgactagtggatgaatgattgagcttgacgaggtgattagttgaagtttatttttactgttgtagcagtagtagctacgtacttactccgtcccattttaattgcaaccatagtttttcgcgttcaactttcaccattcgtcttatttaaatttttttaaaaaaatttaaaaacataagtcacgagtaaaatactatttatattttattatctcataaaatttatttaaataagacagatgatcaaagttagggcgtcctatctgcggcagcgctgcggctgcaaaccttgtgttgtgcggctgcagctgtgctgcttgcagctgcagctcgctgtcgtgtggcttcaaaaagggcagccgagcaggcccttggacgcagaaatttatggttgcgctcaaaatagaacggagggagtaagataatacagtatatatcgtatattggtgtctgtaactacttccagtccacgatttcaaacatggagaaccattttgtcatcctccaaaaatgtcttcggacgcttaaaaggaacaggaagtggatttttatctcttaacagaagacatacgctcgttttgtacgtgtcatcaaaaaagttttaaaatttttgacatgatagatcaatctgtcataccaattctttttttaagactttagatgattttttgggtgacatgcaaagcgaggggatgtaccttaaggatgaaatatagttttccaaaagaatgcaacttaatggaacgatacgaatttcgtgacaaggaagaacgatatttgccgtttaaaagtgtgcttagcaaatcaactaagtggttcgtctagaaacactaaagtagttcactgaacagcgtgtcaacatttccctccttttatgaaacaaaaaagaaaactgttattcatcacgcgtgtcaacgtactcctcaaagtacagatccccgaagcagaaagtattttctacacctagaaaatccacgaagacgaaagcaggcaacgccgttgtgttcaggttcagctcgaaccagcgcctgcagtccatttggccaggaaccccttgtactgcttcagaacatcgccggcgtcgggcatcacctgcctgacagcgtcgacggccaagaaccgctccgcccacgccgccaagcccgggaacttggcctcgtcgagcaggttggcgccggccacctcgtccaccaccttgatccacaccagatggctcccgagcgcgacgtcgacgagccccgcgtcgtccccgccgaagaaggccttccccttggagcactccccgaacgctcgctccagcgcctccacgcgagggacgacgttcttgaacgcctcagctctctgctccgccgccgtcgacctgaacagcactttccacgacgggaaaaactgcagaaaaaattgcaaaggaaatcaaccaatcaaacagaattcctatctgccgttctgatgtccagtcattataccgtgtcgttgacgtagttggtccagaaacgcgcggtggcgcggtcgtagggatcggcagggaggagctgcggcgtcccggtggctccccaggtctcgtcgatgtactccaggacgacgagcgactcgcacaccggccggccgccgtggatgaggacggggaccttctcgtgcaccgggttggacctgagcaggtggtcgctcttgctggagaggtcctcctcggtgtactcgtagctcagccccttcatccccagcgccactctcacccggatcacccacgggctcgaccacgtccccagcagccgcagctctcctcctccaccacgtcctgccatcgcggactcgtgaatcgtgatcttgcactgaagtctgaagagaacgagtgtatatattggctcagttgatcatcgggtatgagtagcaagttgagtggccagtgagtgattccgtcagcgctgccgtgtgccgtggaaaggaagaagacgagatcgacggagtggaccagctggccagtgggcattgggccactgcatccataggttgattcagctttggtcgcgtcgggctagtagtccaaaggagtaggaagacgagaaacaggttacaggggatcgagagttcgagacggagcacggcagcaggcattgcgcagctgggccaacgggcctgcgttcggagacagagggattgcaggttgaataagttcactttgactgccttgactaaccgggtatcttgaccctccaactattaaaactgatgcaatttgtcttcctcggtggttttgaagagcagtttcgctgtcgtgcgtctacatggtggtgttgaccagttttcgtcctacgtgacattgacgtgatgcttatgtggcatataaaaattaaaaaaacataaatgtgggcccactaacattctctctctactacgtcatggagctcgagctcctccttcgccgcgaccattactccgctttcatctgctccttacccacccctcctctcctcagtgcacctcctccgctgccacggcaatgccccaacccccaacccctagtgctggcggcacgccagttccctagccccctctccgcctctccggcacttgctggtggctatcgccgccacctgccaccccaggcccatgccaccgctccctcgttcgccaatcggcattgtcgatcagggagagcaggagagggaagggagatataaggggtacagtgtcaacgagtatgacaaatgggtcatagttttttctctctctagtcacttacatatgggcccacttctaatttgtgactgggctgccacattatcgtaggggttgaccaagtcaacgagccacgtcagcgaaaacactggttccaatatagtttaagggtcaagaatcaagatatatggtattgtggttgaggggtatgaatcagattggagcagtatttgagggactcaaagtgaacttattccattgcaggttggggacgcccggaagtctggaacgcagagggcatatataaatagatgcataacaccaagatagtacatgtgcaaaacgagtacgcaatgttggttgatgtctggccaccgagccagaaaggagagcgttgggcttagcccaccaaagcccacgcgatccctaacattgaggaacgagtctcacgcattctctcacacgtttctctctttagctttatgatcggaagcgtcattttcctcgagaaggaatcacccctgatcccctcaatacgcataaaaagggaaccttaaccccgtgcacgagcgacgactcatgtacgctaagccaattctccaaaccctcaaactaccgattttaaggcgtgttgaaggggagtgaagggcgaattcccatcgccgtcactgcatggtgatcttcatcaccgtcgcctcacaactactacaccgacgcatctaaggcaaccatatggcttcttcatccggtcagtacaccatcaaattctgtataagagaaattaggtgatcgtgcatagcctaagatcatgattttaagatttaactccaatacgcaaaagtagaagaaatgttacatgatacgacgatattttaacgaagcccctgtgtgaatgtgcaatgaaccgatgattcaatggtcactccgagttcacagttttgatcgatgaatctcatgtactgacgcacgtgatccaatttttgctctaatctatctctgcaaaagacacatgcgtgaacttcaaactacagcatcctcatcgacgaaacgaaatacaaaccactcgcaaggcagtggccggaaaatatctgaaagataccgtttgtcgtactccttttcttctctattcttctcagtacttctaaacttgtactctaatagtattcaacaatccacgtcaaggttcgtttggtaaaactctaattcctaaaatcaggagttagatttaaaggagagttatgaaggagcctaaacctatgagggttttttactgttgaggttgtgcaataccaaatcctgaccgttgatctagcatcattcaacggttagaaatcatccgtacctcatggtactgcacctcctcattgaagtggtaccattggtggaagggtatttctatcctttcctgtttcacgagaggaaaaatcggggagagcagcgagattgcggcgagaggcgcggcggctcggtgcgacggcaatcggcgagaggcgcgacggtggcggcagcggcgggctcgatggccgacgccggcagcagcggcggtggcggcgacggctggatgcacgacgacagcggctggatgcgtgacgcgtgacggcgacggcaacctcgatgggcgacgacggcggagggttcgatgcgtgacggcggcgctggatgcgcgacggcggcggcgggctcgattcgcgacggcggaggtcgatgcgtggcggcggcgatcaatgcgcgacggcggaggtcgatgcgcggcggtggaggtcgatgcccgacggcagcggtcgatgcgcgatggcgggggtcgatgcccgacggtgggctcgatgcgccggcggcggtcgatgcccgacggcggcagcgagctcgatgggcgacgacggcggcggcgagctcgatgggcaacgacggcggcggcggcgagctcgatgggcgatgacggcggcggtcgatgcccgacggcaagggcggcgacgagctcgatgggcgacgacggcgccggcctcgatgcgggacggccctcgatgggcgacgacgacatggaagaatggaagagagacctaatttttgttagcccaattatacccctgttaaatcaacggttagattagattggtacctcatgttacctcgtacctcatggtacttccttaaggatgggaaagatgctctaaacctatttctatctctctagtttattttgtgagagcgttttatccagctccattcctattttggatgagctgaaactatttagctgacctccaactctaagagatgcttttatttggcgtaaattgagcgttgtaagttattggctagtcagtttcaaaataataacaaaaaattattggctagtgaaaaccaacaactgcgaagttcagacaagaacaaggtggataatataacgggatcgacatgttgtgtacttgtgtggtagtgagctcctctagtcatgcaagcaggatagacccgcgagctgctacacttgtcctcatttaccaacacacaagctctcccttgtcttaactgttctccaaacaaataagtacttccaagaatttttcgttcgaaagattcagccttggtgcaattcaccttttctttggtgcgataaaatggaggccgccatcaccatggatgagaacttgggacgaagtgggtcatttcgagctgcgatgagcatctttggcgaaagcatcaacgggaggaaggcagacaagaacagaggaactgttccagcccaagaggtagtgtctgaattcacacgcttttctgattcttgtgaacaaacctcaagttcaacagttctcaatttcattgtatttttatacgatttctgtaaaaacgcactgtatctgtatctttatatccatttcggtatatatatgtgcagaatctgtcttctgaaatgaagcagctagcacaatccggtctggacaagctgaatgaacgcaaggcgtacgtggataaagagagagccggcgccgagtccgagctgtcgagagcgcgagccatggcgaaggagcttgagcgccaaatcgagcagacaacggccaaagccacgtcccagaggtcggagctccaagcaatgtgggcagcgaggacgaggaggaagggcaccgacgcaccgggcgcggagcgcgacgcgcggtacgcggaggtggtgcaggagctggaccaagccaagaaggagctgctccggctgcggctcgaggtgcggtccgcggcggaggccaaggcgaaggccgagcgcgacatcgtggcgtcggcgtgcacgatccagtccagcctccgcgccatcgacgagatgaagcggcgggtggacgaggcgaacgaggagcacgtgctggtggagctggcgcgcatcgaggccgagcgggagcgccgcgagatcgaggcccagcgcggcgccgaggccgagcggttcgccgcggacatcgaggccgcgagggccagggtcagggcgctgcagaaggaggcgagccgcgcgagggagatggaggcgaagctcgccgtgacgaactccgacgtggaggtgcttcaggccgagatggagctggtgcgcgccatggagaagagccacgccaagagcgacgaggcggcggaggacgcagcgaggaggaagaaggaggaggcgcaggacaaggcgctgctgaagaccgcggaggccgagctggacgcggcgaagaaggagctggagacgatcaaggccgggagcttccagttcatgacgtccatggactgcacgcgcaccgagatcatgcgcgtcgccgaggagatccgcctgctcaaggcgaaggaaaagaaagcggacgcgcaggtgcaacagctgaacaccaagctcctcaaggcgaaggcgcggttggaggccgtcacggcggccgacgagaggtcgaaggcgatcgtgtccaacttggcggcggcgatgaagcaactgaaagccgagacggaggcggcgaggatggaggaggacctcaccaagctggagaaacggtgcgtgatcgcggaggccgagaacatcgagaaggagatcgccacgaccgagggacggatcaagcagtcggtgaaggagctggatgcggcgaaagcgttggaggccgaggcgatgaggaagctcagggacaccgtggagagcacgatgcaggccagggcgtcgtcggcggcacggcggcaggggacgatgaccatctcccggttcgagtacgagtacctgaccgggcgcgcggcgctggtccgggtggtgaccgacaagaaggtggccgcggcgcaggcgtgggtgcaggcgctgaaggccagcgagaaggaggccgcggcgcgcgccgaggcggcggagcgggaggtgagggagatggaggccagggcggcgcaggtggcggcggaggcggagaagacggcggcggagcagaaggagctggagcaggagctgtacgacctgaacgcggcggcggagagggacggcctgcagtgcgcgtacccgcggcggcggtcgagcagggtgtcggcgacgtcgaggaggtccaagccccggcggtcgtcggtgtccgcgggcgcatggaacccgcgctcgccgtcgttcaccatcaagaggaagaggaaggtgatgcccaacctcctgaagctgatcaagaataaaagaggcggcaaaaagaacaccaactgatcgagctgcgtagattgtcatgaccgctcgcgacgctgcgaccgtttttcttgttctgatttccggcggcgcagcacaagaatgttttgatcatcagtttcgcgggattaatggcactgatactgtatacttgggctagatgtaagtacatattaagctggccatccgttcactacataatgtaacctgcacgttcctaaatggatggctggacgtcaacaagtgacgagttttgtgtggtctgttggataggatggatggcttggatcagttgttggttattgccctagcagagttaaaattaaactcgtgttcatcagctttaagggggctttgttgaccttgttacccaaatcaaccataccatattttggtaatctatttttttttcacattttggcattatcgaatttcgatagtgttggttttatttactttgttttgatgtatttgttaaattctggagggctgctatacaacggaatcccgttttcgaacgggctgctatacatgtatcgtgtcttgaaacttaaccggtatcaagtgatacatataaagtatcaaatgatttctaccacgtatcggatgatactcgtgatatatcatgtgatacctatcagatatcagacgatttctaccatgtattgggtgatactcgtgaggtatcatgtgatacctatcaggtatcagacgatttctcccacgtatcgagtgatacttgcgaggtatcagatgatacctaccagatatcaggtaattcctactaggtatcaggagctgagcaccgaggcgtcgttgccggcagccccaccctccacgccccatgtcggaggttgtcgccggcggccgcgtcctctgtcgtcgacgccttatgtcagaggtcgtcgccggcagccgtgtccttcgtcatccacgccccacgtcggagctcgtcgccggtagccgcgtccttcgctaccacgccccacaccaggcttgttgctggcggtagcatcctctgccgccacgcgccacgccgggctcgtcgccggtggccacgtcctccgctgtccacgcgctgcaccacgtcggagctcgtcgccggcggccacaccgaagctcgtcactggaggctgcatcttccgccgtccatagccatgcgccggagctcgttgtcggaggttgcatcctccgccgtccacagccatgccacgttgggagctcgtcgccggcggccacgccggagctcgtcgcttgcgaccgtgtcctccgccatccacaccccggggtgtgccgcaccgagctcgtgcagcagtcatgctttgagagagatgtggtaatatggtagaatagataaggtagaagaagatagaatcgatggattggttggttgctaacttatcccatccatcatggttgggacgggatcccgtcatatagcacttctgtaaattctgatagagtttttaagagaggaagcttctagaactgcaaaatttagtaaggactctagcgctagcccgggcgtgcttctttccggaccatgcgtgcagcacgacaggtcgacgacagctgcaaattaggcaaattttgttggcttatttccgcattccttcccgttttaatgacctcacacaaactgttcacacaaagatgctcctcgcgaacacagatttccggcccgatctgtacagctacttcatacgtgttgcttgttaaggcggtgaacgtgtcacgaaattcctttcccgttagatggcgactgccacatagacgagaaaattgacatttagctattgtcaaaacagggtttcgctggaatgctaccctcaaacagggggcaacatgttgcaatgctattccatccatttcttctcagtttaatgttttttattgctgagatgaccaaaatatccttgatcctatctcatctctcctctctgtcttcctcctctccgttcggctcggcgacgcagccagaaacggggatggtggtggcgcggccagggacggggacggcggcggcgcgcccggggacggggaacgcggcggtgtggatggggacggtagcgacgcaactggggatgagaaggcggcgttgcggatggggacggggacggggacggcggcgacgcggctagggacggggacggcggtagcgccgacatggttggggcaggtgggatgttctcctacgccgatgcagatggcgccgctgagccgagcagccttccccaacccacgccggtgccgtccctgtccccagccgcgccggcacctcatcgccgacccccatctccatcctcctcgacgacctcctccttgagtgcctcgccggcatcccctatgcctccctcccatagctccccaccactccaccacgcccatcgcctaagtcgcgcccacggcgagctccgcccctccctcctcgccctctccgtcgcgtccacggcgagccgacggatgttggcgtggtggtggtgacgaggatgaggagctggcggccaccgactcgtagctacgccccgtcgtcgctgccgctgctacactccaccgccggcgaccggatggggatcgatcccttttctcctttcccctgcaaagtcaacaaaatgactaggggcaaatatgtcagagcacgataaaaaacatttggaaatcagttaaaatggttgaaatggcattctagcaagttggcttcatttgacaatgacattataacaaaaccatattcgggactagcattccagcgaaaccccatcccgaacatggttaaatgtcaattttctccacatagactggcccatcggtcagtgtcaccaccggccttcgatgttgaagcggcgcaaccaaagccggagaacgcagcagaggcggccagagcgcgagggactccaactccaaccgccatgccgctcctccacgcggccaacctccgcgtcctcctcgccggcgccgccttcgcgcacctctcctcccccgccgccaccgcgcgcgcctcctccccgtccgcccctccccctccggctcccccgccgccgccgcgcgtccgggccttcgcctcctaccgcgcctcgccgcctcccccgccgccgccccaaccatcctcgccgtcgccatcccgcgccctcgcctccgcggccgccgcgtgcgagcagggggcgaagcccgcgatctgcacggcggatgagctgcactacgtgcccgtgcccggcacagagtggcggctcgcgctctggcggtaccgcccgccgcctgaggtgcgcgtgcttattcccctcccagcggagagggtggcggctggttagtggttatggttgttgatttggttctagcttggtttgtgcaggcgcccaagaggaatcacccgctgatgctgctctcgggagtggccaccaatgcgattggatttgacctgtctcctggggttagtatatctatatgatcctaacttgtggagttgtgtgcataatcgatcggcaatgagtacttttctattcttttttgacaaaaaaaatatgaggtttagttaatcgctacaaatcgcttaccgcttagttccagataggatgaatgatttaatctgagtataaattagcaattatcttgggaattagggattaaaattcggaaagagctgatcattgttgttacaattttatagttctgtacacttaatgtggagaagtaactatgttttggaacaacagagaatttactccatgctgtaaatacactgaacaaaaataagttggaaaacaaatcgctgcagtaaacagaactttctggaccaactagtgtgacaatgcttccttactttgcaatgtttaggatgcaataaggctccaaatgctgattcaagcatggcacaaagcagatcagcagaactagggaataacgaaaatttaaaaagtttaagtgcatctcttatgtaatttggtggaaaaaaatactccatttttgacagctatgaaatttcatgagaacagaaactggggttttggtgcataaaagatagcattaaagctacaatacagctgggcagaatttcttgagtaagaatctcgcggacatatcacacaattcagaacacgagtttgtgcaagaaaaaaaattgcatagatacattggtaaaattgtacacatcttccagtaaaagttatgctggtgcgccctacttcaggcttcagataaaagatgtagtagttgtgcttttatagcggtaagtttaaaaaaacacatgttttggggcattttgcttactcttattttaaagatacctctgtttatttttttctaaaaaaatgtaaatgtatttcgttttagaagtttgtttactcatgccttggtcactgtctgtttgatattctatattgtttactcataagcaaaaattgtataacgaacttgttattgccggtcatggttatagaattctgtttatattttcccttgattttgactataataattttgtcaggcttcatttgcacgtcatatgtccatgcaagggtttgatacatggattgtcgaagtgcgtggtgcaggcctgagcatgcgtggatctgaactagctgtagctgacaccacatctgacatgtctcgaagttctgcattggatgagattactacacagaaattaaatggcgctggacctgccaaggatgattccacttgtctagctcaaaatttcgaagttccagtagtagaagataaatttgaagttccagtagtagaagataaggatgtaatagagagtaatgcattagaagaaccacagctggtgacaaagttatcaaatactttggcacgattgggtgatacattctcaggttatgtaaaagatagtcgactgagaagtatcgctgatggcttttttaatcaagtgtcagaacttgttcctgatgcctcattaactagtagtcttgaggaagtctcagaaaaaattttgggcttactggaattgccacaaacatcagcaatatcagatcaaataagccatttaagtctacgtcttgtgaatattcttggggaaggtcaacagaatatatcacctcggctatttggttggcaagaacgcctgtctgcaacaatagaagatctacagaaacaattggagctcattattagctatgattgggactttgaccattatttggaggaggatgtacctgccgcggtttgttaacttagccttccatctataaagatcactcgattgatacctgggaaccctggtaaaaagtgttaatcttttctctttttatcatgcagatgaattatattaaacagcaaagcccaacaaaggatggcaaactgcttgccattggtcattcaatggggggaatattattatatgcaatggtttcaaagtgtggtatgtataactggaaatcttcttttgatctgtctcagatagcaagaaaacaacatatttatttaacaatgttgatattccacattttttaggatagtcttaaatatttcttatgctatgaatcagaaatttacattctgttatcaatacatgattcttgttctgtgtttctgcctcaaaaggatgtgaaggtgctgagccagagctggtagcaattgttactttggcctcatcagttgactacacaacatctaactcatcactcaagttgctattgcctcttgtaagttgaccatcgtgcaatttaatttactgtactaatatacatatacaggaacctaatcttcaattttattaggcagacccagctgagatgttacgtgttcctgctatccctgtaggaacattactgtctaccacttaccctatatcgtctcgtgcaccctatattctgtcattgctgcgctctcaaatttcatcaaaggacatgatggatcctgatctgctttcgaagcttgtcttgaataacttctgtaagtttcatatttaagctttgtcatatctgtaagttgtttcataaaaaggtacaacaacctgatattgttcacggaggaacttgccatccaagtgtagtatgatgatatggtcaagcgaacacttctattcctaagaagttgcacattttacaaatatagcctagccaggttaatctttaccttatactgtaagcatatgatagatatacatagcctgaatgttattgcatgatatgctcatatggcactgttccaccatgaagtttctgttaccatctgtaggagtattgattgcactggttcatttttatctgcctgccatctttatgatacatgaatttcaataaggaagcccttgaagttcttgtgatgacttgatgcattattgttcaggcacggtgccagcaaaggttttactacagctgacaactgcattccgtgatggtgggctgcgcaacagggctggtacctttttcttcaagcagcatctgcacaaaatcaaagtgccaatacttgcccttgctggagatgaggatctgatttgccccccggaagctgtttatggtatggtaataagctccatatttgcactgttatttcgcgatgaggacttttttggaattttataaaatgaatacctattcaggttatcatctgaagttagccaagtgaaagtcatttatagtgaactacttaatgcagctgactcttggaccccaaagatctgtagtcacaagattagctcatatcgtactgcctaactgcaattctcaagttctcatctatgggtgtgtttagttcctgaaaaaagttggaagttttaagaaagttgggagtttggaaaaaaagttggaagtttatgtgtgtaggaaagtttttgatgtgatatgatgtgatggaaagttggaaataggggggaaactaaacacggcctatactggtctgggttatatccctagctaaagtaggccatgctattagataatgcatatactatgatctctctttggcttcattgtttgattatgtattttttagtttcttcataaatacatatcacaacaacattttcttgtatttgcagaaacggtgaagttaattcctcagcatttggtgacatataaggtttttggaaagcccgaaggccctcattatgcgcattatgacttggttggagggcgaaaggtatgtttacattaatgagtacttaaaggatataaagctgtttgtttactgtggtatgttttatcatgtaggctgtccacgaagtgtacccttgtataatagagttcctctcccagcatgatgaagtgtcttcctaagttttgttattggcgtaaatgttagatgttagagctccaacacgctattgcacgagtgcacaatttcatcctatattggaactgaaatcatcaaaatggtaatggaatggtgaggtacaaaagtgtgttattcgtttcgctcccttttctatatccaaggtccaagcttgtagtttattaccacaacagttgatttataacctatatatgtaaatgttttattccttcacaaaaagagacaagaggcttacacgggcacggtggcactgatcatcgcctgcagaaatgccagaaacacatatcactattcactagtaatgtcagataaataagaaaaggtctttttgccaggaagatacaagtatttgtaatggcagcaccgcagcagctagtatcttggctagatagctgctaatacagtattgactacttgccgaatcagcttcattggaaacgtaactgaaaacacgattttgttaaaagaaactcgcagagtggtaatattcagacgtgctcatctgattgtttcaagctaaagcaactaacacgtgaaggatcgaatgaggttgcacaagacactagctgccgtcccggactgtgccaatattgacacctgagataagagtaacatatatttgataaaggatgcctcaatatggcatttctatctgcaaatgcaaaagaatggatgatgtgtttatacaataacatatgtaattgactgtacagagcacaaacaaacatgttttgaaagtttgacccaggtatacaatcgtcgttgcccggagtccggacttcaagtcttggtaacggcagtcttgcaaactgggcaaacgttcttctgagaaagccattgcttaatgcagtaaacatggtagctgtggccgcaatccagcctccccatctcttcattggcttcaaactcttcctgcaacacattgacatgagaatgaagtttgttcacatgccagacactggataccctgtataatgactgaagggaagaagataactcaagagaagaggttgtggcatacttgacaaatactgcatttcttttccatttctgttgaataccggaacgaggagtcaaaggctgggtgtttgaccttcctaaggttgcgaactatctcatcctcacgcaatccagtgttgacataacctattttatctccaagctcaagcaactcctgtaaaacgaagcaattgatgatgatggtggtggtggtggtgaaaagtgatgctacaaggcaaagagacaaacctcgtatgtcatgttatcaacatcaaggcgccaatcctggtaccgatcatacatgctcattcctcccaacagaactcttgtctgaaacatcatgatctgccatatcaaaaacagtttcattaagtatttgaactcgctacctttgataaggctgcttattgagctagcaacatgcataattatgtatatgtctgccaggaagatcacagattaacaactgcaccgcttagcacaagttaaccctcaatcactgaccatcgggctggttattcttccaagtagagtacaaagtgtgcagctaaatatgcttctacagctgcactgacgtatctcttatattctttacgattacatagaaaggttagattgaagcaccagataaatatatagtagctttctttacgactgtttggaatgtgcaccaaaatcaaatatgaattcttatgacagtggaaaacctaagtcagaaaacagaggtatagcacagaagtaaaactagatagaaaaaatgtttataggtaaggaaatggacttccctgaactaggcaccaaagcacattaaagcaaatcccctcaaatatatatcttgataggcaatggcagtgcgggaccgacaatccttgtggatcttgatgttgagctattattaaggagtcatcaccaatcacatgcccacatgaaatccagaaggaccagaaggaatgactacaactctagatctgattatgactgaagcaacaggaacatgataaggagcgttggtcccccttaagcaccaaaagaatagttcagtcaagcagcacagccgagcactaatcataaatggtgaactgctaggactctcgatctgccatcggaggcaaccaatcattcacgcaccataccagcatgcccattcctaccaaccgtacgatccaccacagaacagcatgacagtagatagaataaaccatactattgcttggcattcccaggtgtgctccagcactccttgcccgcatcctgaaatactagcaccgttgagacaacaattgaccattaccggcaacatttctgatcagctcagcaagagtatccagcatttatacttgtagttggcacggtgtatacacacaacgagaagcattcatggaagtgtatgaccatggttgagaggtctctttccaaagctgtggccacatcccactgtctcgttccctcccttctcagccgcattaatcctaaacgagtgtacggccactacgctaaccagcgcgcataatgcaggtgccatggcttgcaactgcaaccgcttatacaattattgtgcgcgcctgtgtaaggctgccgattagttaacctccaagaaggccacgatctcacgtcacgtttagcgcacgaaagatgcaagtcaaccacttccaacgcccacccggccagccggccaccccccaggttcactcgcgcaccaccagacaatcaatctactccacttctaatactactactattaatctatatcacgcgttacagctgcttaatacgcatgtcagatcacgcgctaaactaccctacgcacgggaatcttatgcaggcaggcagcgtgtcgcaccaccaaccgctgtcagcatgcgcacttgttgcgggccgtgtccatctccgacttaggagtacgttggaaaaatgtatctaccgatgcatgcaatgcggtggctcaggacaagtgtgcaagcaagcaaaatgcagtgtgggggcaacgaggaaacgaacgaacgtttgttgcagtgtgcgctactgtgccagtactagtactgctgctactaccgtgagcctgtgacgttttttacctcttcctcgaggccgacgggggagtggcggtacccgcgcatccggcggaggcggccggaggggaggaggtcggcgccgaagaagggcgcgacgtcgaggtgcggcggcggcggcgagtccatgaacgacgacgatatctgctcctgcacggtcaccctcctggacaggcacggtctctgcgcaaaggcaaaaaaaaaaaaaaagcgtagcgggtgagatcatcatcaacttggtgaggagggagagagaatttcagagaaacatggcaaagattccgctcgcgcacagcgcgcatcggtacaggggaattcagtacgcccagaagagatacatgtcacatgtttagataacaagaacttaattagactgaccaaacacgacattaaagactggctttaattggttcgtcaggaactcaggactatacaagtggtagaacagtggcaaatgctacggtttttttaaagccgccagaattgattgtgggaggaaaacagcaacagaagaacggaaaaaaagaacagagtattgaatgttgaatttaaatcttttttcgccaacagacaaaaaggagtggaagaaaaggcacaaagaaacacaagtaaatgagagacgaaaactccgaatcgatcgaccacccaccggaaagcaaagaacaagcaaaaccaatcggttccaagagcacgaacagatccgaacatgaggcgaaatcaacaagtagaagcgaaggatcaacggcatccatccatccacgcacgcaagcgacgaacctctctgtgcggcctctccgcgtcgccgccacggcctctccccaccatctggtgccgcgccaccacgcagtccacggacgacgcctccgcggcgaacggtatcccaggcgcgcaccacacgtcggcgccgatccctccacccacgaggtggccgcctccaccgccccctcctcctcctcccctctccttcctcttctccttccccctcctccgcctccgcccgtgccagtccgccgacgaccgcacggccgccgccgcggccgccccggccccgggcgcgtacgcctgcgaggccgcggccgacgtgcaacccagcccgcgcagcgccgccgacgcgaaccccttccgcctcccctcctccgcctgcagcggcggcggctgcggcggcgaggacgacgacgacccctcgccgcggggcagcagcaggcgccggatcccccgccgtcgctccccgtcggccgagacgacgccgccgccgccgcggcggtcgccggccatcaggcgcgcagagaggtaggtggaggggcagtaatggcagcgcggaagccgggggtgcgtggaggagagaaggggagaggagcgccgcgcctcccgtccgcgcgtgtgcgcttcagcgtttggctttgttgcgtagtgtactagtagaagagtagagagaaagaagtctgtgcgagacagcggagactagagatgttgtagagagagagagagagagcgcgaacgagtggaagggtggcaaactggcaactggcaaggcgacgagggaggggtggaagcagcacgaggaaatgagatgtggtgactggtgagtgaattcttgtcgcgggttcggtgcatcactggatttgatcgagggatggatacgtacgtactagtagtagttgttaaaagaccggaccggtaaatgaaccggtaaagctcttggttaattggtttagggtccctttgaatcacaggaatgaaaaaatgcaggaataggaaaaatatatgattctgacataaataaaagtgtaaaatagaagattgcaaaacacagaaaaaatataggaatgaccgtttgattagaccacaggaaaaacacaggaatttgaggagatataacgactcaaaggatttcttccataaggttctacctcttattaaaattcctcaaaaacttgtatgagaagaggcattccataggaatttcataggattccataaggttcatttcttttattcaaaagactttgtaggaaaaattcctatagaaataaaatcctctaaaattcctatgaatttcctttgaatcaaagggggccttagtggtcggatcactggtttgcccggtcgaaccgtggtttgattggtaatatagaaagtactatgttttaggccgggtttagttcccaactttttcatcacatcaaaactttcctacacatataaatttctagccttttttcttcaaacatccaactttttttcttcaaacttctaattttagtcaaactttcaattttagtgtggaactaaacacacccttactaatggcacaagctgtacaacggtggcttggctagcgcacggtgctctcaaacccacgaccagaggtcgaatccccatctccggtttataaaaaaaacgcccggattaaccggtttcatctggtctgactgcatgcctgatttgttaaggggaccggaccggtgggggctctggttccggttttttccggtcgaaccgctggtctggtccggtcctaataactatggatggatgtcttgatttaccaggccccctcccaaaataaatgtcaaattaaattctttatgaaacactcctactaatactagaatagggtgcagaaaggggaaaaaagctttgatcacttaggccctcttctaacttgattaagatgaagatttttttctgtcttcgttagcatgcttttcaaactactaattagtatatttcgtgtgaaacttatataggagttgctttatagtaattcaattaatcatgtgttaatggttttcttagttgtgtgccatcacttaatcttcatcgtaatcaaattatttttctacatatggagtatcttcatattacataaaatatgtcaaaatgtatttttatagtataatcaaacatatttcatagtactccagtagactatgaaaatgctcctatattttcacattttgagacaaatacacttcacatttggtttttatggatcccaataacatgtgcctccgcaagcatagccaatgcctcgggacaacaaacgaggatcatgtgtacgcatggattttccgtgtttggttggtgacacaggagaaggaacatcagctcaccaataggccgatacggagtgggcagttattgagcagtagtagtaccactgcaagttttggcatatcaaggaggggtatgtggtgtgccatcaaagaaacacattaggagtcctaaaccacaataactgaaagaacatgtaatatctcgctatcgacgaatactcatgtcaagtttataatctgaatttagatgaacaggtttcaccacgagaaacataaccaagttcataacttagaccgttttagactgatgttaaaaatactcattatcaatattttggtagtttgaatattgcatatgatgattttggttagaagataaactttgattctaccaaaaatttggtttctaatatatcaaatcaaataggaaaaagtatgaattacccccgaactatcgcggtcgaccgaattactcccctaaacctgaaaaccaaacatcattcaccctaaactttcaataccggacaaattaccccctcgacccaatccagagtggttttgtcctacgtggcgtacgcgtggtagtccagtcagcattttatttataaaaaaatatgggacccacctgtcatactcctctctcactcttcctctctctcacttttcctctctctcttctctctcactcttcctctctctttctcgccggttggtggcaggcagaggatacggagcggctgcgggtgacgcggcggcggcggcggcgggggacaaggagacggcgacgaccgcagccacgacgagcagcgggccctctgcgcggggacggatggaggcgggtgtgggtggcgacacgggacgcggcaacaaccaagacgagcagccaccgcctcggtgcagggaattccatccggcgcaagtaggtttccgccgccccgtgcgtgccgcctccgtgtccgccgtccacgctcacccactacctgtccctggctccatccgttcgtcccgcgctgccgctgcctcctcgctgtggcctctattcgtccgtcccgcgccgtcactgcctccatgtccccctgtcgccgccgcctcgtcgtcctgcgtcactcgccgcagccacctccgttaaccctaccgagccaccgcttccgcgtgccccgttgccgttgcctccgtccgtctccacgctgaggggggcagttgctcgtcgtggctgccgccgccgccgcgtctcgcgctaccgcccacacccatctccatccgtccctgcgccgaggggcggctgctcgtcatggccgcagccgccgccgcctcctcgtccccagctgtcaccgccgctgtcgctctgcgtcccctgcctaccgccgaccggcgagaaagagagaggaagagtgagagagtgagagagaagagacagaggaaaagtgagagagaggaagagtgagataggagtatgacagatgagttccatttttttttataaataaaatgctgactggactgccacgtatacgctacgtagaacaaaaccgctttggattgggtcgagaggggtaatttgtctggtagtaaaagttcagggtaaacgatgtctggttttcgagtttaggggggtaattcggtggaccgcgataattcagagggtgggggtgagggggtgtaattcgtactttttccaatcaaatatgaccaatgtaccaaatattggtaatcttaaaacttgccatgtttcaactcttgcaacgttttggcagggtactttgaatcgaaataccctttagggcccctttgaatcgcagggttgaaaaaatagaggaataagaaaaacacaggattctgataggaattgaagtgtaaaacagaggattgcaaaacataggaaaaacatatgaatggtcgtttgattagagcacgagaaaaacgcaggaatcggatgagagagatagactcaaaggaaattttccaagaggttgaagctcttgctatatttcctccaaaaaccacatgcaatgtgccattccataggaatttcataggatttgaaaagcttcaatcatttgaatcaaaggatcaaataggaaaatttcctatagaatttgaatcctataaaatttctacataaatcctttaattcaaaggcccttactcagtttggggatccaccagcacgtaaaaggccttgacaaattcatttcgctccatcactcatccacgttagctaacagcgtgtacgtgaactgttcataggtgtgtacaagcaatcgagtgcacacacgccgcacaggcgcacagcgtcgtttgccttggatcctgccagagtgcgcagggaggagatccccgagtcaaaggggacaagcttgcaagaatacaagataccctgcttcctttttcgtttccatctcgctcttttactcatgcaccgatgcatgcaaagacaagcagaggtccccttgattggggaatttgtactgatcttgtttcttaatcaaacctaaagggaaaaaaagaaaaaccctctccactgccgaatgctgatggaccctctttggatggcttcaaattttggactgtatagtagtagtggattctctactcgatctttctggattctttttttctgtgatggacattgggcagcgtttgctgttgattctactacagaatgaagtgctaacctaaagagattacagtacacagtaatttaccctacatttcctctcttattggagtgggaccgtgggactgatatacttgtacggtcttacggatgggtgtcgttttttggttttgcccatgcaggtttaagcagcagagagaagtcagcaggtcgtcacgttaaagtattcagctgtaccagcatcgctcaatcaaaagtccactattgacgacgagcttgactccaacggagcgctcttctccatgggagaaatattctttgcttttttatctagtgggcgcgcatctaaaacctaaacgatgggaatacagttcgcagccgcttttggcagccaaagagaagcgacgaggcagtagaaagaaagaggagatgcctcctatctcagctatcactcactgtgggcctgtggtcactggtcgcgacctcaagcaagcaagcaagcgacggagggcagggatggagggttaagtatcattcctgcacttgggcttcagctcacctcatctttattcttcacttccttgtcttcagatgcgtggtgtaattgactccctacttctaattatactttggtttgctgtgtgtcctttgcctaaacaaaggtagcacgctgtatggttcaattcatggaggaagattagaaagaaaaaggcagcagtgtccagtggatggtgaccagcaggaagctataggcagtagtgactagtgacgctgagcagcatcggctttctttcttcagactgcgctgtaaaatggactaaattgagctttcacccttctttgtcgaggctgatgttttccgtattctggccgtgctttcaatatgaattgtcaaagacaaaaggtattgtttcccataacaggggaagctgtttcagatttttagttacacaaggaatagaccacacgattacacaagaactggccagctatatatatactcctatatatcttttggctaatctgtccaatagggtgatgtatgtaagcaaatactactagtaccatttaagggcagctttcagtactcacacatgcatgacacatcggtaggacagtaggttactcggtgcatccaaaaatccaaaacactactgatggttgagaggtcatggatcatagatgatcacaaggatggatataaaaccgactgtagaaaatatgcagccgttatcttaatggaattatacaaagaaatttaaagcacaaacccggagccatcaggcattcaggctcatccaaagctagctccttggataaggaggagctgaggattattagcagcagacagagagattggtagctcgggttgagctttccatctcgcatctctccctttcgatggatgaccaaccgaaagaacacgagacgttggacgttgcgagacggcgcatccattaaaacgggctcgatcatttcgctgcagccaattagccatgcatatattgatatatatctcccgtgggaatctcatcatgcaagcgattggaggaaagcaacatttctgtactctatcttaatatcttatggtgtgatgctatatgcattttcaaattttcagtttggcgttttgtagcatgcctactctaacttctgatgatttcatcagcgtacattcttttctttttaaaaaagacatatcattgtgcggacagatattcagatgatgacgctgctagtagaatacctttacattgattaatcatgttaggatgaggctgacgaaatttctctctggcattactagtagaagaaacatgagacactggcaagtggcaacggatactgctacagcatctacctctcacgagcagttcaaacttcattttttttactgaatggtaatgaggctttacaggttggaagcaaagcaacgccgaaaagcccagtcaaactcagaagtgagacatgcatatgaaaatgctctctacacctgaatagtgaacagtgcctgcctgcctacttttttacggtatgggcctgtactgctgtacatgatctacgaaggacaatgcaaccaggcaagcatagcattcggcatcctgagaaaagaaaatatatagggtgaaaaaaatacaatgattaaagatggttgaggaggggtatgtgcaatgaaaacgagttcatgattcatagtctccttgccgaaatgatggggcataattgtacgttgtcctgctccttttacgtaaagatcgacatcttgagagcgtccaaaacgctacacatgctttgatatagattgacacgcatttgtctattcattctttcgtgagaaagaggtgggatattttaatgtgtcgaaacaacatttggcagcatcccggccttcctcaggtgtttctcgtggcacttacaccagtatctctacccttgatctgtcactaataataagtggtggtttactgccggtgagaaaatgcaactatcaatctaccaataggagtgctttttttttttttttaacctggatagagaccgaacattcgctggaagacgagaggtcgacgccacgcagtgatgcagagcggccggtagcacaaaaaaaatgggtactcctccacctccactaaaaacttgccaacgtcctcgcatctgcaaaagccggcggtggaggaggagggaggcctcgttttgtccgcgtctgcgtggcggcgccctcccagaccggtccgcgcgtgccgctgccctgccagacagacagccatccgatccgtggatgggatcgcaaggcagccgcgcgcgcgcccgcgggggcggggcatatgcgcacggctcgagagcccgtgcagtgcagctgccaccggccaccgccgcccgtgcgtgccccggtgcgacgcggcctcttcctttcctcccctcgctggcgccgtggcgcgtggccgggtttgtgctccccgacgagaggcgacgctgcgacgccacgcgatgacgagttgtattgatccggtcagctcaaccgttcttttgccgaggccgcgctttgggccttggtggcgtggcgcctcgacttgttgttgtctagctagcgcgcgcgtgcgtgcgtgctgggcctcgggcttgatggagttgttgccttgtttggtcctggcaatttcatgggctgaatggaggggtacgcttaaaatacataggaatgaactgaaagtggtacaaacactttcagtctacacctttgtactctttattagattttttgcgaacgcttgtactcttgattagattggcgctctaaaaaaactcgaaacaaattgaaagtggtaaaaacacttttggtctaaccctccgtgctcttccctagattaacgctctaaaatggtagaaataaattggaagtggtacaaacactactgctatgagtccacgacggtagcaactagcaccaaagctaacaaaccaagatagtaagactagatttgcatcacttaagctatgaaatgtatatgagtaggggtgggcagaaaaagaccgaaccgaaatgactgagaccgaaaaattcggtcagcactttctactaaccgaatttagtttggtcaattcggttttggggctcggttaatcgaattgaaaaaaaccgaaatataacactggcccattaggcccaatacctcctcagcaaaagcaaaaccttatccactccacgaccttatctaacccactaccaccatcatcctcctctccatccaccgggcccttcccatccctatcccctcctcccccgtgctggtgatgccgatcgcgatggtgaagctcccggatggcctcccgcagccgctccttcgccttccgtaggtcgccgccgccctgtgcgccgcctccgcctccagtgccggcaccacctctgcctccgtcctccgcctccagcaccggcagtgcctctgcctccattgcgctgttgtcgcgggcacccatcgatcatcgcgccgcctctgccttggtgtcgcctccgtctctactctccaacggctgtgaaaaaattcggtctgaccgagaccgagaacgaatttgttggtcctgagtttccaaagaccaaactaaccgaaaaaccgaagaccgagaccgaatttgtcggtccaaccgaacgcccacccctatatacgaggagccaatataagtattgtcctgatgatctaaattctcacaaattgtttggtcaaacgtgaaatgtgagccaagcatgtttttctacaacatgtaaccctcttcgtgcacaaatcaacatcaaacctacaaccatcacaattttatgaaatcttctacataaaaacttagtatgcacccttgtcctgatcgatggactgctggtccgactagtgaaccgtcggacgcaccagttcaatcaccggtatgtttttaataactattcaaaagatcgatatggcatggatatatctaaattagcaaaaaatagaagaaatctagtctatcgttgggaaggaaccaaatccttctacgccagagggacacaccgtctttgtcttaggcccagaagacagattgttcgattcatctcattcgtagatgtccacaacatctaggagctttgaccactagagccaccatgcgtcggggtatgtgataccgtttcaggcttcctgtcgctcttgctggtgttcgtcggcctcagctgttagcctcgtcaaatggtggtgctgccagcaaaaatgccttgagcatgtcaagtgctgcgtggaagcaatccttgtcctttcgcctgcgaagaagtagggaagcgagcatagatgaagcaggaattgtccggcgcgtcgtagtcctttgcaaggtttggacaacctggctccttgttgcctaggttcagtaaagcgttacgactatcgagaaagaagcagacgcaaggcatcgaatgatggctctttatgcagaaaaagaaagagcagggcaatatttcgatgagatccatgtagctattctgagatagcaagacatcgatatgttgtcgacctgcagtagcagcagagatgaagatgaagagtgtggctgggttgcccaatttgaagccaacatcgatgataggaccaacaacaagcattgagatgtcacccctgccatcgctgtcagctgcaccacgtatccctgtgcatggggaatatcaacggcgaatgcgtttcaccagcgagagaggagcttgagcaggtcgagcgacaacttcaacgacagccgttcagggagagtgacatgaagccactagcgtgccacataccctaacaaccgtagatccccaatgatgtggacgactgcaaatgggatgaaccaagcaggcagttgcttttgggccaaagacgaaaaaacaaagttagactaatgctattgttggaaatgcaaaggatgattatctagcgctggacatatgcctgatgttctacatcaaaggatttggttttcattgggttttgtcacttctaaaaccatccaatatagtagttcaatgaacaccgaacattggatcaaagtaaactgctaacaagacccctcaggaaattttactttacattgtagtcctccagcctctcaaaatttgaacgtgtccgtgcttttgagttcaggtatgtggaatgtatttataacacattataactaacggttgatagcaaattagttgttacaacaaaaagaccaacattccaaatgaaccgtgttgaaaattgggcaacatttaaatgcggcttttggggcttgtttggtcatgacccaaatgaatcattccaaaaatttggcagcattcaaagtagtccatttggtgtgtagaagaaagaagggcattgacaaatattttggtttagatgaaatgaaaataatccactagaatgcttttttggtagcaaagcaaataaaacctttgcccacctttatcagtaatttgataagtttactgtttttagttgttacaaaccaaacagagcgtgactgacatgtggaaaaccaaggtctcgctagctccatgcataccgtcttaagcgaaatatgcagcgagactacactagaattagatttttttccctcgtatcccgtgagatcagttgaagatgcgtcattttggtaatagagattgatttaattaaatgcaggcaacatatatggtcagaatgacgtctatactactattttgccacggtttgttatagttttctccacgagacaaggcgtgaccataggtggacgcaaacacacccctgctacttctgtggtatgatatcttgatttgtgttcatgtcgacgcggccaaccatccaatctgcctgtcttgcctctaacatgtccttaaaacctagctcttcaggggttaaggcagcaagcggaacaacaagagaagggatgccatggaggcaacaacgtcgatgatcccctctccctcggatccatctactccagcgtccccacgccacctctctcactgtccctattcgtggaccccgcgctgcttccctcgccaacgccagtggtcatccccacattgtctcatttgccgacgcagctagtggtctcctccacgcagcctcacttcatcatcatccccgctctctcttcctcattatcacaggtgccacaacctccttccccgctctctgtactagctcaagttcttatgtatgaataccaggaatcacctcactgtgtcactggcactaagaaccacgtgttgtactatgcttacattgagatgtgtcggcagctcgacccacaggggctattcaatgtctaatcaatcaatgcatctatgcataatttaattttgacgggtgaacttaacggatgacacaatatgagattatccttccttcattttagtatcaatagttaaaaatattttattggtcttgatgaattacattttgttggaaaattgaaggaccggttatgttcttttatgggacatgcactttttatacacttatcgtgtgttacatttattaccaatatatgttccgtacacttttgttttgtagttttgatgtggcctatttatttcatgattgcattccacattatatatgctcgtaaaacttcactgtgtaaagaccattcatttaattgagccgctctaaactgctcgaaatgggtagtttattttgtgaatcggcaaaataaactgctaaagctatccaatagaacacaaaacattgaattaaggtaaactgctaacaagatccctcagaaaacttttgtttacattgtagtcctcccgccccttgtaagtttgaacgcgtccgtcccgttgagttcggttatgtggaatgtatttataacgcatcataacttgttgttgaattggctgtttcaacaaagggaaattgacatttcaaatgaaccatgccaaaaatttgacaacatttaaatgcggttattaggacttgttcagttcatgacctaaatgaattacaccgaaaattcagcaacatttaaagtagtccatttggtttgtggaaaaaagaaaggcattgccaaatatgttggtttatatgaattgaaagtaatccattggatggtagcaaaccaaataaaacctttgtgccaaatatgttttgtgttcgttagttgttacaaggtctcaccagttccattcataccatcttcagcgaaatatgtggcaagacttcactcgaattggattgttttccttcgtattcgtgagaccaattgaacatgtaccgtttcggtaatagagattaatttaaatgcatacgagagatatggtcaaaatgccgtctatactattttgtcacggtttgttagaatcttcttcgggagacgaggtgtgaccccgtgtggacgcaagcaaacacctgctatttctgtggtttgatatcttagatttgtgttcatgtggacgcggccaaccttccgatctgcctgcctcggctctaacctgtccttaaaaccctagctctttaggctttaaatgcagcaaataaaataggttagtagctactataggaggggaatggatgggaagggacgccatggtggcggcggcggcggcgaagatcccctcaccctcaccctcggatccatctactctagcgcccccacgccgcctccctcaccgtccctggtggtggcccctacgccgcctccctcatcattcctagttgcggcccccacgttgctttcctcaccaactcctgtggtcgtccccatgctgcttccctcgccaacacggccggtggtcttctcgatgcagcctcactttgacctcgtccccgcgctccctccctcgtcaccgcaggtgccacaatcttctctttcctcgctctctgctccgggttcgactcgccactaccgtaatagtcctcgttcctcgctgcttgctccaccttcgaatcgtcgccgcctcaacaaccccgatgaaggccagtccccacgaggccgcggtgaggaggcgaatggggacaatggagtgctagtcatggcgacatcattcccatgggtgacatcggctgatctgccagtgttgcattgcaccctagagagcatgttgctgaagggcatcacgtctgtggagggcaaagccacctgcaatcgttgcagtgcggaggtgcccatcgcgtacgatctggacgcaaagttccgggaggtgcgcgactatgttgcagccaacatccacatcatggatgaccgtgccccggagcactggatgtgcccgcggctgccagactgcggctcgtgcggcaagaaggcctgcatgtggccacagatcccaaacgagaagcgtgagatcaactggttgttcctcttccttggccagatgctgggctgttgcacactagaaggcctcaagttcttctgcaagaataccaagaatcactgcactggcgccaagacccgcgtgttgtactatgcttacattgagatgtgccggcagctcgacccacaggggccgttcaatatctgattgatccatgcatgcgtgtgcatccgtgtgtctagatatgttggatattatgttattttgtttctgtttgcttgattatccggtacttttaaggggtgaatgtaacagatgaatagatggctaggaaagagataaattttcctttcttttagctctgattgttaagaattcatccatttatcaatttgataattagtttttgcaggaaaaaggactggttatgttcttttgtaggacgtgcacttttcatacaaccattcacatttgttaccaatatgtgttccgtacacttttttctaacacttctgtttaattgtgatgttgcctatttatttcatccgtacatgcaggttccattatactgtacccataaaactttgcctggaatgtaatatcttgaagtacttgcttcccaatgaggtctgtatatcacccacgattttagctaggtattaacctttttgagttcaatcttctatacggttcactctatggaccatcttccaattggtgtatttttttttatgttacaaattacccttcatgattcctaactatacgagaccttgttcggtttggaggggattgaggaggaatgattccacaccagaattgttatgaaataaatctcctccaatatatctctttggccttattcagtttggagggtattaagggagaataaatccacagtacaatagatgtgaaatagatcccctccaatccctcactcttagggataataatcgtacatggttttacaggcattagatgaacacaatttgaaagaacaaaatccttattttttttcatgccaccggaaatttatttttcataaaattcaaagttttaggtgtcaagttaagtttccatagatttaaatggaacatcattgagtctgaactattctttattaatattagtgtgcaatggtttggagaaatcttagataatttagtgactattggatgattggagtcttaataaattgctagtcctttgcatttggattttattgtgttgatactaaaaactctgcctattttgtgtagttgtgtgataaccttaatctcatattaatttttagatgttttgtcaatgggattgactctgataaatctatgaccgacaattgccactatcttagtatgttatgaagtattttgatggatataagtttatataaaattgttcctatatatagggtagtacatcactacattgtactagagcctttgcttcatactgtaacatttgtttttggaaaaagtacgaattactcccccgaactatcgcggtcgaccgacttacctccctgaaccacaaaaccggacattcttcaccccccaactatgcaaaccggacgaattacccccctcgacccaatttgcggtggttttggtctacgtggcatacgcgtggcagcccagtcagcattatatttataaaaaaatgtgggacccacatgtcatactctctcattcttcctctctctctcttctctctctcgctctctgtctcactcttcctctctctctctctctctctctcacggtcatgggtcggcggcgggcgggggacgaggaggaggtggcggcggcgccgacgggggacgaggaggccgcagtggcacgggacggatggacagaggccatgacgaggaggcggcggcaacgcgggatggacggacgaaggcggggacggcgggggacgaggaggccgtggcggcgcgggacggacggacggaggcgggggtaggttgtgggcgggtgtggacggtgccgagagatgcgtgctggtggcggagctggtgcagatgcaaggcatcttgaggcaactggaggtggaaatgggcacacatgggggcgttggcggcaggggtagggcggcgatgtcgtgtaccacggcgaccacacctgcgcgcacggagcaacatcagcagccgacgctgccacagaagtagaacgccgtcggtcgcattcacctccatggccgtcaacgcatgtcgtcgtcccccttcgtcgtcgtcctccactcctccgtcgccatcctccactcctcatcccccgccaccaccgacccgtgagagagaaagaggaagagtgagacagagagtgagtgagagagaaagagtgtaagagtatggcatgtgggtcccatatttttttatataaatagaatagaatgctgactagactgccacgcgtacgccacgtagaccaaaaccaccgcggattgggtcgagggggtaatttgtctagtttgcatagttgggggtgaagaatgtctggttttgtggttcagggggtaattcggtcgactgcgatagttgggggggggtaattcgtacttttccctttttgttatgtgttcttctactagaaccttattgcttttagtttgaaacagattattgagcagattgttgcggcaaattatctacttgattacacggataaattaaatattttacaaacaaacaaatagattgaacaagtggcctgatagaattaatttttagaaaatgtattttttggaagtgggaagcaaatattccatttcattaatccggtacataatctgaaaagagttgactcacatgtagtttctaaactttgtattgtggtaaaatctttagctcttttataaaaattgaatatgattctatactcatcgcgcacttcatccatcgtcgtgctggtttttcatccgattttatttcagtttcatgcgaccgacttcgtctcgtctcgcatcgcatcgcgccgtccgtcaaacagaagtgaacgagtccgcatagatcgtgtgtggtcccactcgcaccaatcctgttctattacgatttgctccatggctggcgattcgatcgcctgcatggctgcatggctgcatcgcctgacatagcgggagacaggttaatccacgcgccaccgcccgtcacgagccacgccgctgccgctgccgcctgggagaatcgggtttccgcgctcgccgctggaagctgccggcaacgggctccatcccgctatgacggttcaattccattccctcaccgcaactgcccggggaggatgcaacccgcgtcacctgcggcgagtttctctgacccagccgattccgtctaaaattaatcagaaagtgagtagcctcatcctactatactactacccatcctccgcctgatttctcttatggaaggggaacctactaccgatctcacattcacatatttgtgattgattggtcgagcgtggagatggcagccgggagcccgggaatgatagcacgggacgaccttcacttataatcatatagcggttcgaaatggtatgcatgtttaattgccattgcttccccttcgcattcatctaatgttcttcatttcagtgtgggcgaatcaaagaaatatgtggtcagggtcagggacgacagttctgtgtgggggagaaaagccgatgatggattgagacatccctcttcaagctgaggagtgattcctcaagtatgctataatcaacctcctatttcaatctattcagagacaggaggaactgtgctgctccgaactattctgctcatgatcctacgaaaaggtgcggacttgttagcctgccttgagaaggttcagcacattaagcctccacaagtcaaaccacacgataagctcctatgatttgttaacatccaggtaagtccttaagaaaaactaggtatgtattgctaaatttttcatattctgatattccgtcttgtttcaatcacagattccccacctatcatgtcattgtgctgtacatcaaaaatctcggagtacatagacaagggggtttcatagcatttcaaggagcctattatggttagacttttcgattcaaaatcttattatactttctaattaagttgaatttgttcctgtgaactaataatagaatgtatctgaccaggccttccaagggggaaaaaaagatttatgtatctgactgcgaaagaaagtgagaaggtgaaaaggttgcatcagaatcaacaatcacttagacaggttaaaaatcatgacaaatctatattagctttttccgttgtaacttgcgggcattgtctttagtagttctctccgttgcaactcacaggcattttgctagttaaaaaaagaaaacaaagcaatatcatttttgcatcaaatacttgatatccatgcaaattttagctgcaaacttgtttattttctatgaaaacttattgagtttaactttgataattgttctcgttttttctaaactctagtaataatgaatcccccccctccccccctaaaatgtctaatactacagatattcgaacagattttcaaagtacaaaaacgcacccattatgcccgttttcaaattgcatgatctgtaggacaccttgtatatatatatcaatatcaatgtcaaaattttcacaatcaatactgaaaccgattatattttgaaatagttggctgcaattttttttggtgcccctgttacaggatatgcaccaaactcaaaaccatacctgggatggggggcttggcaattgttctccctcgtgggcttgtggcccggccaacaacccaaccaaactcagccaaatccatctggaagcacgcgctttcccccttccccagataacaaattcaccaaattcccccgcctcgaggaggaagctaacgaccgtccggtcaatttccaaccgccctctacgactgccgatccttcctactaattcctatgcttggacagttggacatccttgaattccaagagtcagccgcgccgccggccggtgccctctcccactcgtcttcaaacgtcccaactaaattatagcagccaagagcgaatcgcctctggcctctgctactttttcatcccccgcacggaaggatatctcaattgtgaatcgtatcgcatggtgtccggggaaaaggagaagtggaagagaagccagaagggagacgacgagagatttgtccgggcggcaagccaaggcggccgttctttccgtcgtgaacgcttcgtgtaaggttcggtgtcccatctctcatgtccgtttcagaagaaaaccgtattgctgtgttgatgctaattactgatgatgctgaggttcggctatcctggatgcatggctagttcttagagttctagggacaagtacaactattgttaaatagcacgaattcaaggttctgagtatgatttctgtacttcttttgatggacaggcaaaacatccatctgatttatcttgcgaattggattgcttaacctaatctgggaattcaagtcagtacgtacgatatgccggcaccatcggcatccatccatctgggagttccaactccgtacataacatctcatggatccaaaattgctcgcctacacatgtatgactggattgtgctgattcttctagtcgtagtagatggaatactgaacataatagaaccattccatcgatttgttggatcggatatgatgacagacctcagataccccatgaaagacaacacagtcccattttgggcggtcccggtaaacatcttacccttctagttctatccaacagatttcctttggcctgtacaggtaattaaagtttcttgaaaattcatgctttcgtagataattggtatcattggaccaatgattatcatcactggaatatacttcaagaagaggaatgtgtatgatttccatcatgccatactaggtgagctcatgttctttctattctgttttgttttgctagtctacacattttgtaatttcttatctgaaacctagcaatgcccttgcaggtctcctattttcagttcttatcacggcggtaataactgatgccattaaagatggggttggtcgaccgcgtccagatttcttttggcgctgttttcctgacggagtacctgtaaatttctagctctcaattggattctctaagcatgattttatcggagccggcctttgttgcatctgtcatgtatgtggaacttatggattttcttggattgcaggcttatgataatttcactacaggagtgctttgtcatggtaaggcgagcgttatcaaagaaggtcacaagagttttccgagtggccatacttcttgtaagtgaattctgtcagttgataatttcgtatgtatttctctaccttgttactacgaaatctcagtggaatttcagttagcattatcaaacacataggattggtcatactctagactgcaagagcttttacgtgctgcctgctcttgtggagtactgtggatcgctgacgaatttatttttgtttcttcagggtcttttgctggccttggtttcctgtcatggtatctggctggtaaaataaaagtttttgacagaagaggccatgttgcaaaactctgcattattattctccctctgctccttgcagccttggttgctgtttctcgggtagatgactattggcatcattggcaagatgtgttcaccggtggaattttgggtaggttaattttatagtgttacctttgcagattatacctcgcaacaagtaaaggaggtactgacaagtgtgctgcatgtaattcttggaaggttctaactttactgttaaaactttgcagggttggtggtttcttcattttgctacctccaattttttccaatgccatctgatgaaaacggtatgcttcatagttcagactacttttcttcatgattattgcagagatgaaaatcacccccaaagggtcattttgagtagtacatttgatactgtattttgacatatctttcgtactgtaatacgctgacctgaaatttttatggccaatttcctgggcatcgcgtgattgataataccatgttctgtacgaaatatctgaagttgtactgtaattttgtatattctcgagcttcagatatctgtctctcctaatgtttctgacggctttacattgttcaaattttcgatgacaggattatggcctcacgcatacgcccggcacattctcaaccctgatcagctggagaacaacgcgcaacccacgtccgtggatcgccctaactctctgccgaacgggtcctttagaagccctaatggattggaaatgggaaacacgggccaaggccaagcattagatttcatggaagctggtcgtagatatcaataacgagataaaaacctgctactgttgtagcagacatacctgacgtactttttgatagactgagaattatacggagacctttcaggttcactttggtacatataccgtgtagaattgttacttgtacatttcaacatgatgatgttagctatttctcatgtaaatctataccagattaaaataatgcacctacatttgggtatccggaagtatgcctgacagtagatggtcacattgtcgcttggcttatcatacagaatagggtttggacctctggccggcttgtgaccagggggttggaaaaataatggcaggtgccctctctgcatataagagaagatgatacggctttgcacctcgtcgccgagtgcaggtatacgagaaggatttgaaacctcgttgcgacatgggtagggtttcaccagctagaactccgacgctgggggtggtgcaaccggtcaaagattggtggaaaatactggcctctgtgtctggcgtccctaagaagggactctgcaccctgattctactcatcgtatgggaagtttggaaggtgcgaaataggaggatatttgattataaggaagccacaacctcgtatctcctttcaaagataaaagaagaggctggcatgtgggccttggcaggcgccaagtgtcttggagagatcatcccgcagtttgtatagtgtacagctttccttattttttgctttttctttacccttaggggttgtattttttttcttgctatattcaatgaataagcacattcttgtgctagttcctttcaaaaaaaatgcttgttttaaaattgagcataacacataagtgtgctaatgtgatgatgtgaaacaaacatcagcttgtgttcttaacataaggatccataagaagggctattgcttggagttacagtgatcataggacatgtttcatgaggatccataaaacaagcagctttgagttacaatgatcataaaaaactggaaatgtttcactttcatgaagatctgaacacgtctcaactctgaatagcctggaacggggttgcggcttaacatgcggcccgttaactctaggggcgtctacggatcgtacgttagggtggttaaagtttttaagcaaactttaaactattttttctcctaaattatatatctaattcatgatccgattgcaccattaaattcgttgcaattaaaattttaaaacaagaccacatatggatatattccgacgaaattttttttagcttattattgaattatttttaaatgttgcacgatgttccaccaagtatatcggaattgttttactaagtagatcgaaaatgtttcaatcatttaaattgggcgttgtttcatcttttataaaaacacaaaagaatgtttcagttcactgcaacatttgatccatacatagtgaaacattatgagtacactaggtgaaacattttttttggaaaaaaataaaacgaattcccttaatagagggtttccaaaatatgtgggtgatttgttgcaaaagaatattccaattaactacaacattagatctatacatagtgaaacattgtgagtacattaggtgaaacattttttgtgaaacaaaaaatgaaacgaaatcccttaatagatggtttccaaaatatgtgggtgatttgttgcaatgcggcacgttccataatatcaaaattcactgcaacatttaatccgtacatagtgaaacatcatgggtacactagctgaaacattgtaaaactactggtttgaaacatcaaaagagaccatatgcaacattaaaaaaatcaataaaaaaactaaaatattttttttcgaaatataatcatgtgtggtattgttgtaaagatttaattgtaacgaatttagtggtgcaatcaaatagtagattagataaataatttacgagaaaaaatcttttgaataaataagagatgtgagcatgtgggggaaagattctttgaatgtaatagcaggcacatgtccgatttttctgccctcccgtcggacgtccgacgcccagcattatccgttaactctggatagcgtgtgttctctttttcgttaggccgccgcataattgtggcttacatgcgtgccacgtttattgggccgaaacgggacagtggcttgcgtgcggcccattttaattcgggctgaacgggattgagtgcgaccggcacggcccatttatgcaaacctgctgcctaaaacatccggccgcctgatgcagcgaatcccatcaccggccgccgatggactgagccaggaacgggcagcctcagtcgtcgaagcctgcactgaactgcgatctgttgagcattctgagtttgccgatcaaattgcgactcctgaacaaagtgagttttgggtggataggctatgtcaagctgcaagcatatcaggcttctagcttttgcaagagatttttcattgttccaacatgaacacattctctctgtcgctatgcgtcgtgcaaattccgtgtcacagagcataaaacatgtgataccagtacgtgtaaatgtgagtagaggatcggcatcatatatctaaattatctgtctggtccctgtaatcatgacacgcattttgttttggagcatatatgtgctgatgcagatgcgtcgtctgcagtagtagtactcatgtgacacaaagaaacatgagatcaacatggcctgaacactgaaatgatgcttcattatcttttatcattggtgtcagccaaaagtgccctgatgacctcacccttgaatatgaataatatgattctctgctgtactatatgttcgcctgccatgtgaatcaggtgatgatcatcggaacatttccccctgaatttgcaaggtaatggaggtcgccgacacttgcatttcgtccatctgaatctaccacagtggcacgttgctctgagtttgctcaccttgttccaagaaaaaaccatgttgctctgtctgcctccttggacaggctgtatactttgaataaggtggtaaagtttgaatcaatgaacatattcaggcatcggagcaacatggccaaattgagcctaacctgcccctagttaacttggaacagacaaaaacctgcgagctgaacctgacataccaacgggcaacgggtggctctcgattaatctaagaccgagagatgatcagaaaacttttagtggagatgagccagatatgagctgtttagatgactccgagagaagaattttgttgtgacacgaatgataatgtctttccaacaagatatgggtcgccattatgttgccattactttgactacaccacagctgaaacctactccttttttcctctccacataatcaaccacgttaggcaacaaaaggtggtagattatttcataaatgtaactttcttgtgaacatcacatttgtcttagctctccagaacaccaggtcaaatttgctcaaacttctcacccaagcatgctgttttttttttatatgctggaaccattgaagccgccgcaacagatagatggtccagcgcggggcttcaaattaatcagatttaaatggtggacgatttatggctttttctgacattgagagatttttcttcagcatacttttgaattgtctgtgaccactggatgcacaattcatcaatttctgtggcacccgcccccatcaaaaaattcagtgatgcgtccatctgtggtctgaccagattacagttgatatatggacctgaattaatatatcaacaaccaaatacctgtccccatgctatattgcgaataattcagggatgttgaggagtagtatgtgtcaattctcaggtttcttaggtcgtctccttgccgaaaaacctgggagaacattgtttaattctggtatgaagaaaattgttgattctggtatggattctgtcgtgcatataacagctgattagatggtagtctcactgaactaaagtatgtttgtattgggttctttggtcatctctgctgcacaactgccaaaaacttacgagaagagagaaaagatcactgaccaaattaaagaagcaaaattaggtgaagaaaaaaaaggaatgcagaggggacagtccacaatctagtctcaatctgtgtggcttgaactctttgatctcgtcctccagctgtctgatgcaagctttgtcaaatcacagagcccaccacggaaggcgaagttggcagcaacatgcacatgactttcagagagagtgattattcaatcgatcgatcagccggatgggctacatgatgacaaacgggattgactcggacgctaatccggcgtccaaagtaattaagcctaagtcctaagacaagttgtgttgtgccgatctgtactgtgcacggctgacccaatcgtggcgtgaagtcctcgaattaagccatcgattagattaattactcgtgacttcttgagtctttgtagatgcatttgctgcaaacagtagattgatgtctacgcatgcgtatggttttctgaagtttatagcttttgacggtcaaatgctaaccaccgggacggatgaaaacgctggatagcatagtactcacgggcttgtcggtttgtggtttaatcagcgtggtgcattgtagatgtactattaacttcacgggtagatatgcaaggtttacttgacctaattaatactagtatcaacctgtacgagcccaactatttggtgaaactactttgacagtttgattgagtggaaagactgaccaggtacattgttcagatctagtagacaacttttaattattctgatctaaaaaaattgttatgccaatttgttttggttatgatacaaccatacaaacaactactagcttattgacaatctggtaatatagggctaatcagtactaaaacttaagcggtttaattgttggtgctaaacagagactagcagatgatcgtcgtttttggagcacattttccatctgcagcagcatataaaggtagctagctgactttaaagatttttgtcagttttcatttattctttgcgattatttttgtcacttttctcttttgtacgccaaaactagctacttcctccatttcacaatgtaagtcattttagcattttccacattcatattgatcaatatgaatatgggaaataatagaatgacttacattgtgaaacggagggagtagatcctttggcaattcatacaatccttatctctactttatgtcccttttcttttggaaaaccctcaccatcaccatgtgttgtacttcacttaagtacgttgtatatgtactatagtactactgctaattcattgtcaaattaggacgtcgaacacattatattgtttgattaactgaagatgacggttgatccttgaagatgtgaatggatgggccagcaggttcggccgtcagctctgaacaccaagcactcaaagtaaagtgtaagtactggagtagttgtttaactgaagaaaagtactagtacctatgtgtgcatatctacgtagctttccgttttctcataccatattgtagtataataccacaccattctgactgcttttgatgcgagcatcatttggttactcaaaaattttccggcgatatgtgaatctcaaaacttgtatgcacatcaagtgagaaaacgactggtgatttacgcttcgttgttgtcgtgccgtcatacgtgcaagcctgtaataatgtaatatatgtactctatactccaacatgcatgtgtacagtacagaaaacgcagtgcaagttgtatagtgccttacaactcaacgacgactaaattaaggggaaaagttaactacaaatagctagttaatccggtttgatctctttgctatctaccaagtcagagagagagagagagagagagagagagagagagagatgtgtagctttcagaccggacgtactgaactgggagtgcagctagacacataaaaagaaagataagaaactatccagtgatggtgagctaacctaaacaatgtaaccacttgggcaagttcgcttttgatgcgctacaatagcttatagctacctgcacgttgattaattaggcagcatcagcagcagcaggccggatggcatggcgagatcgacatcgaaatatcgcctgtgaagtttgaccggtgtccaatggccgccaatggcgtcgcaggcgtccatggattacgtataccaaagacgtgcttatccggcccccaatttgcgattaaagtgaaggttgagcacatgtggatgtggcgccatcctcttttgatcccccaagagccacacagaggattaattaactaactaatcgcctaaccggagcagcagcaagcagggcatactgattgatcaattagttggtagttaaatatatcttgcttcttgattcggtaaggggggagaaagagcatgccaatttgtccatttcacaatactactttggtgacaagatagtgtatgtggtagtaggcttggtagctacaaggtgatcttgtaatttagccctaagactttagcataatcccatgttttttttaatttgctccttgtatttatgtacaactcaccagacaagtactccatatgcgggtgtacatttgtacctgcagcaagtacgcatatattttagctgaaattcaggggtagatgccgcgttctacaattcttttatgcatgttgtaagctgctgcaatttggccaacacaccagtacaccaccacacattataatttagctactatagcaaacaacgaacaagacggtaaaaataaaatccccactgtcatttcaggaaaaaaaaccgtagacttgtggactttgaccagtattaccctgactgaacaatttattttttgtgaatcagctggaagaatctacccaggtctactagagtatacacagccacttggccatcgatcgatgtggccagattgtagcccacggtacaccactaggacctgcatttatctacgcaataaacatgcgtatgtatacgtacgtaagcacgaaatgcagcagaaatgcagactattagtactactcgcacattcatgctgaattgctgaagcatcaaccctagctagcggccgggtcttagttttttgtcttcacgtgatcaagtcatacaccacgggaagagtttggctgtcacccaccgtccctttcgcaggtgacattgtagagactttgctgttgctgtatgctgcgacctacgagaaatgaaacgacgatactgtttatgaatcttccaaaagctcaagggcacgcatgcaaaacgccaacgtttggaagacccaggaaaacgacctaaccacagtaggcaatgcaactatgcaagcttcgagatccgagcataaaacattgggttgacttgccataacagccggtcagcaaccatccacatgcatgctagagattgtgcaaaaacccctatctgcgtttagcactagttaatatgtttctcaagcaaggcaaaaagattgtcttgccggtgcatgtttgattgttttccatgattcggcgatcgaccatactaacgcgggagagagagttaaaaaatgagaatcagatgggcagaaacaacacggcaggggctggacctgctgcatgtggccactacgggccctgcattggccagcacgcagcgaggcagcagctacggcgtcagcgagagccgcagggaaagatagaaaaaaagaaaacgattagctgcggcgctgggtcgctggccaccggaaaggagcagctgcttcttgcattgctcgcgtctccactttccacacgcagccgcgtgccggtgatcctgtcgatggatcgatcggtcccccaagtcagacaggctgcctctctggtgtttttgttcctgtgcttgtgtcctttgcgctctctctctctctctctctctctctctctgtctctctgcccaatactgtgcatctgtgtggctgttgagccaaatgactttaaccagaagctagctcgtctaccgcatggtttgcacatttcctgtgtgaccaagtgggaaacttccaggaaggtatgggtgggggctaggcttggggattgaggcagaacgccgatctcaaaagacagctttggttcagggtttcagggcatggagtgcaacaaaagctcttatcacctgcgtacatctatctaacatgaatgcttactggggctgagcagtttagcagcctcgctgctgtgatacgtacagtactgcatacccataactaactgatggtacttcatgatgtaagaagtgtagtagtaggagtataatatggctaactacagtaaatcaatggtgtgcacagcaatattgattaattgaatggtgttggtgtaagtaagttgatatcggcattgcttggtgtttaggtctagggacttaactttagtctctatatttagacactaatttagagtattaaatatatattacttacaaaactaattgcataaatgaaagctaatttgcgagacaaattttttaagcctaattaatctataattagagaatgtttactgtagcatcatataggctaatcatggattaattaggctcaatagattcgtctcacgaattagtccaagattatggatgggttttattaagtctatgtttaatatatataattagtgttcaaacattcgatatgataggtacttaaaagttagacccgtataaacaggatctagtggtataatgtcctgtgctagtgtgtagaaatggagtgtacatgcacgtcgtgatttaaggacactttaacgctatgcagcgtatatgcatgcttatgccttcttaagatgatttgacacttgaccacgaacgattgaaccgttgctgtggttggtaatccattttaattatccttcattaattatatatattcgtttaattcttatgatttttttggaattttaaaattatttatattttgggatggagggaatataagtaaaaaagattctaaattttctttcaaacaatgcactattagtagtatcaacaatttactcatgaacaaatatacagtatactctaggcctacagtttgctcgagtgggtgtcgtgtcggttgttcgtgttacctcgctcgtcaatattgtccattggccattgggacatcactcatcactggtctctcctcgctcccacttactatttcccgtccttaaacataaatgtaaatgattttagtgttaataaactttatccacaaatataagagattttgtaatataattttttaatatgtttcaccattactttgtgagtctcactccgatgctctctactagtagtagaaaacaatctgaaccgttaattttattagattaaagaattcagatatattatactaccattctagttagcgatagtagaaacgcgaagcaacattactgtagaaaattagacgcctcatcggttgcccatattccctaacaagccacttattagggaataaaaacaatttataagtaaaacttttgtacatttgttgatttaaaagccaatggtaaaagaaattatgttgaaaatatctcaaaatcaacaaaatcaagttcgacaatttaaattttgacttttgctttgatttattagaccaaccagtgaggctctaggtgcgaaggggtataaccgttatttagccgtaactaaacctttgtttctttgagcgataccaacataatagatgactacatgttgatctaataaaaaaacataaacgacaaaattagccctaaccaatatattagtaaattactaatttacccttaatgataaatagttcggattatttctgctcgttgtataatgttaagtaaaaagcaccggattgtattgttatacgtgatgttcaagtctttaaatatcaaaataattttaatatcataagatttgttataaataatctaaaatggttataaataatctaaaatcccatatattcgtggagtactatcaagcgagccatcgccattcgccagcaaaattcggtggccaggcgagaagagctactacgacttttcgcgactcccttgcttggcttgtccccatgttgccgccgagtgcagattagaacaggaacaatagcaggctagaacctagccgtaaacatattttaagaaaataaatgagagagaaaagcagcggactatatatttgtagtcagctgtagcacggacttcaagatacagtgtgtatgacaggtgagaccagatattagtagtgtagtatgtaactattgtatgaatgagctattagattagctatagatgaattggagcccgtagttggctatatatactattaaacttgctcttagagcaggtacaatagcaggctattagccagctataaacatattttaatgatataaacgacgagagagaagagcagcggtctacagatctgtagccagctgcagcacagactctaagacacactatatgacaggtgggactatatattaatagtacagtaaacaacaactgtataaattagttattagattgactataaatgaattggagctattagtgggctgacttagctcttattgttgctcaggtcggaggcccccctgatctcctcaagagccgtgcctgccagcaactctctttctttcacacacactataatttctctctctctctctctctccgtacgtggcgacgttggagtctactacctgttggtgactagggcctgacccatcaatcaccagtggatcacctcgcatccgtacgtcgtcgtcgctgatattgcaagctcgtagtagcagcatctccatctcatctcccgtagattttgcacggaccgatcaggaccgatcagtgcaacagtactagagagaggcgtatcattgccggcctcctgctccaagctatagtacccgatctgatactactcctactactacaagtctccaccaattattcttccagaaaccccagcgccgtgttccaatcaaagattccaccggctgcctggacgccgttttcgcctggccgggagggccggtcgtcgaaacaacgttgattccgctgggttttcgttttcgcccaggccggccgggtcgtcgtcaagacaacattaaacggtgcggtttaatgtcgtgacatgatgggttctcgtcagtctcctcgtgacatgatggtgtgtgcatatgccgcatcagcgcagcagcttgattccaatggccgtatcaattcgagatcgatcacagcaagattcagatatggccggtaccattgccaacaatcctacctcaggctgagctggaggtagctgctagcctgctagtggtagtgtactcactaccatggctagttactcctagtatcaagcatgatatactggcactctgatcacctctcgacgtcaatgtgttgcacatgccaaaagatcacgccttgcatgcacagctgattaaactaatcaaggcacgaacaggcacctaaccgggctcatctggatagctagagaccaccacccaccataccataccattccttccccccagcttgcgatttgttgcaatgcggcgccaggaccagcaaaagcatgcgcgataagcttagatgccgtgggaacagagcagtagtacttgcaacgcgttgcttttgttcatttccagatctctctctctctctctcactctctctctccttttcttttaaattttcttttttatcttctctattggcgagcatatccctgcaaaagtcactgtttccggcttcccacctgttgctgataagtttagcatatcatgtctacagctacgtgtgtcagtgtgtgcaatttgtgcatgcataccgccatgggcgcgcccatcagatagctccaggccaccacgagctttccctttccaatcaaacaacaaacatagggcaccccccgggacatgcatgcacctggggcaaaggtgcaggtagagagagagatcatcggtctcggcacacaacacgtcacgtctcgcggactgcacaaacgcatcagagaagctaaaggagaaaaagaagctgcagatggggaaatatctccattggttgtggttaattgacatttgacagatatgatgatggataatttcaaatgtttcttcttcttcttgtgtgtcagttggtctagccttctagggctatgcttcattagtgtacacttgggatgaaaagatttacagcaaagcaagcaagaacatgggcgaataaattaacaaaaaaaaccaagtgagattagtagataggatcaacaagggactaagctagctaccacctgaattatgatgcatgggagcaaaaaagacactagctagagaagatcgagctaatagtgctaactctatactagtgccagctctatgcattgcttcttgaacgccgccgcttgtggaggcgtcgtcgccgccaagtccctggctctcttgcacccggccatctgttcgaccggcgccggcgccgtgagcaggtccacgccgaagagcctgacggccttcaccggcgacggcgctggctgatcagcgggcgacgcgagggcggcgccggtcgaccgtactaacttgcagtcgatgaagagcttgccgtcgtcgccggcactggcggcggagcggtagaagccgacgacgtcgccggcgtggagacccttctccttgacgaagcggctccagcccttggttagcacgtagctctggctgctgttccagtacgagtaccggaaccgccacaccttgccggcggcgtcctcgaagttgaggaggacacccttgctctcgccgccggcggacgggagctgtagcgggaagtgcttctcggcgtgctgcttcggtatgacgagcctgttcagcttgcccacgtcgctcggggtgaccgtcttgtcgaacaggtggtcgcgcgccgcggcgggcgcgaagggggagcggggcgacgagaggtggccgttggagagggaggcggtggtggtcgcggccgacggcgtggaggcggcgaaggtgcgcttgctctgcgcgagctc

SEQ ID NO: 9148 - DNA, 2862 bp, Oryza sativa
agcccataatctaagtcggccatccttttctgaactctgatgctagtacactctttaatttgttggctcattaatcagtggctgcccctcgtgtgtgtgcatcattgaaatgatccaaagtcaatctggagagaattaagaaaaagcttaaatttttattggcgtttcaaagctattcggatagaaattaaacaaaaagtagttgaagggtgaacattcatacacacatggggagaattttcagttacaacagccgtcatcctgaaaatttaattattctgcctccttaatttgcaattgaattaatcaacttctgttcttcaaaagaaaatgtctgctagcttacaaattagatatatataatcaatggcacctagtaaggttcaagcttccaacagactaggagattattcatatttttgttcatttttttacactgctttaccaaagcaaggggaaaagaagcagcaactagctgattgactggagagccaacattatttttctctctgaagtatctcatgaactgacgcccattgcattgctttcatatatttataagaaccagcaaaccagatacattaactttgttcctcacaaaaaaataagacataacaacatataactttgcaatatataggtcaaaaccgtacgggttttacctaataatttaacagatcacaagcagagttggataagaaagatacaacacatgcatgtgttctttgttagtggttagctgacaaccaattgcaatttgcaagcaaaacgaaacaattaataatgatcttggtacggactacggacagaaacatgagtgtacttaaaattgatcaacctgcttcatgccaataagtacgatatatatctactaagattttcaaggctgcatgcatattacatcatatagcataatacaattatatttgtactgcacattacagtactgagtaataatctgttcctttttttttcagaaacaaacattccttcatatatattgacaacattgtaaaaggaactggatagtccttttttttcttatttgttaaaaatataattgtgttccacttaagatggagacacatatatatactagttcatgtgaaaaatactgttcttgatggacagaaaagtaagagggggagtgctttctcattggctgcaagtagctgaaataaaaattcaaggctagggctggttttgtttagttgggatgtcggagttttgagaaaaggacatgcatgcacccggctacctgccatctgcacacagtcccacacacacaaaaaccctaatcttttcactggagacagtagtacatttccatcgggcctaatcctaattatcatccacaacaaaactacatccacccactctcatcaccatcctaatttaggaccaacatcacaccaataagttaaaagtagtggaacagtaggacgccgtatatgtctcttcttaaaaagtaggtatcgtgtgtaaaatggtcatttcagatgaggttgtcactgctgtagatcgacatgttagattcttactagtcgcgttcgataaatattaacaaaatgcgggtaccagttctcatccacgactaaagagagcgattatttttttacaccagtcatcagcacaccaaacagagcaccactagctcaatagggggaccagtctaagcttgtgatcttaaatagaaaataaacaaataaatgaagccttcaccgaaacaagttaatatgctaacctgcaacgtacatgataaactatatttccaacatttgaattcacatggcaaacggggacccaaagtcaaaataaaaccgcaaataaccccggggaggagcatgcaggggaggatgggggtaagaagaggggtgtgctccttgggaagaaaggccacctaattaattaagtttttgcttagtttatagtggcacccaaagtctctctctctctctctctctctctctctctctcctctccatcaagtcttcatgcttacatgtccacctttctccctcccctctcttcctttcttataccccacttgccctcctcttctcagtttctaattaagcagaagctactcttcttcttcctcctcttcttcttgagctgtccaagctagctacacctactaaacctccacttcacatacaagcagctaggttcaaacctagcttgcctagctaagcttgagaggaagagggtttcacacagagtgagcttctacctctgaatcactctacctaagacaagttagaagagagatacatcaaggtatgcagatatatgtgtgtgaattcagatctcctcaaatttatgcatgcagcaatctccttttcttgatttaagttgatctcttgttgatttcttgtgttctactgcaattgcatacactaatatactattagaggtagattgattatgttgtattattagcaggcagctgacatgtgtctctgcagcagcagagaagcaattagttgagagattaagcatgcagtgcattaattgtgcttctcctggagcagggtcaagctggcgaacaggtcgtggtggtcgggccccatgggcttgccggagcagccgtccggctcgtcgggccccaaggcggagctcccggtggccaaggagccggaggcgagcccgacggggggcgcggcggcggaccacgccgacgagaacaacgaatccggcggcggcgagccgcgggagggcgccgtggtggcggcgcccaaccggcgcccccgcgggcccccgccgggctccaagaacaagccgaagccgcccatcttcgtgacgcgcgacagccccaacgcgctgcgcagccacgtcatggaggtggccggcggcgcccac

SEQ ID NO: 9149 - DNA, 3031 bp, Oryza sativa
ccggcgcctccgggctccacggggctcaccgtctacgtcgccggcggccagggccaggttgtcggcggcagcgtcgtggggtcgctcatcgccgcgggcccggtcatggtgatcgcgtccacgttcgccaacgccacctacgagcgcctgccattggaggaagaagaggagggctcaggcccgcccatgcccggcggcgccgagcccctcatggccggcggccacggcatcgccgacccttcggcgctgccaatgttcaacctgccgccgagcaacgggctcggcggcggcggcgacggtttcccatgggcggcgcacccccgcccaccgtactgatcgatggcaatagcatggaagattcatggcggctagctcgccgccaccggcagcggcggcggcggcgatggccttctcttctagcaagctctagctagctgcatggttactgttccattggaggacatgatgatcgatgtgatgcaagatcagtggcgccattaattaggttagtacatatgatgaagtggtgagattaattagctactactgctactatgctgctgctacttaatttgttgtggtgaaataattaaggtaaggtgatgcttgtggtttaattaatttgtacttaattgagctagctatctagctaaatctagctcggatgatgatgcatgcgatgtttcaagtgtttctaatcgatgtttttcggtttaatttagaggtaatttgtctgacattgttgcaacttgtggccttttctagcttctttccttggaatttgatctgtgcaacatgtgcttctcatacttaatatatgagtttcaggagaaacgatcatttctcccatagatcttaactactatgcatgttctaccagtatttgcatatatagtatgtaagctatagtatctgttggtcccaaatctagcactgctttgagcaaatttattaatactctcttctctgccttctcgatcccatcttcaaaatctgatgcaaaattagataatctagcaagcgtgatctcaactttgttaatttgaatgtttcaatgtaagcatgcacgcgtgcgtgcaaatgtttactgtgtttccagatgtaactagctctagcgctagaacttgagtttttttaccaaactaacaagagttttcagtaaacttcagtactactgaatgtgaaggcgtgcagtgcttcagatcaactttcacgtgcagcactccatgatttcaactttcaatcaaatttttcagtaaaaagatgagcttggaatcctaggatcgtttagggaattaatataaggagctagctgcatctgcatactgaatgaaatcaaagggtaaacatgattgcatgaatactgaataagcttctgtgtatgagaactgaagcttatacacttacttctaattggggagatattgatgcactattatataagctagtttcatgccatttagagctctgaaatgggggacctgtagatactactatgatttcaaatgcatgaaactcaatgttaaatgtacttttttctaaaaaaaaaagaaagatttttgtgtatgcatagccggccatgtataacagctcaattaattaagtgtagcatgcatgttattaatgtggaaaacatttttccgaacacaatggttcttataaatgttgatcaatgtctgttgtataaccaaattaatgcatatatagctacattgatcaaatacccagctaaaaattatataattgaagttaatttgaatttcagttcagacttgtgtgtgcaaattgcttagtcccaaaatgaaacttgatatggccagttttctacacgtgcaactccttgaagaagaatacacattttaggccccatttataggatttgtggaggaattttgtaggattcaaatcctataggaatcttttcaatttttccctttaagacgaaggattggagtacgctttcaaaattatgtgacattgctaaggaatgtctcgatacatgtagattttggaggaaaattagagcttcaacctattgaaaaaaaaattccttttgtcttcgattcttgcatttttcttgggatctatatattcaaacgattatttctattttcctgtgtcttgtgatcatctattttgcacttgcattcctgtcaaagtaaaaatcatgtgtttttttctattcattttctcaacctcatgtttcaaagaatgttgcgatttcttatccattttgcaaaaaaaaaatgcatgaagagatgaggtaatattgtgcatttacattttgtttgtcttaaagttcgttgatagatatatcttttcaagcactagctattagcaagctagctaggaaaactattagctaattatattaaagcatgttgcaatttctttcacaataataaaatatgtaggattaaatctactaatttgggatatttgttgaaggttaatataatttctaaatttgtattcaacagccaattaattagcatatatacacatataattagtatatgtgtaggtgtccgctttgacatatgttatctactaataataattaggtggatcaattcatgtgtgcatggaatatcacaattcaaattgtggtctaaaattgtatctataacggccgtctgtcaattgatatgatatacaatatgctgaataatgcttgcgtttcgaaaaaatatatcactatattgtcaatctattatctattacttcctctttttgaaaatataaggcacataggttttcacataaccattatttttctaattcataatatattatctatatataacaaaaaaaattaacatcatatgaaaatattctcaaatgcaaatatagtgatactatatatgtgcatggcactagttaaccacatacatttttagcttaataattagtaaaaaaaagtttaaatgttgattttgcagtataaggacgtcttatatatatttactagctagtattctattactagtgtatacgtttgttttccaacgaaaaggcagcacaatataat

SEQ ID NO: 9150 - DNA, 8252 bp, Oryza sativa
cccgctcaccgacttgccctgcttccgcctgatctgctgctccttgatcgagttccacagcttcgtgatggcgtccctctgctgcgtcgtgaaccggttcatgttgtcgtaggcgtgcttcgcaaagatgtcaatggcggtctgtgtcctgataacataaaaaaggagaattagaacacaaaattgttgaatatgtgttgataacataaaaaaaaggagaatttagaataggaaattgtagtgtatgtgccgctaacagcataaccacatgatgttctatctcaagagaactcaccacggaatcctatagcgccgagcagctatttctagacatttcaggagggcttctcgttgtgacttcagaaatctctttgattcatcctcatctgctttcctatttagagcggcgaccgtcttctctcgagccttttcagacttctttgacttgtgctcaagtagaccatccaaaccaaaaggatcagaggattcctcacttgagttggaggctgcagcatgagtgctatcatctggcaacgagttggatgccgcagcttgcgggttatcatctgtgttattactttcaacagctgctagagctgctgcttcatcattgtcatcatccactgttgtgattggcagggctgagatggcatctttgatcttccctacagcctttgagaactacaaaacagtatcaagtacgttagtcaagcactcaaatcacaagctgtgtcatagacatgagcccagaaacaataataatgcatttttcacatttgatagagaaaataagcagcgcaggcaccaccacaatacactcaccacaaaactgtcatccgtaaaaagatcatttgccaccactgcatgcagcacccatatatcaaactgatttttctgttgttggttgaaacactgcaaatccaccacaagttataagtacaagatacaatggtataatggaactgcataaaacagagaacactaagacttaataaaaatcttcacctctgttacaccctgggctgcattaaacaaagcctggtaatcagcacgtacagaaggctcattacaagctcctggtgaagacattgcagcctctaatatagcaaagaagtgactgattgtccctggcttgacactcccagcctcaataagctgtagagctagttttgatgccttgctgaattttgaaggattccgtatgtgtgaagttatcttgtgcatagcatcaatgacttgcgtttctgaggcatcaacagtagttctaaacctaagtcgcttctcaggagctacaagaaaaaaataatgaatattagaagtttagaacatgagcatgaagcaagtaaaatatctctgctgttgttataggaatatagcgagactgtaaaagtcgctcgcaattaaaaaaaatcatgtggaaaataattggatgataaaaaaccttcagatataaggagtcattacaactttcaatcacccataaatcttgtcagcaggactagatattcagtgctagcacactaacgaaactaacgaaactagagttagtagtaaaacatgatggcattttgcagatggaagagttgtcatataagccaaacttataagagatgtcaccagattctgttaacgttccaacttccaatcaacacataacatagcgaaacattaatctttgcaagacacaatctcgcaaacaaagcacaaaaaatcccagtgaattacctggtggtgataatatcaacaatactcactatattcccaattgagttactccaagggaccaaggcagcagtaaaccctggcactaagatttttttaaaaaagggcaagcaaagcttatctgaaccagatcaaatgtgtataatcttcataactgaactaatttaacatcttctgttttaagttatgtcacaccttacatactcggagcttattttgagttcatattggtgaacaatgttaagccaaacatatgtaagagaagaggttgttatcctaaaaggaaacattaacacttgatttgacagggagtctcagggctaagagcttcaactatttataccttagttctgcaaaagacacaagtaatttgcacagctaacatattctggctgatgcagtcattgatctcaagccacacagaccaaacattaacaattggaacatccctgcatctgtatgctatggttaatctccttgtgagatgtggcaaatgagaactgggaaaccctaataccgatctagaaaatattcctatgaacaaagttcgcatcaggatatcaccacacaaaattcataaattaagccatgaatttctagccagatgaaaaacctttcaatttctcagctcctaggcgatgaaaaatcagcaactaatcgttgacaaaatgtacaacaaagaacacaagctagtcgtactcgtacgaacaggagtgcatccgaattcccaaagccgaccacgcagagcaggggacgcagcggcagtagcagtaagcatctatctaatttcgcacggagtacaagagcgcgagaggagagctcaccacgtccttcggctgcggcatccgtggcggcggcggcagcgggtgaggaagcggcagcatctgaggaagagagcttgtcccgcttgagagcgctcttcagcgcgggcagtctcggaggcggaggcggcgatggtgaaggcgcgcgctctcctccggcggccggcgcggcggcggcggcgggaggtggtaggccctcgaagaggtcgtcggaagccatggccggtgtcttggtctcctcctgcttctgtctgctcgagatgtcctaaattaatgggcctcaaactaatgggcctagttggtctgctatccaaattgagatggcccatagcccataggggagaactatttatgaaaatactcttggagttggactgaaattacgcgcctgccatgcagcaaaacctccaacgccccacactgcgtgcacttctcgatcattcgatcgcttccccaaatcgctctcctctcctctcctctccaccgccgccgatctcctcctcctccggcgccgtcgccgcgtcgcctcccggagctccggtgctgccaccagcctacgcagcgccgcctcctcctcctcctccggcatccgccaatcgccgccgcctggttcgtcggggagccccgcgccctaacgttttctagaggcgccgcggatccagcgcgaatcgatcgagaggtaaagggtaaggactcgactccagatcatctctcgatttgtcgttttcttcccctccatttttagtccattatttttttttgttttgtttttttatggctgggtggcgtctttgttctgatcagcgcggcgttgtctctcttgcagggaagttgatttgagtcggcggccgaagaaggaagccatgaactcgagaaggcaagtactgcacactaacttttcgatgtgttttcgattttgatgctatgggtgaatggagttaccgggttagggttgatgagcacggatgatttggtaggactgactgactagctggttgagctatttgtatatttgcattagggttctatatctactataactgtgtgctgaaattctctcaggaaaaaaaactataatgtgaaattatcgtgtgattacagcaattctgatgtatgctaggaaggtcaatactccttcgtgggattttatctgttagttgtgagattgcatcctttgatgtaagacatttgccaggggaaagctcccatgattccgtagttagcaacttattgatatgaatcaccggaaacaattacttatttttgctggccagctctagctttgcatcctttataacatgtttgaacattgatgtgcttccaccaaagattgatgaaatgttgtgcaaggcaatttggttcaacctgaaagaatgcctcatgcttttcaattgccattagtcactatccaaaagtttgatttcggaaggcatgtgctatgctgctgtatatttactttgctcatatgtgattatgtgtatactaccattaaatgagctttaggtctgtgactttttactcttaaaagcaactagttatatgccatttcatcctgctgccagttgatacttatagtagcgagaatcttgtggcctaagaagtcgacttcctgcattgtgtcagtttaataaaacaaagaagaaaactcaaataataactttttgtgtaaatgaatagaaggagaacaaaacacctggtagattgaccaactcatgatcattggatcacatttctatttttatcactcctgctctgtcccaagctctctatcttagttttgtaaacagtggaagtgtataaggaatcaaagaaaagggaaggccctaacaaggatctgtacagtgggatagcttgttctaaacttctactacttgatattgacattttgacatttggttgcagatggagtttatgtccagctgcaagcctttgtctgctctaaaagcttgttactcactatgcacagtttccagtttaggaatggcctgtgatcatctacctgctaacactaagaacttactaactcacacatgctgtttatccaagtcaaaagtacacagtattagctttgtcagtcaaatatatttgataacaagtattaaccttttcatgatattcataactataaattcgagttgaacattattaagatgaatagaacttgttagtattgtggaaggtatctatagaaatcagtagtatgtacctgtttatttatggcttgagattgttttggctcatagtttttcttcagttaatttgttgaatgcatattctctttctgtttttaattctttgatacatgtgtcaaaagctattgtttttgtgaacttgggagattttagtaatgtcgtcccttcatacttgacatatataaatgcattcatgaattatgattgctcagtgtatatccatgtagactaccacggtaaatgtttctatgtaacagattgaatatttatttatatggtttgcttagtttgcatgtgtctttgcattttatttccatcatatgctttgcgcacgctgattatttcatggaaattttagcaactaccgcagcaccagaacttctctttttgatggcattgaggagggcagaatccgtgcaacatcctattcttcacatgagatagatgagaatgagaatgatcaagctattgatggattgcaggatcgagtcagcattctcaagcgggtaagttgctgcgttattattggacgtctgatttgccctaagttttgccagtaaacttgtgaagaattactgttttgattttttgacataatcactcgtattagtatatttgtattaagccgtgctgcacagatggatcattaaagcaactactacatttgtaatagcgaaaacgaaagattttgttgattgtgacttcattcgtggccacctattagataactgtgaaccatgtgcttcttggaccattttcatttgaagtgttggaaagtgctacagcgcagcttttgatcatgagatttatgcttaaatatggccaagaaggaatctgagtaatctaatgggccttgtgataacttttggaagcagctccaatgccaatgattttattaatctttttggtattcatctgatccatgtttctaacatgcgactgatttacctctaaaggttttagtgctagaaattagctaatgaatggactatagaagattttgtttcaactgcaagtagccagcaaaacagaagattttaataaatctttggatagaggacacgatgtaattcttatgtaactgtgggcctcttcacacctaatcaattttctttgtagtcttaccaagacatttcaaaggtctgagccttgaattaacgaatgaaatgagtaataatatcttcagtagtttatggtgttttgctcctgcttatggatcaacagactgctggactgctggtcccgttccagtgtttggttgtgtctagtttttatagctatgcgaatcttctaccctgtcatttctttggagagatctacagacaatcatatatggatggttactgaggttattttacgtacttgcagttgtctggtgatatccatgaagaggtggaaactcataaccgtatgctagaccgaatggtattttatatttatccttttaacttttgcttccttgaaaaatatccttctagagttctattatgttgacatcttgcctgatccagggcaatgatatggattcgtcaaggggttttctgtctggaacagtggacaagttcaagatggtaaacactcacacagtacaatcttccttccatcataccatccgtatattctgctgagaccgcaattgatgtctacgatataggtttttgagaccaaatcaagtcggaggatgggaaccctcgtagcatcattcgttgcgctttttctgctggtatactacttgaccaggtagaagaggaccatgcatcacttgcctactgttgtgaagcgatgtgaactgggttgggtactcaagaacacgctgaaaatgtctgtgtcaatttaccgtggtgtcgtatatacctccaatatctcgctgtcataaagcaaaatatgttgaccagaatgtttctaactctgcactgtgtgaggattacaacatgttcgtcgtttgctctggtgctgtaattacctttacagaaaatgtttcctgctgtgttctgtaacatctgtttctgtatgcggtcatgctatctgtattatattataacttcacaagagattgtactttggagtcttaattgccatatataagacgctattagtatgtggttaatttgctgctactaccttgtaggcttgtttagcagagcttgtttgggcagttctggagtcgacacctgtcatggaacaaatccaaatcgaaggaataatgtggctgcagcgtaagccatttgtgttgtatattataaagttaacgactgctagtcagcgactggttaatcacactgatcacaactaacgcaattatcaatggagcaattattgagtgaagatgccttaatcgtgcgggagctagcaccaaacacctgtaattatcatagataattacgtcaaccgatcttaatcacatgcatgcatgtaccccaatacaatactcctactcatggctcgtatttctataccgtcttgctcgaatagctatactaaccaatcaagacggtttttctaatcatgcaacttaatttgcccatgtcgttaactgataatcgaagtctgatgattgttgtgtagagacctctctctctacttcaaaatataaaacataatcaccctaaatccaaaaacaaaaaaataattgttatcatcaacaataaatcatcgtaataaatacatgctcccaataaaattaaagattttaagagtaagtgattttaaaaattaatttagtacagatgagattttagttatttttttaataatggaatgaaacatctcagcctttgctcagaagattttagttaattacatgcatatatgtacgttttgtattatgaaacatctaaaaatagttgtgcattatactttggaatagagtgagtatatttcttctattccgggttttgttatagatttttatgtcgaccttgctcctagatactcaaaataatgagggttgtaataggtgcctatatacgtagatacttaactttttatacattaatgtgattcattcagtttgattctaagaagacatatatttcctactacctgatttgggagtgacttaattatttcccgtcaccagatgatctgggaatgggaggccatgataatattccaattaatgcttttgctactaacagagaatctatgcgagattcctttaattcatctatgagcagatttaaaaaaaaggaacttggctctgttcttgtgatcaaacacctacctgtacaacagctgtactcttgtgcagtttaattagtacgcactaattaatcaatctgctgctttgtttggggtgtgttagagatgtcatgcacaccaccccatcaatgtttgacaaagcttaggttatccatctctgggagatgtgccactagtttaattagtgggcaaatgctttgttaaaaaaaagcttaggggttcatatactttaattggttgcacttaacttttgttttgtccctttcttttttagactggagtggaggcatgagcatgacaggatcttttatttggg

SEQ ID NO: 9151 - DNA, 4154 bp, Oryza sativa
caagttgcgtaggtagagacgcgtaaggccagcgaatgcatcggtacaggcaccgaaaaatctcatgagttgcttcccattgtggcggagatcataagtagagtaatgttccggcttcttctctggcagaataatgaactcgacgctgtcgaggaggttgttggtggccatggctcgggcgacagctttgccaatggtgagacaatcatagtatttcaagtagaaacaaacgctgagatggcgaagggggatatcctgtcttctgaaattgagaatgttgtctgttgcatcggcgacagcagcgttcatcgggattgtatccttcaaggtggcataaccgcagtcgggcacgaaggaatcaacgctaatttggaatcgcgagagcatgtggcggaggtggatcgtcctcttggaaaggaggcaggttctgacagcatcgggggtgttgagacggtcaaggatgttgagcagcagatcatcaggtagcttggtggacctatccactactagttgggggttattgtgagctgctgatttcttctgcatcaatcaatataattgcaaaacgaaattaattagtgcatgcatacatatccaagagaatacagatagagaaatgcaaaaggaaggaaacaatagtagatgaataaaaggctagttaggcggcttacattgcggttatggcaactacccttcttattcttcatgatggtatggtggttaattccaacgaggtgtaaagtagcttggctgatggattcgatttcttaattggttgtttaatattgcagcagcgcttatatatgcttaattgtttgcgatgaatatataaagaggaggagaaggacggtgacctcgactgccaactagtcctccgtccgtctcctaaacgaaacgaaggagaagaatttccatgtttgttagattgagtcctttacagatttttctttttgggaacaagtccattacagatttaaaaggctactcttagatcaaaggtaaaagcttcttactgtttgtatgaactatctttgtgttttcccccgttgaagaatttagttggtgaaaacagatcttcttactgtttgtatgaagtagcattccaggtttgtagactgccggttcatattgaaaacaaatctccattctctaaacacatctgagagtgttttttgtttattgcttgccaaagccaggagcaagaaccaggcaaatctcaactttcccttaggatttatctctaagtaggacaatacacattacaaacctggaatggacaatacacagtttttacccggaggtagtaccattcactaattctaaaggtcttaaaaaagtgagagtgcgatggcaggtgaaaattaacaaccccatactaagcttaaatagtggggtaaatagtaaccgtaggggaaaggataaacgaatatattttttcactgcaccaaaagaatatcagaatattcagaacattcacatacattactccagttactggtccgaaaccaagttgcaggaaacacgatgagtgaaaaaaaagaacccgaatattcagaaaactcaatatgtattactgtatagcaaaaccaagatttacatttttgcgcatagtaaattcagatttaagaccggaagcgaattatatcagaggaagcaatcccgaatccctctgtaattttcctcctcaccaactcctgctgcttgatggtccgcggaaatcttgacagagcaactttgatcttgatcttgggatcaaggtcactgcagcaatcagagaacctcctgtcgtacagggatatcctcactaggttaaccgcggcttccatcatgcacctgatgtatccaacgaagttgtcatcaggttgaaaaccgtagatgatgagcttaaccagattgtgatgcttgaaaccatcaggttgtgagctttgccactccacgtttgttttgtcacggtaacccagttcttccccgttccacgctgtcagtctccatgtcacaccaatggtcccaaactgtgatggacatcttcaggttaggcgctgcctcgaggaagaatcttgtccaagctatatcacatccctcggggagtctatccagattcaaaacccgcagtttctggagaacaggcgccagaagttttgggcactctggcttaacccaaatctgcaaatacaagtaataaaaaaaaaaggaagaatgtggttttaagttaattaagaatgaggaacaaataacctgacctgacaaagatgcttggcttgcttaaagtaattattattaccttttcacttgcgaagctgaggtgcaggttgcttatgttggggacattagcaaggaagtgacttaacctgaaaaccttctgatatcccgcgcttacattgttgaggcttaggcttgaaagcattgggacgttgccaaaagacaagggttctccgggagagacccacataccaaaaaccagccgcttgaggttgggtagagatttgaggtcgactaggtggaaacctgcatcgtaaatgtcaagctcaacaagccgcgggtgttccagctgcagctgcaacacgctatcctctgaatcacacaccgacatgcacagatactgcagccgtttgcatgtggagaggatgttgggaatgtcagcttcagcaagcctcaagttctggatgaagagctgtgtaaggccggcgaatgcatcaagataagaaccaagaaaggtcatgaactgcttcccattacggcggaaatcatcaacggtgtaacactctggctgcagctccgtcaagatgatgaactcgacgctgtcgatttggttgtaggtggccatggcttgggaaacagctttgccgatggtgagacagtcgtagtatttcaagtagaaacatatgctgagtcggtgaagagggacgtcttggcttctgaaactgaggacattgtctgttgcatcagccacggcgctgttggcctgaataagacgaggcaaagagacaaaacgagaaccgttgaagaaggaaccagcacgtcgggggtgttgagacggtccaggatgttgagcaggacatcgtcaggtaacttagagagcctatccactggtagtggtagggaaccagtggatgctgctgatttctgcatcgattgcaaattgcggaaactaaatatattagtggcaggcaccaggcagcgaaccaatgtagtataacttacgaacaaaacacaaaacaaataacgtaaatgtaaactaaactaaattgatgtttttacagcacataacaataataataaatagtttagaagtagtttatcagagacagcatagcaacatccatggatctgacagacaggcgagagagatgcagatggaagaagataggaggcggcggcggcttacgttgcggttgcggcgacttcccttcttgttcttcatggatgacctgaagcgggcgctggtggatgagatcggaatcagatgtgttggcgatcttcttgtgtttcttctatactagtagatatataaatatggatgaaggcgctcggtcggccgggccggatcctatgcgaaattggctctcggacatcgaaatcccccactcccttttcgactgctatttcggcaagtcatatcaagaaactccattgtggagaagaacaagatcagaatcagaccagatcgccgttcgccgttagcggcggcgtgcgttgccgatggcgatgggatttagggtttttcggcctctcggggacgacggcctagtacactttgctgggccgccgatataaatgggcccactcatcctttctccctcagctatggggaaaagtacaccgaaggtcccacaacttgtcatcgggttacaaaatcgtccccaaaccgcaaaacaaaatactaagatactggaggtccctcaattagcaaaaccgttcgcttgagatcctatgtggttttgaccccggttttgtctgacgttgcggatgagttagcgtggaccccacctgtcagcattgccacatcaatcttctctctcttttcctctcttctctattctttctcatcctcatctctctctctctcctctccgacagcgagtctgtgaggtgggagaggaggagggcgtcggcgaccggcgacgcggcggcggaggaaggggcggcgcgcgggc

SEQ ID NO: 9152 - DNA, 3739 bp, Oryza sativa
gccccattatgatccagctaggcataggatttcaaagcaactctgaaatgcaatggcaaaacataaaggactataaggaaaattaaggttttcacaggaccacagatataaccagaccttcatggaaaaagaacagcatctagtaaagtatgacctgcaatgcaagattgaccctggatatggcaatctttgattgctaatagcagattagaagttctcaacaaaaaaatatagcaaaagttcacctagcagctgttgttatgtttaaatatgaaagggatcttcgtttcaaaaaatgtccaaaggctactcatggtgcaacaaacatcatcactttcctcatagtactagaaaattatttgcagtaaagaaaagaaatatttttgcaggtaacaactacttcatagcagaaattcaaaagacatctagaaggcccaagtgggcagaaaccagtaaagcatcatttttggcaaatagaatgcccaagtgagcataaaccagcaaggcatcatttggcaaatcaatgtgtagagttccacctccccaagaccccaacaacaaattgcataaactataagaatatttgtatttgtacctgcagcaacaattattgctaaggagttcttagtctatccaaatttagcactgatatttcaaagagcacagtattttcttttccaactggaacatcttttcctccatctgggttgtggatgcaactgtgcaagaatgtctgcagtgtaacatgtgttacacatcctttaacctcacgtacatttagtttgtagtaaatggtacttgccaccaaatcattctccaagtgatgagactgcccggccacttacatgtctagatgcactgaagcagtatatttccgtaaaatatgtattctgggatttctgctctcttgcaagatcatacctgccacatttcaaacatgccaccctatgagattactgcaacaaacttttcagagagccaaaacgcttgtcgaggattagacaatagaatcattcaatcagcactactgaccaccctgacaagataaagaaacatctatatctggtagataagagaccaaacttcgcattttaaactctgtaaaggtttttaagtaaacgttgagcttgccatgtcattcctggttttgagaatgctctgcatataaaactaagagtgcctttagatggactgaatcctttttctttcatatctttgagacattttttcacctcagttccatttcgaatccttgaccatccacttacaaggatatcataagtacaggatgtaggatgaacacctctcttttgcatatccttgaagagctctttagcttgagtcatcattcctgctttagtgaagtcacttataagagcattataagtgcttactttaggaacaaagccctttcccaccatttcacaatacaatctcattgcttcgactttgttgctttgttttccatgtcctgtagccagtatgtcataggtgagattattgggttcaagcccactcttctccatctcaatgagcacggtgcctgcttctccgatccttccaacagactcaagaccacccagaagcgtgttgaaagtagctatatttggtgaaatgttttggtgaagcatctgagcatatgtagcaaatgcattatctagatggctgctcttgcaatgaccaagaataagagcattgaatgtgattgtgtctggggcaattccactccccaacatttcttccagaacaactgtggcttttcttgtcatgccatggtaacacagaacttgcaaaagcgtattgtatacggtgatatcagcatgaagcccagcattcatcatccattcatgaatatccagaatcacatccaacctcctgctttgtgaacatgcttgcaaaacccgtcgatgagtcagagaggatggagagaatccagctgagaccatctcatttagcaaatactttgccttctccactgccccagtcccaaagagaccagcaaccagtgtgttgtatgtgatgaggttaggctttatggagctcatcttcatttcatgaaggagttttagagctttagcagtctctcctttcctgcaatgcgaaacaatcatagtgttatatgttgattgatcaggttttaatcccatatttctcatctctgtcaagaaggattttgcttccttaaacttcccaagcatgcaaaggcaattgataaacacattataaacaactgcatcgggcaacatgtttctgtccattaactcctgaccaaacttaaaagcagtaggcatgtcgcctgctttgaagagcccatctattaaagtggtatagtttacgtgatctagtgacaggccactcccactcgcatctttgaacaatgccatggcttcctctatttttccgttctgtctcaaaccattcaccagagaatcaacaatgaatttatttaccttgacaccctcacatagcatgtcatggtacacctcaagagctgcatcttgcccttggaacttgaagaaaccatcaataagtgttccgtaggtcaccacatttggattgatgcccctttccttcatcatcctcttatactcagttgctttgtcaagcaatcctcttttaacaaagccgttgatgaccgatgagaacgtaacaacatttggactgatcgatttctcctccatttccagcaacacctgctctgcctcatcgacgttgtgagctttgcagagagcgtcgatcaatacagtgtatgtaacaccattgggggagagattatctgaaagagcaaaacgaagtgtgtcctttacttcatcagtcttgccttgtttacccaaccagtccatcaaagcagtataggtgaccaaatccatgaccacgcctctagaaaccatctcccccaacaggctgagcaactccttgcccctcccagctttcgccagcgagtcaataagcgtacagtaggtgacatggtttggcgcagccccaaccttgtccatctccctgaaaagagcatacgcctccgagaagcggccatccctacaaagtccagcaacgagagcgctaagcgtgaccacatccagcagcactccattcctgaccattccctcatacaaatcgaatgcctcctcgacccctttcgtcctgcagtagtacacaatgaagggtgtgtaggtcgccacattcggatcaacccctgcctccttcatcatgtccagcacgccccgcgcagcatcaacctggccggcgcggcagaacccggcaaccaaggtattgtagcccaccacatccattggcagcccctgtgccgtcatcctgtcggccacggacaatgctgcgggcgtgtccccaaccctgcaatatccagcaatgagagtgttccagccgatgacatccaaggcgtggatccctccgcccctgtcggccagggccgccgccgcgtcgacctggccattcctgcagagcccagcgagcaaagtgttgacggtgaccccgtcgaacggcaccccgcgcttgcacatttcggcgagcaccgcgggggcatgggcatggtcggagagggcggcgagaaggatgttgtaggcgacggtggtcgggcgagaggagcggaggagcgcgatggcggggcggagcaggcggaggcggcagtgggagtagaggagggcgttgagggaggcggggtcggcggggcggaagcggatggcggcggcggcgaggccggaggtggcgagggcggggatga

SEQ ID NO: 9153 - DNA, 9789 bp, Oryza sativa
cataaaaccaaaccagcccaacatggcaggtgtactcgaatagttccgagatgggcatacagtatgtgaattcaagcaactaaaacaatacagaattaatcgctacttatatttccaaactgtgaggtgtataatatacagaagagactaggcagcaaacaagccatcgatgtaggtaaacaagcaactcatataatggaaagtgtttacaattcgacaaagaagctagcaactgttaaccagaatttcactagccatactaacgacagagccacttatacctagagacacagggataaaactgttggggtgatcgaagcccgactgaagtatatacaccaactgaagcaagcctatattacaccacagtagatgtaataatacgagtcttgccaagtctaagtacttgctactagcctactagtagagagcaactaatcaaacttgactgatgaagaaatcgctacccgaataacagcacggtgaattaagaaatcgcaaccacaacaacaatcacatagggattaagaactgatcgtcccaactcccaaaaagctagtcgccagcggttgccgagaaacgcgaggagaaacccggaatcgcagatcggcagaggggagaggaagatcggccttaccggcgacgaggagggggggagtcgcgatcgcgagtgaggaaagcaggcgagaatgggaactgaactactctctctctctctctctctctctctctctctctcgcgagaagaaggggaaggaaggattggcgttgcgtgcggagatttttctactctctctctctctctctgcgcttctgaaaccgcctctttctctctcctctccactgcgtccgcgagcggttttccctttggtccaatgggccgcctagcctctctctttcttttcggcccaacagagttccacgtgcaccattttcctatatattactcaaaatatactcctggattattccttgatgattcctctttttatcactctcccttaaaccacttacagcagcaggttttgctgctactttaatccatttatggttgcccaacggaaaattaaatcaaataccgtggtaggagttgccattgcgtgaaacctaccagcacatacaaagcttttgctagtagcacatccatgatgattcgtgatgacattgtgccatatgaaattaagttggccgagaggatagttaatcggtagcgtcgattcaaccaatttcaacttctctgttcgcggtacacatggattgctgtaaaaccagcagcagcatgaactaattaaaatagcttaagcaaaaacgctaacgcttataaaaagttctactagtacatttgagctttgaccgcagatggccgtatccttaaattaagatgtgcccttttgcttcttgggcatcctgtagccaccaacgacgcaggcatggtcacgctcgaagggctccagggtcacctgctccgacggcttgaactgatccgccttcagcttctcaacctcgctagcgaacacagcctcagctggcatggtggagtcgatacagttcgcctgttcaaacagtttgtcagtccaatgctgctatcatcttctgtctccgcaatctcaataaacgtgattaacttcaggtttcaggagcgagaaaaaaagaccaaaagtaccttgattgaaatgacaaaatgcccaccattcttcaggaagtaggatgcgttgagggctaagatcctagcctgcagggtagtagaagattaaaattgcaaacggtttcaaaactgaattctgtgagaaccttcacgatttttaacacagggacatgccaaggaagattccataaaggtaattttatgggatacaaattatctcttaactcgagcagcaaccttatagaaactactgcaagtatgtttattcagtacagaaatatgaaccgtaaacttttatctccacagtattcattactccttacaaagcaaaaacataacaatctggtcctaactagcactatcaaagaggcataaaacataataacaataggagagaacgctataccaggaaacctataaattcctaccacagctgatgtagtcaagaaaataaacaagatcatgccaaggaaatgaatatggacaaaaacatgactattggccaccaataaggcacgcatcaacttcgatactgaaggttttacaactaacgagagaataaaacaggcataaggcaaattgctagcacagtcaaaatattttattcagaatacccataaacgcaaaggaaagaaacaatgaaggcacggcgcattggaaactcgaatttgcatcatccaatttgatgtcctgaaggggaatccgagtaagttcctcatttgctaaagcccctatcaaaacattaaataatgacggacaaggtaaatagtgatggcactaacatgcaaatctgcagatgcgtaacacagccagacaaagcaacacaagtgtacaaattaatagaagacattgaggccaccaaatgctccaaaagaaatccataaccatggtgaaggtgaacacttcaaaaccaatttcaaaaggatgggtacaaaaaatatgtcaaataaaagaagtggttcgatagaaagaatgaagtggttcgatagaaagaatgcagcttcctgtcacaatatactctattatactacagaagaatacgggattactactcaacatgtttgaatcacattgagatggaaattaaacacaaaatggaattcgaacagctaagagatatgaaaactgcaaatattgagatggaattataaagaaggttgcatgcagcaatgcatgctgacaacaaagatggttaaagaaagcagcacataaagaacaggtgataatgggcgttagcgcatcaggaactcgaatttgcatcatccaatttgatgtcctgaaggggaatccgagtaagctcatcatttgcagcccagaagaagccaaagaatgcaagtaatgcaaacggttaattaaatacaggtaatcatataataaatctggcaatctcatggtactgaaatcatagtgtgagaaaggtatacctgatctggctgggcaacatcagagaagataacatcaaccatgccaaccaacatccggtaccttgctgggtgcctagcatcctcaatgatggggatcacattagtcctctttttggccatgttaacaagatccctaccactcctgtgcgagaactcaacagcgtagaccaaaccagtctgcaaaatgacacaattagcaaaggcaaattgcatatgttgcctgaataagaaatgaggatagcaaatgacatctcaccggtccaacaatatcggacacatgagacactgttgttcctgaggcagcaccgagatataacacacgagtaccaggagcctaaatcatgaaacaacgattaacacgtgatgctcttctaaactaaagatctgacaaccatactgatgcattagcacttcggcctaagctactgcgcacagtgattcaacaacaaaaaaaaacttacaatccagatgttgtcgacaccaccaagcacagcagcagccagcttagaacggaaggggttccacaccctgtattcaaccttagttccatcctcattctgttcacgcagaaacatcagcaataagcataacttgcagggtacactacaatgcaacaaaacatacagacttctacagaacattatcttacagattcctacatatacaagatagcttatagtagctcagtagagaatggtgcacaaaagagaatttctacatgtaacactatagcttatatctcgaatgatgcacaaaagaggaacaaaaaaatgagaggaggagaaggtaacagcaatggacctggactgagatacgcttctctccgtagacggactcgccggggaccatgttcttggtgcagagcgcgtcctccttggccttggcgatgaagacgccgttgtgcttgtgcggcaccacgaccaccttgctcccgcccttcatgccacccctcccgccaccgcggccgccgccacggccccttggcgtcctgccacctcccctcccacggcctcctctccctccgctgtccccgcccctcccgaatcccctcccaccgccgccactgcggccgccgccatcgcctctccctcccctcccgaatcccctccctgaaaccaaagcatatatcacgtaagattcaaaacgagccgagagagcgcaagaccaacacggggagtaatcctagggtttcggatgcttacctcgcggtggcctcatggcgtcgactcgacgatgttgctctccgccgccgccgcagccgccgcaggtgagggggtgggtgtagggttttggagggggattagggtttggaagagggaacgaggaagggaatgatttgtagagggggaggctagggttgatgttcgatcatggccgttgatgcgagtgacgggtaatggacggtcagatcgtgaatactcccacattttaaatggattaataagctaaaaaagttagaacgacaggacggtcaggatggccgagtggtctaaggcgccagactcaagttctggtcctctaacgagggcgtgggttcaaatcccacttctgacattatattttttcttcatgtctgacattattaacaatttatttttcttttttttcttcatgtctgacattattaataaattatttttcttcattccattttattcaatttatttttcttttttttcttcatgtctgacattattaataaattatttttcttcattccattttattcattcttagggtgtgtttagttggggaaaaggaaatttttgggtgtcacatcaaacgtttgactggatgtcggaaggggtttttggacacaaatggaaggggtttcagacacaaatgaaaaaactaatttcagaactcgcctggaaactgcaagacgaatcttttgagactaattaagccatcattagcacatgtgggttactgtagcacttatggctaatcacggattaattaggcttaaaagatttgtctcacgatttcctctataactgtgcaattagtttttctttttatctatatttaatactttatgtatgtgtacaaagattcgatgtgatgttttggggaaaataatttggggaactaaacgggcccttattgtttcaacatttcagcttggttcatttatccatctccatttcatttgatttcgtggggaatccacggccgtgctgcatgagcgagcctggagtatgatgctagcaccgatggcatcaacgcccatggcatgcattcccagcaccgatggcgttcttattggtcagacgttagaaaatcaatctgcacatcatcgaactgctactttcaggtcgaaccgtccagtgcaaagaatgagcaatcggtacagaatttgtcacaagtgtatgactagtaacggactaattaacagtgtacaagaaaccatactgatcgagcctaatgattaattagttaaccatcttagttgcggcctatcactaatcctacacatatgcgcagtgtgactgcaagctagccgattcacaaaagcctaaaaaaaatctcactcctcaatccccttctcttccatggatactctcacctatgaactaacctcctagctaattaaacagcaacagcggtagcaaaaaaaaatgaaatgaaaaattggaggcatgtctatctagatgatcgtctcctccggctctgacgtcggaagcttctcgtgctccggctgccctccccataatctaaccctctccaacgcttgcactgactgcaggaagtaaaaccagcataaacatggcaattatgatgagtttattatctactacgagtaagaatataacgtgaataaaaatgctgctgtgattaacacctctgcttcccagtcagttttgcagaccatgtacatgaggatggccgtctgcattgccgtcccacacaacatgccagcccaaatgccctgcaagttccgtagaattttcgaaaacgaaaattaaatatatatgctcgactgcatgattcatttatgtagtagtagtgagacgattttgaactgaactgaattttaccttcacaccccatctgaagaggtagccaaatatgaagccgagagggaggccgaagccgtagtaacacgccagattaatgtacgccaccactccctgccatccgccgccgaccgccacacctaaaaagaagtagacaatgaattcttccaaggatcagttcatcggaatttagttagtcaattatatacttcctccgtttcaaaatgtttgacaccattgactttttagcacatgtttaatcgttcgtcttattaacaaattttaaatagttattaattcttttcctatcatttgattcattgttaaatatatttttatgtaggcatataattttacatatttaacaaaattttttgaataaaacaaacggtcaaacatgtacttaaaaagttaactgcgttaaacatttcgaaatggaggtagtatatgatgaagtgctgagatgtgaatggttgcctgagatgacgggctggatgctgttgagcaccatggtgacggcgagcatgtaggcgatgttggccaccgccttctgcaggtgcctgtctccggtgaagatgacggcgaagtggttgcgcgtggcgaggatgagcaccatcgccagcagcccgaacgccagcgactgcaccagcaccaccaccaccgcgtgcatcgtcgccctcggcctccccgacccgagctcgttcgacacccgcacgctgatcgccgcgttcagccctatgaacagcatcccctcccatccatttatattcatactgcatcaaacatatgtatatttatcattcatatcgatcgcaacataatcattgatggtagtgttttatactaccttcattccaaaatgtttgacgccgttgactttttttaaaatattgttcgtcttattcaaaaaatttaagtaattgttaattctttttctatcatttgatttattgttaaatatacttttatgtatacatattgttttacacatatcacaaaagtttttaaataaaacgaacggtcaaacattttttaaaaagttaacagtgttaaatatctagggaaggagggagtaccatatagatatggagtcgacggcgatctcggcgtcgtcgaggtgaccggtgaggacgacgagcaccatcatgtaccatatctcgaggcagagcatgacggcggaggcgagggagagcttgacgaaggcccagagctcgttgaacgccttgcgggacaggcccgtccagccgtcgcggcaccagccgacgacgtaggccacctgcgccagcgcggtgagccaggaggagacgtcgtacgcggcggcggcgccggcgatgccccagccgagcgcggagacgaagagggcgaggaggccgacgtgggcgaggagcgccgcgaagccgatccaggccagcaccgtcaccttgctctgcgcctggaggaacttctgcgtggggaagttgatggcgagcgcgaacatctgcgggatgatccgcaccgtgaactcccccgcggcggcggcgatgctctcctcctgccccagcagccgcaggatgggccccgcgaagacgtagagcggcgagagcagcgcggcggaggcggcgaggatgatccacgagcgctgcatgtagatgcccagcatggccacctgccccgccccgaacgcctgcccgcacagcgtctccagcgcgctccccatgccgagctgccattgccattgcccaaattacaatctctcaatcccatcgatggatgcgcatggaggatttggagggaggactcacgaggaagccgaaggagaagttggagacgacggagaggccgatggcaacggcggagagctcgcggttgccgatgtggccgacgaagatctgcgtggtggagttggtgccgtagaggcagatgacgttgaaggcgatgggcgcgccgatcgcccacagccgccgcgactccgccgcgaacacctcccacgccccgcgcgcggttcgaaccacgggcgcgtcgtcctcgtcctcgtcctcctccccggcgacagcgtcgtcgtcgtcgtcatcctcatcgcccttgccaacagcggcgacgagcgcgccggtctcgtcgtcctgcacggcgacaaccatacgaccgtcagcggcggcggcggcggcgtggcgggagcggaggaggtggtggcgcggggaggtttgggtggtgtggcgcgcggagaggaggaggggctcggtgtaggccatggcgatggaaggggtttggttgctggattgccgcacttcaatcccggcctcgatttgccgttcttggcgttgcctaccttgcctcccttaacaccccccccccccccccccctcttttagcgcggatggctctacttttccacgtccctctcactctcaactgatttatgtttgttactccatccgtatcagcttataaaacgttaaatttaaagtttaaagtttaactaagtttatagacaagtataataatatttatattattaaattagtttcatctaaccaataattaaatatattttcataataaatttatcttagattagagttgttattattttttctataaatttaatcaaatttaaagtagtagtcaaaatatcttataaactgaaaatggagggagtacttctcttagttttcttaggcaaaaaataaaaaaaaatggagatctttggcgagaagccgcagtggcagtgaggctgcagagccttcacaattccctatcgccggcgacgaccacggagaccgttgtggcccgtttactattcgtcgtcggttttgttgcgctaaacccgagggccgcaagggagtcgcggcccacgtgaggcccgtatgtttgggccggtttttcatgggccgttcgcactctttccacgccaccgtccctcccgccgacgctggcaatgcggttcgagcgttcgaccggcggtccgccgtgattctgaacgaaatggctacagatttttttttcgagagagaaaggtaggagtattatttatctgacgtgtacattcaattggatatatacagttatttaaattaaaacttagccttataaataacccaatctaaaattcgctcctactatgaaatgactactttttgcaccctgagaatgaacataggttcactgcgttcggagctagaaagctgaaattatagatatagtagtagatgttatatagtatgggatgtttattttattgtcaagattaaccctaccaaaattttgctgtatcaaaatggtagtaataacaatcaaaacattgctaaaaattacttgcactggtaatcctagaatttcacaaaaaaaaagaacgtggcaaaggtacggaacataacttatactacacgtttaccttcctaaatattgacagtatcaaattttggaaaggttttattgaaatttggcgctatgtgtgtgtttgttttgtccaattctggttcagcgtctgtcctgtctaaatcgccagcgagtcattcatcatcagacgtatacaaaaatgatttgcccggtctaagatgtctgaaccagtgtgttcaatcttgtccgggtcaattgtttccgccttcagaacatttctctgaactcgtcctctttctccccttttagtttcctccttaatctgcttctctttgaagtttgaatggtactccctccgtttcgttttatttgacaccgttgactt

SEQ ID NO: 9154 - DNA, 24172 bp, Oryza sativa
  unsure (1)..(24172): unsure at all n locations
acgtgtacatacgtccgatgatgtatagacattaattcgatcatattcgattcattataaatttaaattaataggggttgctcctgatgtatgtacatattgatcatatattgcgcatatgttctattgttcggtttaattagagctagctagctagtgccaagagagattaatcttaattagtttgtctctgttgactttgcatccgatgatgagcgacgtccacttgtacttgccttgttactcttaaattaactcattctctgaccgaagattgattgcgaaatgccgatgtgactgctgcaaattaaggggaatttaagttagtgaaatgtttaatcagaaattaatatacataactaataaattaagcacttatgtatcgatacaattgaccaatgcaatatatgcaaaaaagagcactactagctagtagctagagtactagactatactcctaataaacacaactgaatttatatatatatgtcatttagcaaaggagtatatatatatatatgtagttggtcggtatataaaattggtaggtgatgtctagctggtcctgctaattctggtcatcaggtagagatcaaaaattaactgatcatatatccatgtatatattggggtgcacatgcacgtacatgcatggaactgtacatctatatatgcatatgctagcttaatcaaggtgtgcttctatgtatatacacggtacttgaatgcaattaattagccccaaattaaactctcaataattagttggttcaattttcagctggccattatcttatctgatctgattaattagctgctagctacgggtgtaaagtttactacaaggttccatttctaggttagattaaatttccccaactaaagtgaacgcaaatttgcatcgtgtcttgaatgaaagggatcgaggcactgcagtgtacagaatatactatacagagatggaaccaacaaaaggtgacgcgattgaccaccatgacactacacaaactaaagcataaatatatgcccctaaatatatatatgcaacgacgtggctgtcttgtcttgattattagagctaatcttgtttgtatgtgctatgcatacggaagcatggtagtagctaaatgtcggagttaatttcatgacacgtcaaagctagagcttgacaaaagatgactatatgcatgcttatctcgttgatttcgctatagattgttacacgtcaatgcagcactgtgtgtcaatgatctagctagttcctggctattattatctacagtactatatatatgatctctgctcaagctgtatatatatatgtgcatgctttactaaaaaggaaaaaaaacatgcatgcatgtaaaaagaataatccatcattttgaataagtaagctagctagtactgtttttgttgaaatttatgtgttaactaattaactacaagttgcatccatatggggtgtagctagacataaacagattaaggaaaagtgcagaaatgtgtctagctagccttattaaactatctatgagaatttacaaggacattaaactatcaattgccaactcatatattattgaacaggtagatcgatcggtataaattaattaattgccgtagcccgtaggtcaaaatctctttttttttttacatgtacactgtctgtataagtcaaactgtagtatattaattgtatacggtctaatttgtctgctgctgcgtaatatgatccttgaaaccaacttatacaatctcgatctcgattctctcctagctagctgtgttgtgacacttgtgtgagaacaaattaagtccacgcatacatgcgtaggaggaaattgctttctttaaaaagatatacacacatattgaaatattcagaatgtttagcttaactaatatatgaccaaaatattttcagtttatacgtacaaataggcttcaatatattcattcatgtttttaagtgctttagcgtagttgaaaattaatgcgaacgggggagagagggagataatgtagcccaaatcaacaaggtttattgggccaacaatagtgcgggattcggcccaattgagtacagttcgtcagttgcgttgcccatggaccagttgggggtggtaatcttaattctttccaggccaagcccgtggaccatctcatttcggtcatcagtacttcactagtagccttcacctacctgatgatgtcgtcatctccatccgcagtgacgtgattctttattcctcacaatttacgtttccattagcatgctttttaaagtactgaacgttagtaaacgatgtgtttcgtgcgaatactttatatatagaagttgctttaaaataataaatatattcatctatcaagtttataataactaaaacttaattaattactatgtgctaatgattttctcgttttacgtacgtcaactttatcttgatctttatcagtttcaaacaccaccataaatctagtgaaagttttatcaaattcattattctaatttatgtttaaacctatttaagttcttatatttttttaaaaaaatacgtagtgattaggggtatatagttgcaaccgaaaaggcaaaaaggcattaagaaaaacgtgaacagtagtagtggtagtagttttcaacatttaattcgccattaggatagtaggagcggtagcattcaatttattaatgggggatttgcttgtcctttctcctttttggcgtttataaaagtataaaatccatcgcccaggtgctcctcacctggtcatcctctcatattgatgaaaagtctcctctgctggtcacacgtccgccttgtctgctagtgcccgcccagatgtcagatgccaccacatattactggtactacttcattattattattttcattttcttctgcggcaaacgtttttgctaacaacgcaaaacacttttcctctttgttttttctttcatacgtttactgagacactacggttagtaatcactccctgctaatctagtacgggatgcaacgaatcctaatccctccgttttatttcaagtgcagttataattttctgtgcctaactttaattgtccgtcttatttaaaaattttttaaaaaaattaaaaacataagtcatgcataaaccttcttatttgctacatagagctactgtacccgcctattggcaccaaccagctactgtccttaagtccttgccctcagccacatgcgtgcgttttacactttccgacataagaaagttactagtgcacgattaattaagttttaattattttaaacttaaaaataaatttgttgatatttaaaataaattttatataaaaagttttcatacgaaacgtatcgtttagccgtttgataagcatgctaataaacgagatagaatctagtagtaatatcttaatcacaaacacatgtagtgctcctctccctagaataatgggaaacaatatgctacaagttaataagattcagagcaattcatttttatacaaaatagcagaacatgttgcgcagagaaataatggaaaagtttctctaatctaggatattaaggccagttttaacgtgcagttcggtgaagctgttcgcggttcggaaaatgagaagtgtcattagtgcgtaattaattatatattaactattataagtttgaaaatatatatttatttgatttaaaaaaaacttgtataaatattttctttttcacaaaacacacatgttcgagaagcgctaacggaaaatcaagaagttgtcatctttagagctgaaaagaacaacaaacgattgagtcatccaatgacactcaacccacaaccaacaaaagtatggtcactattataatgggaagggatcacccacatataagtggcttaactacacatacagttaagttaagtcagaaaatattcttccgttacaataatatcttgcttcccaccggtaatatataggcattgttatttgacgttttattattttttcccacaactagaatatcacaataatatgtagtaaaattataatattgttaaagtactcataaagaaaaaaaaccacctttcaatctaaatagggagagttaagtttcaaaatgatggcataaagttaacggtgcattgtctaaatatagagagtgagggagtacctggataagaggatagatcatgaatcttgtatcctgcgaagcactcaatgtggcatgtactatgattgagagagatatttattggtaccaatataatactgtagagaccgcttcaaagtttcacaagttggacttggactgcttcttcagtcggttgggcgcctggctgccaagctacctctgctgtctgcaacggcgtcaccacaaatatccatccatgctcgtcatcagcagagggacatttctcgactcaatcggtgagacacggttacatttcgttatggatctccgtatctttctttccctcgatactgctacctaccatctcctcctcctcctctatagtattgtggtggtgtttggttggagggactaaagtggagctaaactttagtccctctcacaaaaatataagtctctactatagggacttataattttgtaagagggactaaatttagtccctagttcccaaacaccccctgtgttcggccaaactaaatttgggttacctcgtaaaacggttatcatagtaaccatatagttaccatgaggattactatgattttaaaaattaaaaaagattatcatgcgtgataatcgtgcggtttcttaaacctgttgttcggtagcagactgccagttgcagcgatttggagcgtctgattggccaaagcattgttcatcagttatgttaatcggtactagtaaatcaggggaagatcccccatctgatcatctgatgctccgtgatcactgctgtctcccccacttgctctcactaccgaccactgctgatgctcctcttcttgctcggtttctttctcccgcggacactgaaacccaacaacagccaatgcctatcaacaccctaaccacttgctgcctcccatggcgtaagccctcctgcatagctggcgtctttaccttcctcttcctcttcttggtgcctctctcggtctctcatctcctctcctctcctctccaggtgacaaattctcccatccatccatcgattgctatcttctcttccgtatttctttgttcattggtctcttttgcagatcaattggatggcatctttccctggaacccaatatcgatagcttcactgttgcagacaacaaactggttctgctcaactttgaggtagtaccacaaagcttcagaatttgttggatttgctccacctctgtcctgttttgggatccaaagtgctacagggattcactaattcgtcctgtattcactttgtgttgattgattgattgattcaggacggccgcccagttcgatgaatcgatccgtggatccaattctgctctgctgaagctttgatctttctggtaattcacgaaggcaaaggagaaaaaaagatgaagctgatgctggttttcttgtcctaattcctttgcctgctttgcttgcacatacagattacagatgatgccattccgggatgttgctctccacttggacgccaggatgcttccagggcaataaaatcttgttaagatctctaatcacatggtattatctcgaatttatgccaaagctgcggcctttttattttcttttttacttaaccttgccaagttgcgctacggattcgccgcctatttctgacaaaagctcctccattttcctcccattggcgcagcagcagcagctagtccactggatgatgcctccaagattcagatgccaagattacctcctgccgctgctgctcgccctttcgccggccgccgccgccgcccgcgaggtggagtaccaccattgccactgcgacggcggcggcggcggcggcggcggggggttgtggagcatggacagcatcttcaggtggcagaaggtgagcgacctgctgatcgcggcggcctacttctccatcccgctggagatcctctacttcgtcgccgggctccggcatctcctcccgttccggtgggtgctcgtccagttcggcgccttcatcgtgctgtgcggcctcacccacctcctcaccgccttcacctacgagccgcacccgttcatggtggtgctcctcctcaccacggccaagttcttgacggcgctcgtctccttcctcaccgccatcacgctgctcaccctcatcccgcagctgctccgggtcaaggtgagggagagcttgctgtggctcaaggccagggagctcgaccgcgaggtcgtcctcatgaagcggcaggaggaggcgagctggcatgtccggatgctcacccacgagatccgcaagtcgctcgaccgccacaccgtgctctacaccaccctcatcgagctctccagggtgctcggcctcaccaactgcgccgtctggatgcccgccgccggcgagatgtgcttgacgcacgagctccggcgagacggcggcggcgaggatggcgtcgtcggcgtcgacgacgcggacgtcgtcgaggtgcgggggagcgacggcgtcaagctgctcgggccggactcggtgctcgccgcggcgagcggcggcaaggaggagggcaccggcgcggtggcggcgatccggatgccgatgctgaaggtgtccgacttcaagggcggcacgccggaggtgatccagacgagctacgccgtgctggtgctggtgccccccgccggcaagagctgggggcggcacgagatggagatcgtcgaggtggtcgccggccaggtcgccgtcgcgctgtcgcacgcgacgctgctggaggagtccgggcgatgcgggaccggctggcggagcagaaccgcgagctgctgcaggcgcggcgcgacgcgctcatggcgaacgaggcgaggcaggcgttccagggcgtgatgagccaggggatgcgccgcccgatccactccatcctcggcctcgtgtccatggtgcaggaggaggccctggcgccggagcagaggctcgtcgtcgacaccatggcgcgcaccgccaccgtcgtctccacgctcgtcaacgacgtcatggagatgtcggccgacagccgcgagcgcttcccgctcgagacgcggccgttccacctgcacgccatgatcagggacgccgcctgcgtcgcccggtgcctctgcgacttcagggggttcggcttcgccgtgcacgtcgagaacgcgctgccggacctcgtcgtcggcgacgagcggaggattttccatgtcctgctccacatggtcggcaacctgattggccgcaccgagcccgggcatgtcacgctccgggtgcgcgccgccgacgacgacgtgctggacgacaggctcggccagaggtgggatccatggtggccgtcctactccactggctactcctcggtgaagtttgtcattggtgtcaagcggcagcagaacggcgatgccggctcgccgctgtcgcggaggccgagtgggaagggcattgatctcagacttagcttcagcatgtgcagaaagcttgtgcaggtagtgttattgcctggatcactgcattgcatctgaatcatctgaacatgaaattagcagtccaatctcaagagagcatattaccactgatgctgatgtcctgttgatcctactgacagatgatgcaagggaacatctgggcgattcttgatccccaagggctaccggagagcatgactctggtgctcaggtttcagctgcaatcgccactgacatcatcaagccttggaggatcattcgagcagaagcactcgtcgccgtcgtgccagattgcaggcctgaaggttctgcttatcgacgacgatgacgacatcaaccttgtggttgctcggaagctattggagaagctcggctgcgtggtctcctcgccgccttcaggatcaggatttctcagctctgttggctcctcagcagcagccttccagcttgtcatggtgaacctcgaaatgaagagagtaaaagcccttgatgtcgcgacgaggatcagccagtacaggagcggccgatggccaatcgtcatggccatggcttccgaccagaaggcctgggagaagtgcgctcaatccgggatcaatggcatcctcaagaagccggtgattctgcaggagttgaaagacgagctggcgcgaattcttcagagcacatgatgctgatgtttgctggaggtctgtttgtctaagagctctgaagtctgaatcggtaaaagctgtgaatcctgtgatcagtgtacaacctcgtcatccagcattgaagaatgaagaactcagaagaattctgtgatcagtgtacaatctcgtcatccagcattgcagaatgaagaactcaaaagatcttcgcggcgaaaacggggaacatctctaacgaaagaaagggtgccctgatggatggcaagaacacatggaatcttggcagcaatggcgtccccgagaaatcttcttcgcacaaattttgtaatatgagtttgagtgggaatacaagtcgtgtaattttctaatgatcgagatgtacactcgggtgaagtcaagggaattcgtacttgactctctctgtcaaagcaaatcatgagattggaatcaatgagatgatatctcaaaacactttcagttgcactgcagcttgcacgtgacgccgcgtacggggaggaattgatgaaattgagaatcgaaatgggtttgacttgctaaaatcgagtagagagagatgggacattgatcttgaggcgaggagaggtagaacgtgggattccattatcttaaaaaaaaaaagtagaacgtgggatgtgtgggaggtgtatcacggggaggaggatcggattgagatttgcagggaaggatcagtccgtaccggatcggcagcagatcgcgcattcgcaggagcaggcgccacgtcgtaggagggctgatcccttcccggcgagcaactccatgagcgccgcctccgcctccgccgccgccgctgccccctatagatccggttggttcgcctgaaaccgcagccatgagctcgacgagcaaagtacggatagcgtccaggaggagtagagggagggcggtttgccgaagcggtcggggtaggagacgccgaactcgagggcgagcgcggaccgccgcggcagaaggggcggcgctgcacgccggcgacggcgagcgccgaccgccacaggagcgggtggcgatctcgtgaggcccaagaacagaattggatattacgtgtacgtgcggcccaattttgttgggccgggacgaaattacgtgcttccatgctagttgggccgtcagccgagacctttcttgtggcccaataacggaattgtgagttacatgcagccgattttacctaccgactggaaatttcgacatgcgtcaggccgatttatgttgatggaaattacgacatactcctacaccgttgactttttagcatatatttgactgttcgtcttattcaaaaacttctgtgaaacatgtaaaattatatgcctacataaaaatatatttaacaatgaattaataattacttaaattttttgaataaaacgaatggtcaacaaacatttcaaaaaaatttaaataagacgaatgatcaacaaacatttcaaaacaaacatttcaaaacggagggagtgcttacgttcataggctttctatcaacttgtccaggagatcaaggagatagctagatttgctactactaacgtgcagattgtaaatccacatagtagcaacaggggcccacaatttgatgacattagctactataataagtgcaaagcaaacaatttgtaaggacaccgagcagataaactgtctagaatacaaactacacggcagatctgtgacaaggttgatccaattctaacagagatccctcatttcaagtctggacacttttagaacagaggtagctggaaacatgagcatcaagaggtgccatgacaaaaacgcgcagcttcaagcgatttacagcttggctggctgcctgttcttcttcttcacaccagacttggcaacctggaggctgcggtacactgagctaagccttgcaagagccggtttggtcagatctggcctgtagtagttgtcactaacctgcgcagaaaagaaacagctgttaagagcacaagctatcaaagatttcttcaggaaggtacatacaggaaagctgctgtagagagaacagtagcagcttgattctgctcagaagccaagcgtaacaagtatttgtcatcgaagaaccaattgataggttggccttcttatgtgttacggctcatcacagcagcatcacacattgtaacctcaaacatgggaaaaaaatttgattcgagtattgataaaaacaaaacattccttacagactagcttgtgattaattggcaatttactaattttcagatcaagttataccaattgctgtaacaggagtatttcacagaaaaacaggagcaatctctgagccttcttccatgttggggcttatcacagcagtgaatagaaaagaataatgaagccaatacgagatattaaggctcatcacaacagtgcatctaaagcatagagcatcacaaggcaaaataatgacatgaaactaagcatttatcttccaaatacctggttcttgacagccttagccatcttgcggaactccttgcgcatcacagacttgtggtagagcttagctggggcattctgcttcttggtcttggtcgtggagaggaccacagccgcgtcctttccacctgatggctggatcgtcacggtcttcttgttcgccaagccttacagaacacaacaacactatgtcaggacattgcaaaggctgaatcaaaggcataatttgcatctaaagcctgtgacgttgcgagaagcaactactgaccagagtgcttgtaggagtgaacattgtacaggttgttgggctccttggtgaactgcaccttggcattgctgtttccaaactgcttcacgaggaagcagttgttcttcttcacaatctcccagaacaaaggctccggaaccgtcgccatttcgctgtagctacatcaccaaacagatcgaccattacaccatagcaaatgaccatcagaccactaagtgaccattaacacgcaaaaacattacacaacgctggcagcaatggtgtcgatcacaaatggcatctgccctaaaatctctcatccaacatcatattgatcgaaatggctagccctatcagctatcagatctagagaacacggatgatgcgcagattggagcatagcgaggcgatctaacaagctaaacaacccgcgtgcaccgaattactcaaactaaaactaagtttacagttattgcagccaaacaactgaccgaaaagcataatagtatcactgagaatttcacgacaaaatcgaccggtcaccgagaatttaaccgcaagaggcagcgatcaaatctaccaagcaataggtcttacagtggaaacagcagattttaagatttcggcagagaatacaagcgcgaggggtgtcgaactcaccggagacgatgaagccgcggcggcgcgtcgctgtgctccggtggcgtggtggtggctgcggcctgcggaacggtgcgacggcggcgcggaggctcgcttttatacctgttcgtccttgctcacaaaccctaggttagctccgcttttaatgggctttattgggccgagcaaataatccgccatagcccatgggctactagacgggccgaaaaagcccaaaacacaagaccaactgaccagccgcctcatcaccgaattaaattcgaaaatatactgttccattcattttatttttagaaatattcaggattcaaagctttttgcaaaaatataccgttgatctcgcacaaccattacgcgaaagtgaagtggcgtgacgtcgcgggcggtatcgcgcgggggaagcgtgagaccgtgcggtcgcgcgaaatgaaagagcgagaccgtgcaatctcgctgaaccaatcagcgataccgtatttcaaaatggtgaattagtgattaattattatgattaatgactaattattattagttaaatagataattacgtcattagtcactaagcaaatggagtttgctcgtccttcccgcgacagcgcgcggtcggtgcgagagaccacacggcacacggtctcgtgcattcgctgtgcgataccatcctcgacgttacctttacgtcattttcgctcatcggttgtacgagatcgacggtatatttctataaaaaaattacatcctgaatattctttaaaaaaattaaatgaacaatatattttcaaatttaattccctcgatcgtctcctccaactccggcgccgcctcaacaagacgaagcgttccgtctgaatctgattgccgccggcgacgaacgctccgtcaaattccatagataaaaagctctttcttccactagatatattatcaaacagggacgacgctagagtcacttatcagggtcagtagaccccgacgatttttttgcaaacatcttgtaccagcactaatttatcagctacgaccccagtcaaaccccggtggtccggtgatattgttctgttcaagctcaattagcaactaaacaatactaacaagtagtaaatagaaaattagcaagcacttattatacgacagcccgatatacgtatgagatttgagcccagaaggctttgtattcctgctaaacaagtccacaaattgccttgttgtgctgctctgtattcctgctgcagtgcagtctggctcgaagcgcttcgcccaatcgtcgccgattggcaagggtaacccactaaccccatcacaatttcttaattattatcatcacaaattggttgtaggctggtttctcaagtccaaaattttaggaagttagggttctgaaatatgaagtttctcccaatttctgttacataaacataaatttattctttctagaaaagtggaaggtaagaaattagtgattttgatcatctacagcagcgtgggtattttgttttacataataatcattctattttttaataaattaataggcaagcaaagtataatggagtgtgattcttgagaagaaaaatacccacttactagttcatgtggtactaattctcctttatcagtggagataaccttctcggtaataaaagttgtgtagacaatactgcacgcaatcgtatcggtaataaatatatggattactccttgcgttttaaaatatagctacagttccaaatgatgatgacgtggttgttcgttttcacaagatgaaggatcgtaattgtacacatgagaagtttgtaacatgtaaaacataaccactttacttaaaaaaaactttattttatcatattatatggtcgatagttttattctaggattatcttaagattattataagctatagtcagttagtggtgaccccggtgactatttttcctggcttcgtccctattatcaaatgaagtaggtacaacaacttctccaaaacaattaggatggcatcacgattctcgagtaccagaacaaaattcagtacaactatctttttcatccacacaacatatggcgagaatatgttcccaaatacttgtgattttagctactaaaatcacacacttgtcagcatatacatatcagggatagtatgttctgttgaactaactagtcgtgtcaaggtctatgtatactaccacttgttgatgagctgatccatgtctgaattggttccagagactggtatattctgaaaccaactttctgtaccttaatgtattcagggaaaaacaaaagtgaagtagtagctggacatgattatttcttcgtaacaacaagtgaacaaacaggggatcaaattcagtgtgctcaaaacatctgctgctataaccgatagttgtatgcctttggatttcgtacttacctgagaaccagagtacaaattccttctagatcttatttggtgccaatgtacaatgggaacgtattactagtgtctgtctccgtagctaattaaccaatcatcagtgcatatagattgttgtcacatatatatgtcttcactgtaaaatatactccctccgtttcgaaatgtttgacgtcgttgactttttaactttttagcacatatttgaccgttcgtcttattcaaaaaatataagtaattattaatttttttctatcatttgattcattgttaaatatatttttatgtagacatataattttacatatttcacaaaaaaaaattgaataagacgaacggtcaaacatgtgataaaaagtcaatgatgtcaaacatttcaaaacggagggagtatattttatctcttacaaagtgtaaatttaaactaaatgaaaagcaaatagtacatacattttgttattggatgactgcaacatagaaaaaaatccatggcaatatatgttcaatgacagctctgaggaaatttgcattcttcaccattgaaattttaccataataaaagcaacaagaagtatattgtttcagatatattctgtgggggtaaaatgtgaagtacatagaaagctacctaagctagagatctaaattgaaccaaatactccttcaaatcaactcaattatgatgaaaaagaatacgtaattgacacacatttaagtattgattcgatcatgagcctgcagagcctgaaccaccaagtctcagctccaaatccaattcctcctcctccccatgatcatggccaccattgccatccccatccttggagcagcagccgtagcgatctcgtcgatctctaccaccaccttcttcccgacggccggcgccgcgcccaaacagccttagctcttgcggcgccggctcggcggtacgggacctcaggctcgcgccgccgccggccgccgtggacgccgccgcatcctcgcttcctccgctcgccggcggacgaaacaacctcacgagcgtatcgtagctgacgcttcgccttgccgccgccgccgtcgtcgacgacgaggaggacggcgtcgctcttccaaccctgtccttccggtggacgttcatgtgcccgccgagcgcctgcgccgtcgggaagcccctcctgcagaaggtgcagttgtacggctgcctcgtgccggcctcgtcgtcgtcgtcgtcgtcgccgctgcgggcctcgcggagctcctcctccgccttgtctccgtcgccgctcggcgaccttccaccgatcacctcgtccttgctggttttttgactcatctgcttctgctaagctaggtagagagagagagagagagagagagagagagagctagggtttactggtttactggtttgttgatgagattcagtgagcttagctgcttattgggatcgaatctaagctagccgattgtgaaaatgaaatgtacagtcaagcgagatagagaaatgcaagtgcacaataatcaatgaagtttttatgcagctcccatgaccattgtgttagagattacctctcgctgatttggatgttagccttgttttatgtttcttttttgctcattctgccggccgcaacagttgtttttgtctccgtgttatttgattttgatttgatttgattaattagctgattgattaattaactaattaatctgagttgttcagctatggccggccttcatttgcaacgacctgactggttcttggcctctagtttatcgagggtggtggcttagctacctgcagtgtgcttttgtaagcttgtgcttggaagcgtttgttgttgagtctttataggagtaatatattgtgttacgctatatgacatgttcaaccttttcttatacatagtactatcctatattattgactatatatatcattattccacatcatcattttcttttttattgataacaagtcatgtcatcatgtagtttacccaaaaagaaaaaaagcagaagaagagaagatagattcagtttttaaccactagtgttgcatgaagcggtatgaggccatgaattctcacttccttgcgtgccgctacggcccatcaaggcctatcccagaagctcgtggcacgcgaatagactggcccatacatgtggtttttggcccatccaaaataatgacaagagtaagggcatgttcactttgataccattttcaaccataccattttctagtaaagttgctaaaaaatgactacgtttaatttattgccaaatttgctaaatacaaaagaaatcctgccaaatttttggcaatgccaaaatttggtaaggtttattttggctacaatctaaacatgccttaaattttactttaagacaccttttattactgatgtttcgttttgaatcaccctttaaccaatgctttcactttagaccaggtaattttacctctgtgacactttgggccacccctcaaatcttttatcgttctacattcagtttgtcatatgtcaaagaagcaatctaatggttgatggagtttattgacaagtatgagccgccatacacttgtacttaaggtcattctatgcatgagaagagagttgaggtggttcaaagtgcaacaaatgtaagatttacccgattaaaagtgaaaacattggttaaaaggtggttcaaaacaaaacatcggtaataacaaatggcccccaaaatttttttaatctaatagtaaatccagaacgtgatgaacaaaaccagatggacaagtaacgaaggcaaaatcacattccaaccgtatcgtgtcagcgattagctcgatcacaattcacaaacaacatcaacacatgagcagaattttaacgaatactttcgcttttgcatatttacagcaaaacgttgattaattcctccagagctcgccgctccggtcgccgccggtgccggcggacgacgagctggcccggtcggagatggacgagagcggcgtctcgtcgccggcggcggccaccaccatgtccctgtacgtcttcctgaccgcccacagcgccctgcagcactcgcccatgctcggcctctcctgcctcacgggggcgaggcaccggaacgccagctccatcaccatctccgcggcgcgcgccgtcgccggcgtccgcggcaggtgcgggtccagcacgtccgccgccgcgccctcggcgagcttgcgcatcgcccaccgcgccgtcagccgctcccgcatctcccgcctcgcctcgatgggtcgccgcccggaggcgatctccagcagcagcacgccgaaggagtagacgtcgctccggtcggtgagctggcacgtcttgaggtactccgggtcgaggtaccccgccgtgcccttcacctgcgtcgtcacgtgcgtcacgccgtcggcggcgccggcctcgccgacgcccagccgcgcgaacccgaagtcgcccaccttggcgcgcagcgacggggtgagcagcacgttcgacgacttgatgtcgcggtggatgatggggtgatcggcgtacatgtgcaggtacgtcaccgcgtgcgcgacgtcgatggcgatctccagccgcgcgcccatgtccaagaacctcccgttgcaccctgcgcccaagaacctccattagtaaccaatccgatcgagctcgagctcgagctgcaatggcggatcacacgcactgtcgaggtgctcgcggagcgtgccgttggggacgaactcgacgacgatgaccctctcctggccgcactcgaggtagccgtagaagcggacgaggctctggtgctcgatgcgcgccatggccttcacctcgctccggaactccacgtccacgtgcgggttctggtcccggagcttggcgcgcttgacggcgacgagcgtgccgtcggggaggacgcccctgtagacggcgccgaagccgccctggccgaccttgagcgccggcgagaagttgttggtggcgcgcaggatctcctccatggagaacaccgagctctggaactgcgtcgcgatgcctcttcccctgctgctgttgtacagcccgcgcatcgacgccttcccctgatcactgccaggccccggcactggaatcatcaaacagattcatctatcaagaattaattcccaactgcttaattgctgctctgaattttgaaaaaaatgtttgaagtcttctgtgattcagattttataaatatgattctgtaagctttgcactagcaattctgctccagaaagtaaagaattcagagtagttgcggcaattggactgtgataattgactgtttccaattcagagtagttgcagccggcaactggactgtgataattgactgatttcttgaacagttcaggaacagttgcatcaattgggcaaataattcggattatatcctgtttgcttgagcaattcaaatcgaggtaattaaggacaaggatgaaatagatggagaagaaatgatcgagagaaacaatttacatggcggcttcttgatcaagtcattgggctctcttctgctcctcctcttagcgttgctgccggaggcggaggtggccgccgccgacgacgaggaggaggaggaggtggagagcgagctgaaccacaacccgatcgtcctgaagagcgacttgagcgacgccgccctactgccgccgcccccgacggagagcggccgcgaccacgtgggggcggggctccacggcgcccatcgctccctctccagctccggcgtgcgcctcccggacgacgaggacgacatgctgcggcggcgctcgcgtccctccatggccgcgcagccgcccgcctccgctcagagctcccaacgcgccggccaccagggggcgcgtacgcgcggcgtggacatatagctaagctcggccaagtcaaggggcgcgaccatgtccaacgccggcgagcgcgagccggtgggacccgaccagttaaacatcagtgtcactgtctgtggggccggtgatgtcctggggcccacttgccagtgagacgcggcgtttgaggtggacctggcaagcgatgactagttcttcttcttcagacttggcttgttgctgcagacaagagtgtgatagcaaatgttaaggtactgatcttgatcggccaactacactaattgaatcattaacatctccctcttcagcgtatataagctttagtcgcgtcatcacgtatgttcgcagcaactttcaaatcgcattttttttttataatccataacctatgttcaaagttcaaatccatgggcacacacgcacgcaacaagtccgtaaagtttttatagcccttttgcagctaatttagtcacgcgtatcctgagagctcactctatttgtcaacgaaagcaacatgcgtcacagcgtcagctaaaccatgtctccagctggcacttaagcatgcagcaggtaactgtgtcaccggcttcaacaactagattattactccctccgtttcgttttatttgacgccgttgactttttatcacatgtttgaccgttcgtcttattcaaaaatttttgtgaaatatgtaaaactatacgtatgcataaaagtatatttaacaacgaatcaaatgataggaaaagaattaataattatttaatttttttgaataagacgagcggtcaaacatgtgctaaaaagtcaacggtgtcaaataaaacgaaacggagggagtaccattcaaacttcaaagagaagcagattaaggaggaaactaaaaggggagaaagaggacgagttcagagaaatgttctgaaggcggaaacaattgacccggacaagattgaacacactggttcagacatcttagaccgggcaaatcatttttgtatacgtctgatgatgaatgactcgctggcgatttagacaggacagacgctgaaccagaattggacaaaacaaacacacacatagcgccaaatttcaataaaacctttccaaaatttgatactgtcaatatttaggaaggtaaacgtgtagtataagttatgttccgtacctttgccacgttctttttttttgtgaaattctaggattaccagtgcaagtaatttttagcaatgttttgattgttattactaccattttgatacagcaaaattttggtagggttaatcttgacaataaaataaacatcccatactatataacatctactactatatctataatttcagctttctagctccgaacgcagtgaacctatgttcattctcagggtgcaaaaagtagtcatttcatagtaggagcgaattttagattgggttatttataaggctaagttttaatttaaataactgtatatatccaattgaatgtacacgtcagataaataatactcctacctttctctctcgaaaaaaaaatctgtagccatttcgttcagaatcacggcggaccgccggtcgaacgctcgaaccgcattgccagcgtcggcgggagggacggtggcgtggaaagagtgcgaacggcccatgaaaaaccggcccaaacatacgggcctcacgtgggccgcgactcccttgcggccctcgggtttagcgcaacaaaaccgacgacgaatagtaaacgggccacaacggtctccgtggtcgtcgccggcgatagggaattgtgaaggctctgcagcctcactgccactgcggcttctcgccaaagatctccatttttttttattttttgcctaagaaaactaagagaagtactccctccattttcagtttataagatattttgactactactttaaatttgattaaatttatagaaaaaataataacaactctaatctaagataaatttattatgaaaatatatttaattattggttagatgaaactaatttaataatataaatattattatacttgtctataaacttagttaaactttaaactttaaatttaacgttttataagctgatacggatggagtaacaaacataaatcagttgagagtgagagggacgtggaaaagtagagccatccgcgctaaaagagggggggggggggggggtttantctcatcattagttttaagggagaaattcccatcttcctcagtcgactcatctgcagtatctgtgactgcagccatttcagcgaaagcgccactggcaggcatgttctcaattgcatcatcctcctcttcccaatcttcctccaagtatggcgcaccgtactgtgcaccattttgtggcccagatccatttttctggaagattctacacaccacatgcagatcctgcgcactcaacaggaaactaacatcagctatcagaaaaggatgctacatcaatattctatacaggttaaaaaccattggtcctccgcaattcagactcctcaattcagagtgaggataagatttccaatgcttaaatagcccagttaaaagcccccttgcttcatacatttccagacgtgctctatcacttctaccagtgcatctcgcacttttttcttcttttattgacaaaagataagctcatgctcatattggtttttctcaaagcaagtcattgatgttgtaaggaaaggtttttacctaccatatataggtatcaagtgaacaaacatgagaatgttgtaaccattctaggcccgggacagggtcgcactagataacatatctaagcagcagcaagtaacgagtgttgaaagtagaataggaccagttcccacctaccgctcacacaagcctagcaggagacaagctaaaagaacagaatttttttggtgctaccgctaatctcgtgatctcgtggtacggtagatcctgcgaaatttgagatggatcaaatgatttcacaggtacctgggtgccgtcggcgtcgaggaggcggtactcgtgcatgacccagttggtcctctggcccttgggcgccctaccggagtggaagacgagcgtcttcttcatcccgacgagcttgccgcggtggtggacatcgcggtccttcccggtggtcttccagtagccgcgcggcgtggcgcggttggtcctgttcccggggccgccgcggccgccggccccggcgccggtgaccttgcggtcgaggcgggcgaagaagtaccactgcgcgtcgcggctccggatgcgggagagggaggggaggtcccacggctcgaggcggtagaggtcgacctcggcgatggcgtcgatccggaggcggcggccgaggatgcggcggcggaggtagtaggagacgagctcctcgtcggtggggtggaagcgaaaccccggcgccaggggcaccgccgccgcggaggaggagtccggcggcgattggctcatcggcggcgaggggaatttcaatttctggatggatatgatattggagatcccgtgggaggggatcaatcccgcataattctaattctgcacggaggattgggaattttgcagggagaattgagaattgagaatcgagagagagggtagattggatcgagcggtggatggaattagggttttgaggaggaagtcgacacgagatggcgaacgccgagttagttggggaggagaggataaaagtcgcgatacggacgcagccgcgtgatgagaaagaaaataataatagaggaaatatcatactcctcggtagccgtcttgtagaagactcctgccctctcgtctgtccgaaaactttttacgaatatacctttttatttaataatttacgtttatatatggaaggatatactactacggataaattttattcagagatttttgagatgtactccctccgtttcaaaatgtttggcaccgttgatttttttagtacgtatttgaccatttgtcttattaaaaaatttaagtgattatttattcttttcatatcatttgattcattattaaatatacttttatgtacacatatagttttacatatttcataattttttttaataagacaaacgattaaacatgtgtttaaaaaatcaacggtgtcaaacattttgaaacggagggagtattatgcaatttctaagatttgattctactccgtaaattctccaaacgtagtgagctgaagatagacaatacagtggatgccacagaatgtatttatgttgtatactagtcaaacttttgagggaaaacgtcgtttggtaaaacagatttaatcctccatgatactccagtattattatttcattcacgacatatatcttgagaaaatttcgactttttttctgctcgtactagtttgctcgcccaccaaatttgaaagaatttcaaatgctttcaaataggatatattcataggaattccaaatgggagctaaaactcgctgtaacatttaaaaagaaaaagaaaagcccagcctttgcttttttttacttggcattggttgcatccacgcaggcaaaggtagatgcttgtgactttccacgccccacaagagtaggcagcctcgcttttttttcctggctttggacttgcaagattttggaggcaacatcatggaaatgcaacaaattggacagaagatgcagcctctcactaggaagcaactttgtctttcagcaaaacgagtcatttcgacttttgaggagacaaacaaacaggcaaagacaaggggtcaagggtaacctaaggatcacaattatcaaaactagggtagcacaccagcgttgttgagttatgacaacagccaaacatgttgtgaaatataatcctattcccaacaaaaataagaaataaatagaacagctgattgactgactactccagttactaacacaatcagactcaataaggaacaatagattatcttaaattttctctcaagctttttttgcggatagtgctaaaactagaaaagacaatctccaacccctcctcctaacttggcatcaggcttcttttccatcagatgatgcccctcgtcttcatgagattttatcacctctcggaactggctgtcaccctctgcattatcatagactctgctgcctgaatagcttctgatgttccagttatcgtcactttcctgcaccagtcagtaaaatttggggattcaggcctgctgtacaagcatatcatatgaaggtcggtggtgctcaatatgctttaagagcttgttctgatggtgaaaagtaa

SEQ ID NO: 9155 - DNA, 8277 bp, Oryza sativa
ggacggagggagtagtgcccattttcttttgtattttccaagatgttagttattaaaaactgaaattgtactgtcaatactcaacacctataatgaaaactagaggatgccaggaatccatggaattacctttaactgaaaacattctatgtgactatatcaatgaatacaggataatgatagctgaaacaactaagtagactatgcatttgccatcatggttgaagagttcttttctttaattaaggttttgcatgtttctattccctgttactgttctgacaaaattttaaaatagaataattcttgctggattttatctcttcatatttttttcctcgataatatatttattgctcctcctatcaagtgctctgtgatgtgtaacacaccttcatgtacttcaattaccactacagacccaagaataccagccagagataactcctgtgaaagctcaaggttcaaatgaggagaccaatggcggtggttacagttgtgatgttttttctctggatgagattttgcaggaacctgaaaatgtctgcaaaaatgaagagcagaatgccattgatgacaagttcactatcgcagagttatctggatacccaaggcaagatgatggctatgtaggcgagaatggtcctgtgaattggattgacccttcaaatggtgataatacaaactggcctttgagagcatatagtactcagaaccatgtcaatggaacacttagcgctgatggtttctttgacacggtgaatggtaccaactcatattcaggtccttcagataaccagaacctgtatttgcaagatgatggcttgacttcttctcatcaagtgggcgataacatgccattttatgacgcatcatctaatcacaaatgggtagatggaaaggatgattatttgaatttgaatgacctcctctacccgccagcagaaaatcaacccctgtttgatgctggggatgacctgatggcttacttcgatgccacggaggatgatttcaaatttgatattatgggcacagaagattctaattctcaacttccagacatgtcgaactttgtccaaaaggtatgcttcggtgcacgcatgtcacataactatgctacagttctcttacatctagttagaaggacacttcctgatcactatccttctttgacttctttctggttatcaactgttgtattattttctctgcaggatgataacaacaataagtttacattagatgggatctctaataccgctttgtatggtgcttcttcatctggatcccatggcaatatgtatccagacactgcagtaccaggtatggctttatcactatatgcttattagtaactattttcatctactaaagtttgcccattgctttgggggtacatacaagcatcttttatgaaatgtgaccatacttgcatctaagtctctcttctttaaaaatctcatggaactactttggtccagatatgccgatggatgacactgttgacaaaagtttcggaaagcgccttgccagcatgctgggttcaattccagctccacccgcaatggcttcagagttcccgccgagcacaggaaaatctgttgtcccacttagtgctgtcaacccgagtagctctatccgtgtcactgcaggcattatccaactcggtggtatcacttttactggtagcaccgagcacctgcagaagaatggagatttcaatttgctcctctctttcactgtcgagggcgacgtctcaaccaaatccattggttttgaaccggatacgcagatgagcaccacgccaatggtgttgcgcagcggcatgtatcttttcttcgtatcggcgatgattctcatgttgagctacaaagttgggctgtgtatctacagcaggtaagttatagtagtttttgttgccccaggctgtttattaaattgaaggagtcatacagagtccactcgacgtagagggaactgcctgcgatttggacagtttggttctttacattgttatagttggtataccgttctgacagttgaaagatacatagcaataaactctggaattggagaaactagagttacacgaatttggtgctgaaacttttgttggtggcatgtactgtataatttactctatttatttatttcacccaattctgggaggctgtaagcgttccccgatcgatgtaagctgatctgaaacctgaatacgcgctcttcatttttcatacccaaagggccgagaggcacagtttgcagttactgttgatcaattttcggatggaaggaattttgcgttggtgtgattatgtgcttgtttgtggtgttgtcagaaataaaccatgaccttgtgcgtgcttcatagttcaacgtgttgcgctttggagattggcaattgcatatgggaacagacgcactgcatgacgtacatatatgtaagaaacgcatagcatgatgtacacattggctatattacgtgccaatgttcgtttatcttcatcgaaaaaaaaatattatcacaaaaacgtgaaaaatctttcatacaacattaagaccaaggtggcaattcactgtaatcctatacaactaacagtatactctggaatggaaaatatatttctggcacatatgagtgcactgcgcttttgcttctgatttgttgtgttgtgcccaaacaagagaggctcacaagcacatggcaccgacggtagtacattgccctagacatgtgcggttgtgccttccttccatcaagagaaagacgtcaaattctctcccatctccagttctccatgaccgcctttcgcacatttcagtttcagcaccttcagaactaaagaataaattcgcgtgctttccctgccatcccgcagtgccatatcgtttcaaggaggatgctgctcggcaaaaaattagtacctgctgctgaggcactatgaatgaagttcatgtcataacacaaggcaggagaatcaatccgcggacgaaataatcgcaatggctgctggctggggcactatgaattttctggaaagacggtctggatgaacttgaggaaacgctccgagtagaactgggggtccacggcggagatggagatggagtcgtactgcatggacttgacggcatgctctatcttctttgacatgttgtactcctgcaatatgtctatgatacccaggtaaaggaccacgtcgtacacctcccgaaacgatttgctttcctcttctttagggttctgctctgcccttgcaggcatgttaacccctagctggatctgcagcctgtcaagtgtcaacacaaaaaaagagtaagacacctgattggtaaccctcctactttgggatgaagtgcaacatgaggaaacttttccttgtaatggaatgcttggggtgcaagcaactcagagccatggctgtaaagagggttttcccttttctacaggggaaggaaaaggaaagaagatattcacctggctgtaccagaaagtagtagatctacttccgcaaatccagcggctgttgatcgtaaacggctacctcttatgtgagggccaacaaccacactgttttcatcaccacctctttgaaccaacactagaccttccgggtagttgaaagcatcgtcctctgagcgtctgcaattgtcgattataaacatcagctcctcaactgtattaacaaaatatattatgtaccagctggaaaaagtgtccacttaccttcttctgaaagaacagttaatctatctgctgccatgcttcgatgataagatgcacgcgtccgaaggtgctggggagctctatagtgcacaccaagcaataagctgtaatccattatccgttgggtccttagaaattcactgtcagtttcaatctgcctgaagagaataataataattgtcaaccactgttgaaaggttgcgtgattgctctttgtgaaggaaaacatatgcaagaaaatggaaccacagcagcaacactgtacatgtgcgaaaattggtactttttttggtggacaccagatcagtgccaaaaccagataattttatggcaacacattgcagaacttggcatgtacttgacattgttttaaatggaaatgggtcattacatccatgaatcctctatcatacatgggctatctatttagtgacatccttcaactagttaaattttgtatttagaggatatacaagttgaacaacaatttagaacaaaaagatatgttgatttggcagcaagtataatgcagttacacaacaaaccatatcttagaatgataattgcatgagaaaatatgctcacttaagtaaagcctcacgccaggaaggttcaagataaaatgaatagttaagatccaaatccttcagagttgtgttctcatcaatttcgattttgtcagtagaacggcctaaggatgaacctttcaaatcaaatctccgatgaatcctcaattccgtgcaaaacatgttacccattacaacaaagcgaaactgcaatttgcaagtgttaaggattgtcactgcgcaagaaatgggattggagctaaagaagtgtagataaatccgttaccttttgaccactagaaggcttcaccctgtggaggccaaaaaacttagttatgagggtgttctcataagtacggacatgatggtaatattttggaagcattcgtaaaagaacctgcaaggatcatatagagtcatgaaatgtttttaacttccgcttgctaagtaggtggtgttacttataatgtataatttatcgaagaatctaccattaaagaattttctagcacgcttatatgatctctgaaaatttaagcataaaacagaacctggacttcagatttccgaagagtcttgatcatgaatcgatcatcttgtgataggaaaaagacacttccactctttcctggagaagataactccctaagtgcagaatttccacatatagagatcatataatctgcagcatcaatcttgaacatctccctcaaatttctacaaaaaataaaataagaacaatggccattttaggtgtgtgacagaaagaagagaactataagctagaaataagaataaaaagaaaagaaaaaaggtacatagctacgttcagattaagtgatgataactacgttaggtgagtatgccaattctaaagatcatgtaaatctgcagaataagtgtatgggcatatcttagagatgtacattgggatgaaagctaaataagtgcaatgaacctgaaaaccatgggacaatagtccttccatttgaagtcttctgcaggatgtgaaggagtaagtcgtgatccttctttggggaaggtcatccagaaacttgctcgtggaccaaaatctgaagcacggacttcacgtttctgaatgggcgtaatctttcctaccgtgtacctaaacacaataatgcattgatcattataggatataattattactgatgtatcaccatcatattgtcctactaactaggaaaactctcattttaacttaatagatgatgcaatattttgcacgaaagttcttaagagcaataaaaagtgctgctagaaatactccctgcttaggccaggtgctgtatcttagaatccaaaaaaactactaccagctagcaaataaaaaaccttgcattctaacttttcaaaaggtaaatgttaccgtggacactattacgcagcacaagcattagacaactagagggacctgaaatagttctgttatagttttaggatatgttgtcaagagaactagagaagactatctataaatgaaaacgatcaacagaagagagtaggtcaggacagtattagtgggaccaaagaaattaacgaacagatgtcattcaaatcttgcaactacgatgccgaactcagagggattacctgattccaagctgtagactgagcataagatcatagcttctgtgacccttaattattgtctctcctggcttttttgtctccctaacaattttcttctggcgccgttttgccttcttggacgaatccgaaaaactcctgtcaagtactacctcgctgattagaacaccttgcatatattcccgttccagcataggcagatcagaatcattaatgctttcagatctttctaggccagagcttccagttgcgtcatggccaatgaatttttcaatggccacctcaaggctccaccgtctttccaaggatacatttttcgaatgaggttgctcacttgagttccttctagatgaaggacctgaagattcccgagttaagccaaccttcatgttccccatgtcaaccgaagaagagtgaaggatgcgtgagccgtgattctgccttctaatgtcaggcagcacacctcggtttcttagattattgatgtagagctcatcattaacaggaactctgcaaccttttggatagaatgtgcctttcccatccttcagtcccttggtccaagtaccaacataatacccacactcattccatgtatagattccatacccgtgcatcatgccatctaaccagtttccttcatatgaatccccatttttccaagtaagagttcccttcccagacatcttgccattcttcatattgccaacgtaagtgtttccatttgcccacgtatacttgccatggccttctatttctccctgaatccaagaaccgtcaaacatgtctccattagggtacgtctggcatccaagtccatgcttacgattcaatttccaccttcccttgtagacgatgttgtcagacccggtatatgtgccttcaccataaatgtagccaccagagtactcaccctcgtaggtggctccagatggccacattgtctttccttgcccatgcctcatccctctcctccactcaccatcgtaagtgcaaccatctgaccagacatacctccctgaaccctctggtgtgttccccaataatgtgccgaaataaatatccctgttggagagcctgatctctccaactctgaagccagggtttgttccagaagcatgagaatcttggccatttgctaaactggacagtacctccttttcgatattgcaactagcgtctcggaacagctctactctttgagaacgggagatcccttctaactcatttggaaggactgcaggggctgtcatgcataaacccactaggaggactaacccacagtcgcgaggaagatactcctaagcacggcctgtaaagaaaagttcacgagacacatcagtaatgtaacctgtggaaacgtatccaagtgaggataaactgcgttacaacttatcctattgcaatattcatagaaagaaacccttcacaaagaaattgattgtgcagctttaactagaaaatgagagacagtcaagatcaggtgtacaaaaaaattagatgaaatttatattccttgaaactacaaacctaactaatcggagatgaaaatcgttgtagtacacgtcctgtaatcgtatcatgactattattgtccagatcattctgttgatcgtcacatcgttttgtgaaggcaaaacagtaaggacaatggtaatcaacagcagcactaactagtagtagcagatggtaagaccccacccacggtcgtttcctcaattgtttgctgtaggaatgtaatcaatcgggcatgaaaactttagcaacaaatttgggggccccaaatgacgtgagcggcagttgggctcatacgcacagcaaatggaggagtcatccaatatccatcacagtggcattcggagcttgcagtgagttgataaccaggaaaaaagtagtaggcagcaggacaggaggtgtgtgatccaatcgtgcgtagtcagtaaaaactgaaggttagtcccctcgagacaaatccttgggagtggagagatattgtatctagtaaatcaaaacagaagagggtattgttcgaaattcagaagggaattacggctcggaatgaatctaatcctaacccagcctaaatctaaacatatacacgcagcaaacgatcgtccacacaaaaaatatatagtagaggaacaaaaacgaggaaaaaaaaacgcgtcaacgtgcaactgatttaggagtaggggaaaaacgatggaaacgtgtagagtagagtgagggggatccataagaagcgggggttggattcactcgctttgggtgatgggtatcatcatccgatcaaatcaaccaatggatgaatcatgagaaggcaaattcgatagagcacaacacagacagaagtcagtgagggattcaattcaa

SEQ ID NO: 9156 - DNA, 32139 bp, Oryza sativa
cgtatatggatcccactcatccaaaattatgtagtggtcacaaattacactggacgatacattgttcgggtgcccacagttactacatagttcatgaaatgaagccattttttttagttgatacatttatgttttggtccctgcagtctttaaaaagatcactgaacacccttttttgtgattttcagcagatggaatccatgctcgggaagatattgatactctaatttagctttagctaacatgcattgaaagtctaatggtagggtggttattggttaacagaggcagaagatgtcactttttcaaaggtaatcatcggttgcttgcttgcttgcatgagcaggctagcagacaagattgtcaatagtctctgttcactctagccatttctttattcgacatgagtttcatgaatccttctatagattccttggagaaaagataacttgtctatacaaaaatcaggcaagtttcaactgaccaaaagaactatggctgtctttagatccaaaatttggatccaaacttcagtcattttccatcacatcaacctgtcatatacacacaacttttcagtcacatcatctccaattttaaccaaaatccaaacttttgatccaactaaacacagcctatatcgcattgagtccatatgaaaaaaaaaaggtgggctccacatgccaaattatcagtgatccaaacacatcatcatctaatatgcagagttaactggaccataggatggaggatcatgagctctacttgttgtcactcctgtctcctccctacaggaacatgacattgacactggcctgcctaaaatccatattaaaaccctctcatccttgcccctctctgactccctctctctctctctcacacacacacacacacacaaactagagacttatgccatgaggaggttctccaagcagcacctggtccctttcattctgctcctgctacttgtcatgtctcacttgccaatctcaagccttggttcaaggagagcattcagagaagaagctgtcagtggtttcagaagccatgagcttgctccaaccatggctccttctcaagagaaagaagcaggcgtcgtcgccggcgccggtagcatctgtggccagaagtatgctgtctcaagaagaatggttcctcagggaccaaaccctctccacaactgatgaactcatgcactgcaatctgccgtgatcatcagcttctccaatacaggtgaatggtgcagccatcattggttacctttaagtccgtctgcttaattaactagatatttcatagtattttatcacacaacgaatagagatgttcagtagtacaagtgatgtacctctcttttgcaatgttagcctttgtgtatagaaatatgaagatgcataagatggattgtgctgtagcataaattgaaatttgaaggctgactgatgtgaagatgactgtttgtttgggttgcttgtgctgtcaagctagtctcaagcaggtgtaatgtatctcggttggatgtgtgcattatcttgtggtggttgaaggtcttccatcaccagctaaaagcaaacttgtgacagagatcagtttcagtctgaacactcgttaattaagctcgtgcatgtttgtatggctaacatgagaaaatctggaaatttttcaagcacacattttccatctatatctctcttctccctctggatggttaagttttggccatgtttgaattggataagggattttagaggaggaaatggtggcatgtatagtagctggtgcagttggtcagcaattcccggaggactcgctgaagagacaggagattaggtacgtagctgcatttgtttagtgatttcgttcacgtggatgtcagtgcttggtcatcgataatcggcgatggcgaagcatagccatcactactccaagtgtttgtactcctgctgcagttgtagacatgtagattgtagtagtcatatttagtcaaaggtgtgtttagttttttgtgtaaagtttttaaagtatacggacacatatttgaagtattagcctgtgttcgacatccagttttattcaacatctagtttttccgacccttcttcctcgttttctgcgcacatgattttcaaactgttaaacggtgtgttttttgcaaattgtttctatacgaaaattacttaaaagaattaaattaatctattttttttaaaaaaaacttagctaatacttaattaatcacacgttaatggacagctccgttttccgtacggagggaatgagtttccaacctacatatgcaaacacagccttaaacgtagactaataataaaacaaattacagattccaactgtaaactgcgagacgaatttattaagcctaattatttcgtcattagcaaatgtttactgtagcatcatattgtcaaatcatggtgtaattaggcttaaaagattcgtctcgcaatttacatacaaactgtgcaattggttttttttccacatttaatgccctatacatgcgtccaaatatttgatgtgacgtttttggccaaaattttttgggatctaaacaaggccaaagcaagttcgagatccgaaatggatactacttctacctgtaaaagagtacacttttgcacacaaatttaaataagtgcatgtatagatttgtgtagaaaatgaactccttttttacggaaggtagaatctggtaggattcgccattacaaaacagtcttcctacgctttgagattttgcaggcatcagtagaccaacgaatatagcatgttcatcgcacagaacgagctactgcctctgcataaccaaacgcacattctgattctccagatacttcagataaatcgaacaagatctaagtattgcattcctttcttatgaacgaaacgaagaaagaattccattcagcaacatgtaaacagatcgtcaagaacgattacgacagcaagaggcaaacatctcaaggcaatatattgcaatttacctacaaatgcaagtctgaaacgcggactaatgatcaccccaacgcgtaggcaaccaggacaattaaaaaccttaataacaatcaattctatcacagtactagcagtacgaaatgtacgacgattagcagcaggcatatatcagagccaggtgaggtgtgagggcaggcgtacagctcatccaataaaagagagcagaagaacatgacgacagtgacataacttcacattgaagggcattgcacggttcagacttcaggcacaggccgacaggcgcctctcatctcaacgcaacaacgcgttgtctgctcccaaacacaagagggaaccagtgattaacatttaacagcatggcaccacctatgtcaccagcaattcagacatcatagtttccagtcacaaatgattctgacagtattcatgttttttttttgaaaaaaaaaagaaacagctgattctgatctactggtttcatcagcgtctcagctcagtttcagcaacaaaagattctggtttcccatgagtcatggtcagcttgttcccttcatcactgtccaaaactctggaaaaatccagtagtgatgtactcatttctttcagtcatgcacagttgttatgagatttcatggcaaaaataattgcttgggaatcaacattcagtgataagcactcattgtcagaaacgtccacactcatctacaggcatcagccaacaaaaagagactgacaagcttatccaaataagcattttggggaagacatggaaaagacatgaaatggacctaaattccttcagcacttcaataagttattcatcatgtctatcgaagattgaacccaggaaaaaaaaatcaagcaaccataatacacatggttatcgaaaggacttggagtacatgtctacagacaggtccagaaatgtgcaaaatagatgaattttgtgacaaatgtgcaaaatagatgaattttgtgactaagtaaagtcttgaggaaattagtgcaaaaacaaaatttactgaaacggagaacaatccatatgccttcctgcaatagcatgatcaggcaatagacagaattaaatttgcaagtgagcaaaatgtacttggtcatatgcaattgtgaactgcaacacatcacaacaatttctttgttatatttcttatatagcacaaggaaggcacaatatataatcaccagatgaccatattttatatttatatgaacaaattaacccgaaagatttggttaaacaggggatccatcgtgcgaatggaattacacaagtaatattgctcctcggcttgttcatttcacaatcataaaaccgcaagtgatgaatatatatattgcatactaaacaaatagacagaagaagctgatggatacgggtgatttcatgttcataatcacaagatagcagcaagtaataatagatacgatgatttgattgattagatataacgcaatccagtacaaaaggcacacggatattcacagccggaggcagaaatcacgataggaaagacagatggtttattgtttggtttgtcacaatggctaaagatagcattcactagcagatggaattggaagacatggagaagaccaagacacatactagcaggcggcgtctcaagtaacagtagcgtagtcatacgggcgggagcttgtcgtccttgtgcttgtcggcgtcggcggcggcggcggggggatcgggatgggcgtcggtgtgggcgtgggcgttggcgtcggagagcacgagggggcggtccttggattcgtgggcgtcggcgaggtcgtcgtcgtcgtcggtggagaggttgatgcaggagcagcgctcgagggaggcgaagaaggcggaggtgacgctggcgcccacccagcttgcccagctctccatggccgccgccgccgatcgatccgcaaggctagggtttcgtcgtcgtcgtcggtgggtgagtctagtttagtcaaaggggaatttgaagcgaaggggagaacgagcaaagcacgactcagccaaacacgccaacggagaaagcggacacaaggcgagcaggcccatcggcccaccaagcccatagatgtacttcatgggttgccttggggattttgacctcctccatccgaccagtagtagtacatgtataatattttttttccattttctctgaaacaaaaaggataatcttccaagctgttttcacatccacacaaaatggcttcgtcggagaaattaaccatacgattgcaatcctacggttaatcaatttctatgttcgcttttggctgcatctctggatacctgtggcctttcctttgtcacggtcacccccaccatgggtagacacccattcccaacttcccaaggcaacaagcacaaccacaacttctcagtaaatccacatgaaataaacataaatgatgatttggcctcaggccggtaaatgttacatcggtgctgcacgatacagatatatatgttggtgtctttctttgtagactcgctgtctctgtatatatatcatcactggctctagattaagacttgagcatcttcttgtagtccttgaacgtgcctgcgaaaggcgacaccctgccttccgacaccacccaaagctcatccacgctccccgttatcaggtgctcgtcgtgactcacctgtaaaagataacaagtcacccatatagcttgtaattagaatgatgccaagtcatcagcttttacaccaaaatgaacgatcttagttttaccattagcactcctccctggaaaacgagtaaaccctggatcagcgcctccacagcatccagatcctgcaacacacacaaacaaacatgttaagttgtttccctatcctcgcgtgtaaatcatcgctactgaaactcccttacaaagaggggaaaaaagatatccacctaaaagaacatataaaaaaaaacagggtgatttacttacaagatggttagaaggctcatcgagaagaataatgtgtggcttcttgaaggtgatctttgcaaaggcaaccctacttttctgaccacctgggattggaaaggctctaatcaggactgacaaatttaagattctacgagcagatgaatcattgggcaagaggatagttctcaatttctcatgaaactgggaaaggccatatgcagcctttaatatgcttaagacatctatcaaaacgctctcattacctgataaagtgtacattggttggagggcaagatttcctgtaacaccgaaagaacccaagtgtgccctcagtttctgttcaggtacaccctgcaaagagcatataatacattttttatacttagatcaacgttaaatgacaaacagactgtatgtttggtgatccatacactgtgaacttcatggtgcaacctagcaattgttgctggatgtaaaggaaagataaaaatgatgcttgaacttacagggtagcatctcatcatgtacaaaagggggttcactgttaaatcaagcccatcaacatggtgttgattgaatacagccatgcgaacctgcaaataacagccgcagcaataaataaatcaacaaaccgcagataagatgtagcagatgaaactctggcaataaaaggttatattataacaaaattatcactagcaaagtggtcaaactatacaggtaagaggcaaaatacattcaaatataaaggtccaggttcagagttctctgtttaattcagtaatgacattgatacagacaggagaatgtacactccagaatctcattataaaactattgtgaacctccatggctccatgtagaaactatgcaatcatgccaatcagaattaatgtaatatcggtaatgctaagtagtgaaatgtcatgactgtagcttcagaaggataaaagaaccttgggagagcggaacactgtccctgaagttggctgaagatctccagatattagtttaagtatagtggatttgccaataccatttggaccaaccactgaaataacagatcaaacatgagaccaaaaaaaagatgtatcgtgcagaaatactaggtatcattctttgttagtaagatgagtgaagcaaagcaacatacttgctatgcggctgtccaggtcaataccaaaattcaagtttttaaataaggtggggcctccaggataaccaaaagatgcgtcactgcacaaacagatcgtaacataaatacctcagaatgtactaactgctagatcttaataagaaagctagaaagaattacaaatatagtagcaagccagagaacaagaaaccatggttgcacatgggaagagaacaaatttcgttaaacattgaaagaaaacatatcagaaatgaaacctgaagctgatgattggtggtccagggcggtcatctggtgttggaaattcgaatttatagctgcaaagaattattcaggcaactatctaagctgattgcatataaaagaataaacacaacagatttaagatgcggtgatatactctggatcactgacgaccgcatcaacatgctccattcgctccaatgccttagtgaatacagataaataaatattaaggcacagactaaagttatcactggacgactcttaagtgaaacaatagcaaaggtaatatttggatttgcagaaattcaatggagtgatgggggatgtgagcaagcaaagtcaccttgattcttgattgaacaagtgatgctctctttgcattgtaacggaacttgtcaatgaatgcctacacagaagaaagaccaataaacttcacttcgatttttcaataaggatttaattgcacatagtagttgaatgttttcagatagcccaattaagcttttgaattttagcttagactagacaaacagttcttctgagcttagttaggtctctcaacgaatttttgaggctatggtacttgctagaaagtagaaacagatccaacctgcatgtgggatctggccttctcatttgtttcaaaagctttctgctggttcttaaggtgctcctcccttgtcctctcgaatgtgtcataatcacctttgtaagcatgtagcttttgtccatgcagatgaagaatgtcggtgacgacctaagaatttattgctatcagcattaagtgatttacatgacaaggaaaaaaatgcacatgcaaatatactacatatgaattaaggacgctctgtcaaaattagctccttcatgataatatgacatgatcataatcatcatactgcataccgtattaagaaactccctagcatgtgatacaacaatgaatgtctttggccatttcaggagatatgtttctaaccataacacagcatggagatcaagatgattctgcaaaataatatcttgttagcataggccagaaagagatgaaacaaattcatgtttttaaacttactgttggctcatcaagtagcaacaaatcaggctcaatgaagagagcacgtgctagagcaattctcatgcgccatccaccagaaaactgttttgtgcgtttacgttgcatttcaggagtgaaactaagaccctggaaagagttccaccaatcagaacatataataaagtgcgtactctggcaagggcatattctactggaataatcaggatatgagttatgaaatgttcaatttcatgcaataaccagcaagaaaacgtgatagcctgggataaagattatttgttgttgaaagtatattgataactaaatgaatgataggtatgcaaccaatgtaactgcaacgagaaaattggaagtgaaacaaaagatacaatcctacatagtacaaattgtacaagcaagaaaaaataacaggtattggatgcccagaaacagaccgccagaattgatgctgcacgagcctctgcagcatcagcatcaataaactcaaggcgtttgtatatctcctcaagcctcttgctgatagcatctttgtcaagaccatccttgcttttggacgcgctctgctcaaactcagcctcatactctagatctttctgcacggaatcgccaaactattagcaaagcaactgaatggctaaatataacaggacatacatatcttaaaatgttaattctgcatttgtcaacctgccgttgaaccagatgagcttcttcttgcaaaagttgaacccgttcaatatcagcattcagaacacactgcaaagctgttgtgtcatcgcccacaacctcttgctcaacatgcaatatctggcagttcttgggaatcccatcaatcgcatgcatcgccatagctctgagaaaagaggttttccctgtaccatttcttccaacaagacctgaagtgtgcatggaaattatcgaaatcattggggtaaaaaaaaaacctggaacttatacagaaaactttcaaggcaagaggtgatgaaaagtgcaaagataaaaagcacatcgagggtctgaaccactgactagtacagacagaattaacaagtttggcatttgtgcaatttagttttggcttttggtaaagcatagacagttaggcacgctattaaggaaaagtgttgcagagatatgtgtgacttgacatatacgattacaaatgtttcattcttcattcctaagttattcatgccagctacgaagtgaacaacagctcaagaagaaacctatgctgtaactcaccatagtgcctcccaaaagcaagtgttacagtgcaatcttgaatgagatcacgaccaccaacagtaacactgaagttctccatatggatatccctaacagctggcccaccagagttattgtgatttacaaatactggaggcattccagccctaagtgcctccatttcagcaacatgcgtttggtattgagcctgcaccaataaaaggacagtgtgcaacaagataacatcaggaaggaaagcatctccagcagcagatatacttttgtcacaaaaaaaaacacttccaccactaatctttttttcttcaccaaagacaagcacatcatcctctggtagtgtaaaatgatcaattgccaacatagagaacagcttacctctctttgtctctcatcctttctcttcttccgttcaatcttggctttgtcacgtgatgaaagcaagggtccatcaaatacatcagcttgctttttgggggcaaccttatcgtccattccctcgttcatacgtaaaggagtgacaaggcttcgcatagcttgtttaggttttaccaggccatgctttccaaatttttcacaaatcttactgcagacctatattgaaaacaaaagaaaatgcatcatggtcctgctaaatcagaatcagaatacaggagttccttgttttccctctcaatgtttcgtctttcaagatagttgttgcagctctcttctggccaataaaaaaattatggaaacaaatagaggttgagtaacatagatctaacagaccactacagaacataagcagtgattgatctacattgttgttgcccttggaagccaactgaatattattcataaaatgtgagtgctaaagaaggttctctaggcatgtggaatccacagaagatgagtcaagtgcttattaaatggatgacacaggcacaaaaatcgaaacaagctatagcgaattttagtagatgagaagtagccatacaaactgtgggatacatgacaagcaaatctaaagctctgctcaaacgggcgatgaaccacataagcatccataccacctcaatcacagcactgatcaagcgaagctctacccaattagacaaacatttaggctactgttgggcggacgacgatctgatcggtggatgggggattgcagcacagtaataaaaaataaaaatcaacaagcgggcggcgatggcgtagggtggcgggcgcgtggtacctcgaggcagtgctcctcgtcggcgacgcaccgagcgtcgatgaggaggtcgccgagcgcgtcgaagatgccgtggccgtcgggggcgccgaagtcgaagtcctcgtcggcgaggacgttggcgatgtagtcgatgatgggctggtcgacctcgtcgacgacgtcgctccccagcacctccgtcaccacccccatgctcgccgccgccaacgtcgccgccgccatctcgcctctcgcgacgcccacgcccaacgaaggagaagagaagaagaggagggtttgctacctactcctctctcccgtctccagtctccacacagatgagatgggtgccgtccgatgtggaaatggacggtccatattgacggggcctttgggccttgatttgacttcgggaaggacggcccaatcttatcagaattgtaggcccagtattgaaattacagcagcttcgtgatgatatgtgatatactaggatgacaataaaaatgccttcttagaaaatggatggatgtttatacagtgaaagaatttttgcaacaaaattttttttggaacaatggatggatggatgtgaaattttattgcgacaaaagaaaggactaagttggagctaatttttgacgggatatcaaactaaacactcttgtcaaagtcgactacaaatcgttcacaactattagtgacttgttccaacccctcgatataaacaaattagataccaaattctaatttgtagtaattaactactaagacctgaagtgaattacatgagacaaatccatccccaataataaccccttggtcatcttccttcctgagcaacacctgctccttcatggtcctcggatatctcgacggaacaaccttgctcttagtcttaggatccaaataagaacagcacctacccaccaccctgtcatacagtgatatctcctccagattaaccgcggattccatcacgcgcctgatgaatcccacgaagtgttcatcgggttggaagccgacgatggtgagcttggccagattacggtgctcgaggttagccaccgatggctgccattcgacgttcgatttgtcgcagtagccgttctcctgccgtgtcgtctcgtccctctccatcttgcagcagtgatcccacactctgatggagagactctccagcctcggtgcggcttccacgatgaacattgtccaagcgatgtcgcagccttcagggaggtcgacgagagtgacatgtcgtagctcgcccagcactggggctagcctcttccagccttctggctcaacccaaatctgcaaatcaacaggttgttcacaacgagtacgtgcaaattaacttgcaaagattcagatttcagaatgagattaagttgatgactaagtgtgtggcatgcagtcaaatgatcatgtaccttttcgctctggaaattgagattaagttaatgcagtgagggggcattagcaaggaagtgacttaatcggatactgttcttccagctcatgccggtgtcgacgaggctcaagctttggagcaatggagtgtaaccaaaaaacagtggatcccgataagagatccagccctgacatttcatcgtctggagcttgggtacatggacgagctcgatcgtctcgaaattgccgtgtgatatctcaagctcaacgagatgattgtgctctacctgcagcacgctgcgtctcaccgatttgcagttgaacagccgaagaaaccgcaggtttttgcaggtgaggaggatgccggcgatgtctgaatcgccgaaccagaggcgggtgaggccggcgaagacggccgggtaggcggtgaacaaggtgtggaactggccggcgaagtagacgaggtcgtccgcagcgcttctccgtcaggatcgagaactcgacggcggcgccggcggcgagcttccgggcggccatggcgcgggccaccgtgccggcgatggagatgcagtcgtagtacctgaggtagaagcggagggcgaggtggtggacggggatctccggccgccggaattcgaggacggcggccgtcaggtcggccacggcgccgttcgtccggaccacctcgcgcagggtgaggcggcggtggtttggccgcgagaaggcggcgacgtcgacggcgatccgggacagcatgtcggggagggtggccctcatgttcttggagaggatgcaggttttcatggcgtcagaggtgtccagcctctccaagatgttgagcacgacatcatccggcaaatcgttcagcctgtcctttccagggactaaacttggtgtctgcatcgcattgcattacatgcagatcaaattaagctagattaatcaaatcaaattagtaaatagtagtagcagaagaagaagaaggcttgcattgcatgcatgcgtacattgcgcgtgcggcgacgctttctgttcttcagggatgatctgagctcgaatgatggaggccggccggcaactcgatcgggcacgcacgggggaattcgatttgttgatgatcgccgacttaaaccctaaactgaaaagagacccaaaagcttccgacatatctcaaacgtgattggaatttgaaagagactccaagaaatcttacaagtccattggcgttaagataccaacacttaacgtcgattaccctaaatattatagtattgttttggaaacgattattcggcaaagatagtaaatttcacttggtgccgtgcggctgaaattttgcacacatactgagctttccctgttctgatcaaatagatatgaaataactctgcagtctgcactacggtcaagcccagatcttgcatacacacggttacaaacatgcttgagcttatagagttatcatgcattctctggggtttcttaatccattatattatctaaaaagaatagcgacaaaaataacagtggaagtttacattctaatttttcccaaattcagacaatggaaactgaatacagattcaatctggtacagaaggggaaatttggtaggggtagcaaactgaacacactatcaaagtcgagtacagattcagacaatagtgaaatgttccagtccctcaaaaaaaaaagaaccattccaaattaattgaatggcaaagcagctaagaccggaagtgaattatatcagaggaagaagccatctccaataataatccctccgtcatcggtgcatgtgtgacttgcaagttactgacgggcaggacaggagaagagaggagctgcttacgttgcggatacggcgactacccttgttcttcatggttattactcgtttcgatcaatgcgggcaccgatggattggatgctttgcaaggaatccgattgctgatcacctgctgacctaatcctgattatgtatccatggacttataagccgtaatcttaataactgaagggagaagagctccatgtcgattacagaaccaaaagccttacgatatctcaaacgtgacgggaagagactcaaaagaattctcaaacgaaaaaggaatccagtggcgttaacattaacataccagcactccacatccaataatatttttttttattctttaggaacggcttctttggcaagaaacaaagtttcacttgtggcggcagattttttttcacacgtgcgggacttccagtgtcaaaatactacaacataaccgaattctgatctgctgtatactgcatacaaggttggttatacacaagctgagaagctttcagtgtgacagcaatccgcggataaaatgaggagaatgataacgatcaccaagaagatagccaagcaaaaattacatcaatcaaggaaaaaacaatttggggataaatggactccaggaaaaggtaactgcagttcgagagggccgaactgatcaataaacatcatgcagcatacattaattcccaccagaatttattcagcaggtagcttttctttgagatacttcagaattgctttcgttcctcgctccagcagagtccgccgtatgctgcagacgaaatcaacaggaagttcagtgatttttctgccggtgcatgtctgaactgcaactttcttttttttttccctttcatattctaaatatgccctgagaaaattatggcattacgatggtttccattttaatgttctttcacatgtagttccgaattatatggtgagcactgcagaatcctatggttatgcacgatataaaatcggtagcagcacaggtctacatggttccatgtgagttgggtttctatttcaatgtatgcatgcatgcaatgggctcaacaatttgttcctacttcttacctcctgaggggatttccatcaagtttcaagacttgcaggttaggctcaagcaaaccctgctcaaaatagtgtccacaagaagattagagatttcagtgagtttgagaatcgtacaacttcaaaacagtactttcagttgatgtcggtgcatccgatacatcatcattaaagccaataacttaccagctcaggtgggagtgttgttatattgttgtccgacagatcaagctcaatcaaagaagttaaatctttgataccctgtgtaagtgcaacggattttgcataagcaaataaaaagggcgcacgtgccattcaaaactttctaaatgcacctgggaatgtgaaaagcatttatagaaagagggggaaaatcatattccttaaatagagaaccaagtgtttacctctggcacagatgtaagataattctgactcagatcaagaattcgcagcagttttaagcccaataaactatcaggaaatccatggagtttcattcgtctgctcatatatagagaaaaataaataagcttccatagaacactccatagcttagatgttttgcatatgttacaaccttaggtagagttcctttaggtgaggtaatttcgaaaccgcagagggttcaggtagagaagaagcactgccacttaaatctagtacttcaagtttagacagggcctcaagatcagtagccaatatctgcaggaaaaacaagtgtgttacaatatcacagattagcatgcagattcgaagtatgtcagctatatataaataatcactcttttggtaatgtgtcattccaactcttgaaagtaggaacaagaaatacatgcagcacattacccccacacacccaccccccccccccccaaaaaaaaaaaatcttgtctaagatgtcttggcacatgagaaaacattaactgtaaacatggtattaaagctaagaaagaaacaatgtgacaatccctaaaaaaatgtaaaatgacttgtgtctaaacataataggctagatggcttataattatgtcaagtctttatccatgttgcctctgcaccctgtagttcaattcttctaagtgttgtaacagctaaaccatcaacttcttcaatttcaataatcaacgttgattaacttccagagattaacccatcagggaatcatgatccaataccaagaaatttgcaaaagaaaagatatgaagaccatgacattacctctgccaaaggattgttgtctagctttaacaaagaaaggctggcaagggaggagaatacggtgccaggccaccttttaattttgttgttagacaaaatcaaagactgaaaaaaatggtagattaaaaagagtaaggagttatatcgaaacacttttatctcacacatacaatggaattgatcaattgaagtataacaacatcaatattatatctgtaattcagaaactcacttgaagtgacgagcataatgacaactcgtttggcagatcttctattgaattcttagaaagatctagtttcatcacatcatttgtctcccaagctgcaggtggtacactggtcacaccaagaccactcaagtccagttcctgatattgcaccaagttaggggctattgtggaaaaaatgaaacgatcattggttattccatgaggctccataagatccaatgaccaagatattttattcttgcattggtagtcatgagaatacattgaaaaagtcgacaagtttttgtaaaaatacaggaaacatggcagatagaaacacacaaatcagttactcttttggcatgaatgagacaatccatgaatggcaaataccacatgtgggtgaattagctccttttaaaaaagacataaaaagagatctatcttatgatatacaaatatgctgtcgaaataattaaagtaccttagaagataaagacaatcttcttgctgcagcaatttgatcatcttttgttggagtgcttccagatcctgatgctgcacaggaaatatgttgagctttcgagtgatcatggataatggttctcaaatcagaaaaaaaacaggagacgtggcaaagcttgaagcagataatgtgcactacaaatacatcattatgaacaataaaatgcatggatattgattttgtgtttttggttacctccttcatcagatgaaagccgactgcgcagatactttaataatgctgttgttggtccagaaaccaaggaactggtaaccaaaatggaacactgtattattatgttggcagttctgtttagaatcctgacaacctctttgtgaaaaactaggacaatggcatgggcatcatacctccgaagtgtcctcataggattaccagtaagcagaagctttcttagggttgtcatagtaccttgaatatagcatgccgaagcatatgtgagtgtccatagtttcgaaagttcattaagatagtagcacacttgcatagagcatgctaagttttcaaagcagataccccatggaaaaaaagaatcagccctatgatctatccaacacatagagatgcatgcaatcatttcatatcataaaatttcagctaaccaaataggaaaataacaaaagtggcatcatcgagaggagcattgcacagcagaaaaaccaacctagttcagcaggcagaccagataatgagttgtttgatagatcaaggaaagagagcttgagtctacaagccccgacaggatactcctttagctggaaaagtgacatattatcagaaaataataaaaaaaacagaaatgaacttatttcttctgtaatgttctgttaattctagcaggattggttgcagaagttaagctcaatgttacaacatgagaagtttgttgttgtctaataaagtggttttggggatcaatatttacatcaaatattctgaacaacactgttccaccattccttccgaacatgtaagtaactgagttaataagaactcaaaatatatcatagcgccatccctctaacaaaacagacaggattagacaagcctatagatggtgggagtgactatggtaaatcacatgcagtttacatacactattaatgaagctcttgggatttgggaagtgggaaaatgttaagggagcgaaacattcatgaaattttctggactggagtgtatcctagccatcccgagatgatccttttttctcaaaaaccatcccaagatagtcataagcaaaaaagcctcatgttagaataaacaaatgatgtactaaaattttgagccacacagctacagatttgatgtcccagcaacaaagaaatcaaatcaagagcctttctcccagtatcttcagattttaaaatggtgcagaataacaagagtcaggggaataatagactattaaattggcagtatctgtgaaaataaatggagtaagacctggttagagtgtagatcaagtattcccaagttcgatagcatgccaatatcctctggtatggatgtcaacaagttatttctggaacataaaagtacaaatagagtgaacttgtgctgtttaaaaataagagcatggtaaagaagtttgtccaaaatagataaccaaccccatataaaactctgctagagaagagcaatcttttatggaaggaggaatcagggttatttctacataacaaaagtagaaagccatcaatacagataaaaatgaataataaagagctagcatatgcgatagtatggtagactaactgttctgatgcaggtccagacgaattagctttgacagtgcaccaataccatccgggatggctgtcagtagattctttgctgtacaggtttgaatgttaatctcaggtagaaactcaaggatatcacataggttcgacattatttttggtactgtggctgtgtggcataccagcattcatctctgtaagcattgtccatgacataaacatcttgtctgatagcgtcacgagcttgttaccctgacattttgcagtaattggagttttcaagaacaaaagaaatgcagcacgaaaatatgataaatccagctttgacattctctataaggagtatatacctctagattcaatctgaataacttggaacagccagcaagttcatctggcagtacggatatagtgttgtttgacgcctacaggtagggcattacattatatttaggacagaggatgaagagggaagctataaagatgagctgtatatatcttcatcaaacaaagaaaccttatggagaaaataaggaatacatcgatggtggcttacattgagttctgacaactccaggcatctggcaagactaactgggagatctgtaaggcaattatttgagcagtcaaccctggcaacaacaatgcatcaacttacatgaatataatcatacatagtctcaaacattgcttcttgtatttaggcgtcatactaattgtcaacatcataacatctaaaatatgtgacagatggttttagaaatatgaatagccaaattttgagcttgttttaacagtacattaatgaaatcaattagaaaagggacatagaagacatacttgactaaagcggtcgcaaaaccaatctcttcgggaaaagcgtttatttgattagaagatacatccaacgattttagcaaaggaaggctgcatggaaaagagccataaaaaagttcagatgatattagtggtccacggttaacaatggaaattactccctcctgtcacaaaaaccatgcctgcaaacttgaccagtaatctctatcgaaaaacagttgaaaatcttgatagaatgataatattatgaaactggttttgaaggcagtgacttcaaacatgtccacaaacgatatgtttccatgaccggagggagtagtaaataaggatagtccagtacatactctccaatagctgcggggagggaagaaatattgttgtgactaatgtttaatacaacgagcgaagacaaatttctgaggtcttcacgcaacacctcaaggttgttatgagccaatatgagcttctgaaggtcaactccctgaattacaaaaggaaaaaaacagaaacagaaacaaatttgattggcgttgcttgatatcccttgtttatgcagcatgtagggaaatagtcatacaggaagggggcgaatcgatttacctcccaccatttctcatcctgagcccccgtgtccaagttgttgtacacctccttgggtacctccctggcagaacaggcagaggtgtggcgtcagcgagacatcaagaacaagaagagcgaagctgtgtgcgcgcgcgctggaatcgattaacccatggtcccctagtacaccggccataatcagacaatgcaatgcagtaaactgatgtgagaagcaggtgaaggcgtcatggcgggaagggattggattgcgtcgcgtccgagcagtgggcggcggctacagactaggagagatcatcgtccatgtcgccgatggcgatccaaccgagcgagcagagagagacaatgcacctgagggatcgattggagaggttgagggagcccgactccctggcggatttgagcacccgctccatgcaagcagaagcaagcagcctccggcctcagatcgccatcgccggagacctgatctgatctgctgcaccagcaggcagaggcagcacgagcctacccacgaagaagactagaagagagatcatcaacttagcaaggacggagagctcaaacaaatcgagatgagatcttgttttcttttttttttctttttctcctctcttctttggccacacacacaatggagcgagaaattaattaaattaaaaggaaaaaaaaacagtattagtcaggcccactaatcctgttgggccaaaatcaacattgaggcccaacgtctatgtgatttggaccttggggtgaacaaatcaaggaataagttcactttaggttccttaatatgtcggcaagtctaaaattcatcctgtattctgaaaaaaaaagttactttaaaacaatcatattaatacatttttactttttactaatattcaattaatcacgtgctaatggataacactgttttttgtgttgaagtactttcccaacttctacagagttttctatagaaaagttatttttgaaaaatatattaatctatttttcaaggtttttaatacttaattaatcatattctaatagatttcgtgacgcactttctcaactgttactccctcgacttcctcacgtacccttcctaaacgattaaacggtgcggtttttacacaaattttctattaaaaaggttcttttaaaaatcatattaattttttttaaaaaaatttaaactagtactacatccgtttcaggttataagactttatagcattgcacatatttatatagatgttaatgaatctaggcacacatatatatgaatgtaaacaatgctataaagtcttataatatgaaacggaggaattacttaattaatcccaagctaatggataacaccgttattggtgtggaacgcagacaaccgcagaggcagctcgtccaatgaagtgtactacatacaagtatacaacatcataatttctccccaaaacagttatttctccgatgcaacatttgcaggtataccatctctttttttgcatacgtgcacaatgctggtgcacattatacataacacaagctggttccacgatgctacttgacaaaagcaaagaacaaaacaagagtttaaacacaccgaaacaggtaaaatggtctttaattattgattttcaaatcgaactaagaccggaaatgaatgacatccgggcagccgattcccaatccctctgcaataatctgattcttgagcaactccctcttctccatcgtacacggatatcttgacggggaaaccttcatcttgatcttaggatccagatcaccgcaattctcacagaccttcctgtcatatagggatacctcctctagattaactgccacttccatcacacgcctaacgaatcccaccaagttgtcgtcgggttggaagccatagatggtgaccttagataggttctcgtgcctgaaaccatcaggtgcagatgattcccaatctacaactgttttgtcaccataaccctcctccctcctgtcctcttcagttttcatgttgcaccaacgatcccatattgtaatgcatatctcctttagggagggtgcagcttcaagaatgaacattgtccaatcaatgttgcatccttcaggaacatcaacgagactcacacgctgcagcttgtggaacacaggccctagtagctttgggcattctggacgaacccaaatctgcaacatgagggtaacctaaattaattcagaatgcttacacgcttcagaattaatatgctttttggttttatttctctattttgggctttattctaaagccagatcagtaaggttgatcttccatgtaaacaaatactccctccgtattttaatgcatgacaccgttgactttttaatcaacatttgacaattcgtcttattcaaaatttttgtgtaaatataaaaatatttatataatgcttaaagaacatttgataataaatcaagtcacgataaaataaatgataataacataatttttttaaataaaacgaatggtcaaatgttaattaaaaagtcaacatcgttatacattaaaatacggagggagtatgaaacaaagcgtaagcataaaaatgaccggaacagcaagcagctagctagtaccttttcgctttcaaaattcaggagcaggtcgcttatggaggtgacggtagaaaggagctgactcaactagtgaggcttagacttgaaagcagtgggacatccccaaaagacaaggggtccccgtgacagtcccaatgaacataggccatatgtctaagctttggtaggcacttgagctcaacaaactcaaaatccccatagttgatgtcaagctcaacaagttgcgggtgctctatccgcagcacggccgggtcatcttggttgagacaagagaacaaacgcagatgcttcaactgtttacatgtggtgagcaggttggggatgtcaggttcagcgaaatgcaagtgttgtagctgcaggcgtgtgaggccagcaaacgcatctggaaaagcagctagaaaagttctgaactgcttgccaaagcagagcatgtgagtttcttcgcaacagcctccttgcttctcggttaggattgtgaactcaagagtctcgaggttgtaggtggacatggcgtgttgcacagctttgccgatggtgaggcaatcatagtatctcaagtagaatcgcaagctaagttggcgaagggcgatctgttgactcctgaagttgagtaatttctctgttgcaccagctaaagcctcattcatctgaaccacatcactcagtgtcaaaagatcgggtgcaatcttattgggcgtgaaggaattggcatcaacaacaatgcgggagagctcggcagggagcttagtcatccttttgcaaagggtgcaagctctgatgtcatcagccgtgtccagccgctcaagaatgttgagaagaacgtcattaggcagagtggtgagcctatccttatcctttacagagtggcaagctggtttctacattgaattatcattgcattgcatttagtattgccgaaaaactaaactaacaaagtgtaggagaatcaatcaaatcaatgcgaaggaagagaagaaagaggctacttacattgcggcgacctttcttgttcttcgccatttgatacgaggcttatcaatattgacttgacttgttgtacaagtgtcggtgggtgttgtttggataccgggaacacctcgcctctctatctattttatttagtttagagaaagagaaataaataggaatcctattccaacaaactgattgcttctggacctcctgccggcacccaaacacaaacgaaattgttgttggaagtcgattctatttcgaagagaccttttacggtgcttgaaaggtacccaaggtacctctcctcaacttaaacatccaccgttgattctcaaagagtatattaggaattggattaacataaatatgggcagtttagtaatttttctttagccatcgtgattaactgttctttatctttggttatatcttcctgcaagcttgcacacataccccgaccttcttttcactgagttttgaacgctatatgatggatgactccaatttcaaaactagaatttatacgtccatccatctctattgtctttagaaagtaatccatacaaagagatggagggacatcgatcaatttttcatttagaagtctttacaatcacttgcaaatctcatgtatatatatggaaagacgcgcgaatcaattacctagttctaatcatcaattatgtggtcttcaattagcatgtagttatacgatctgcaaacactaatcaagtactcctaggcatgtgcattggcaccaacggactgaagacgttattgtctctccgcgctccggccggaccaaattacatatctaacatttatgaaatatataaaccaaattacatatctaaccttttcctagtaatacctggcccacacttttaagtatcttttcataggtaccttctactgtgaatcgttagattggaagtcatcaacggatttggtgcactccaagcacggtagaaaatctacatagcaagtggcggcgctcacccctcgaactccaagggacgtggatggggatgggttgggctcagtctccttgcctttggcccaacacaattagtcggcctgctgcccaatagaatcatccgatccgacgacaggcggccgggccgacgtcctcctgctccgcctcttcaattcacgcgccaccatgtcgcgtcgccgcctgccggcttccgcgctcgcctagccgtaccctgttgtatttacttgtgattcttgtgattttggatgtccggactgtaagaagtataatttctaataaaatccatcgcattcgtcccggacaccctgtcgtaccagccattggttctcctctccctcccgttcatggaacgtgagcgaaaccctcttcttccacgggcagtgagccccgtttgcctaccacgcgcacggctggattcgaggaaaaggtgccaacccaagtcgaaatatcagcaagtcgagttgagttcgtgttctaactacaaccgtatctagtcagagcttctttttcttcatgcataacactcgagccgtcaggcaggcaggaggtcgatcaagcaacaacagagcaggcatgcaggatcacccgcatcgcccgatgaagaataagaaattaaggtcaccgccgccacaacaacgtaagctagctgccctcttccttccttcgagttgatttgtttgattttcggcgacctatactatatctgaatgcaatattgcaacggtaaattggtgatgcaacgtagaaaccagcttgcaaccccgtatagaaggatgataggctcaccaccatgcctaataatgttcactcaacatcctcgagaggctagacatgggtgatgccataagaacttgcatcctgtgccaaggatgctaagctccctgccgagctcccccgcattgctgttcatgtcaattccttatgacactaggtgaaacatcgcgcgtgctgatgtgagagtttactatgataacaataagtaaaagttgttggaattaatgaatgggccttagcccactcgaagattaattctttggaaaaatcacaaaagcccacctcatgggatggcatgcatgtggagtttagtaccaccttgcttattctaggagagggggacctccttaaaaggaaggatgccctcctagccacttgaagcatgtgtggtggagagaagaggggaaacacacgcgcgcgctcgctcgcctcgccgggccgggtcggcggcgcgcgtgcacgacgtacgcgtcgaatggtccgacgaaaaattggctcctcacccttgcgcagatgcagcctccttttgcagttttgttttgctgcaaattcggattagttttgttttgctgcaaattcggattcgtttttgttttggaaacgttccgaaaaatccggtgcgtgcaaacggcgtggagtccggataagttacgcgcgacttatccggttcggttacgcgcagtagagatcgtgcgggcgccctgatcaagcgacccttctctatataaaccgacttgccgtcttcacgcaacacttgcgaaaacaatctagggtttgtctcctactctgtactgcgccgtcgctcgtagactactccatcccgctcgccggcgtgcaccggcgatcgggagagcaggtctccggaacctctgtcttcgacgttctgcaccgggagaaggcggcaataaggtttttgggaagcgcttcgcgcgactgctccctgttcgttcgcgacggctcgccttcctcttcgctcgcgtgtttcgtgccttcgtagacacctgcgaaaagtttcgaccaagcaaccggtctttccgtcacctcggtacgtgttcaatatgttgcgcatatttgatctgttcatgttatactgtgtagtttacatgtatagatctaatgatgcgttcatgctagttttcatctgtaatgtcatgatttatttatggaatagattaaatcattatatgtctataatctcaacaaaagtaatgtgtaagatagcttaaacaacatttgtttacataagttgatgtgatttaaatttaaatagtacgtagaataatgattcaaatataaaactaagatgatgtggctttacagagaacaaattaaaatacgaaagataatttagaccatatgtctaagagctaaaaaaaattgagatgatgttgcttgatgagagaagaaaagaagaaagataatttgaaccatagattaatcatctaaggactaaaagcaatttatgtaatatgacttaataagagaaaagaaaaataatatgaactaagtgagtatgaactatatagatatatagcatattataaaaaaaatgatggagagatatattaaaatattatgtgggtttgatttaacatgcttacattttaaatctctaaaatttaataaattattaaattatagataatataacatgtttgcatgatgcttacatgtaccagttgacagcgagacgtctgtggtgacttcgtcaatctcaagaatatgtcggcccagtcttcgaagatgctcataggggtagggtttgcgtgcgtgcgttcatatgggtgagtgtgcgtgcgttgcactgagtaattctcaaaaaaaattgttagtggatgatgatgtgacatctttgcatgttaagttttaggaattagtaggttataactatatagtaagagatgattaagtggtgtggttcggatgaatgacgtcgtggctaatgcaatagacaaacttctcaactccaggagtcaacatatcatccttcgtcaacttagcttgcgattctacctggggtactacggttgtcttaccatcggaaaagcactgcaacaagccatgtccacatgcaatctcaaaactgcgagttcacaatcctaccagagaaggaatgagacccctgtgaagaaacgaacatgctctacattttttttgtggaggctaacttgttttccttgtttctgttcctgttgtcggcataaatataaattagctgattcctgtaggaacataacctcggcatggtgtttcagcatcacaggccaaacgacggagccctgcaatattgaacgatgtccaatatgatgcttaagatgaaagcgttgcttgtgcatttaattgaaataagcatacaagttagttttgtgtgtttgtacttcaaagccagaagtttgtatgttggtaacaaacaatataatccgtcgatgggattgatgcaatggcgttaccaacaatagaattcgtcaatgaccgcgatgtgatggtctcaaataatacccaaggtaaacactaaagctaggaggcagaaaggttccatgggccggtgcaagccaaaatccctacaaagcattcaagcgagatactaggtgtccaccgagttcacagtcctaactatgaagtgaaactgctgagctcacaatcctaactgaaaagcaaaactactcagctcacaatcctaactgagaagcaaacagaccgttatgagaaactgacatgctctaaactcaagaaaatgataatacatttaccatatgagtctttaacgacacatatcaccttctccaaccacgacattgacaattgcattcatgttgatcatctgaggactatagctttgatcaaacaccattagtcctctctaatcgcaagcaatctcatgcatggaagtcatgtggagaacttgatgaaggaagcctggagcaagattgaaggtgaactagtaggatggttgccatgaccaaggtcgagcatatgacgtggatgaaggaaatgataagtttagatgatgaaggaacaattaaggtcattgtgggtatttgacatcatgtttttggtaaacaaatataaaaaaaggaaacatgacaattttggatggaatgatatttcaatactatgaaccaattctaatctaacaaggaggaaacctacataacaataagatcaatgctatagaactaaaattgtgatatctgaatgctacaaaatcaaatttgttaaacttttaatgattttagacattgtacaagtttgtgaaattgttccttagtttgtagcctttcacaaacaacaactttgtggctctaaaactattctattacatgtgtccatgaaaattgtgttttgtatagattggagatattcattaggtgaaagatatatttatatacaatatttagaagcagataaaaatgttgttgttccaagataattgataatggatatatatttggttttggtatactatgtgacacatgacaaaaatccaactgctgagtgtcactataaattattccatttaccatatgaagtcacttgacattaaaatcgtcatatgatctattaaggacccaagtagatacattatcaaaacaattgaatgactatatattttttttctaaattggtcgggttcaacttatctttatttatctcatactaatattataggttttatataaagtaaattgcatcagtagtacaagaacttggcaggtgggtgcgatttagtgcaacaacttgaaaaatgtgcaggccggtacatgaacttggcaatcaagtgcattttggtcaaaacgctgttacatataaatgattcaacatattttgtttcttctattatatttgtttcttctattataagcatactactagattattggtcatgagtacaattgaatatgtttgactaataaaatcacttggaaattatgttacaaccatttttatgcacttagttttaacgattattatatttttcggtttcaaatgacatactattttttagttttaacgatcattatatttttcggtttcaaatcaacatgctactttttattataagcaagcaaacttggaccatgatagacgtcattttgatgggtagacaaacctggaccttatgttatgttgccattttgattactgtatctcactgagtaggcaactatgatggagtataatctaatttctgtcgtgctttttctttggttactgtccaataatactttttttatttatgttgcagtaaatttttctttggttagtaattcaataataaatgtcaaataatacttttttgtatttatgttgtagtaaatttttctttggttaataattcaataataaactttaacggtaaacaactcaagtaaaagctcagcctgttcatacgctggttgggttggtttagttggttccgcagccgaaccagcaactggatggttttagccggtttgggctggttctagcaaatttgagggatgctgagttggtgggttggtttgggtggttgaccggtttagacggtttgagcccgtttaaattgtttattagaactgcacaactacactagctactacgatagctcttatatccacacttttataatctatcctgaaaattgagaaggaagaagcaattggcactaaactcgcaatgcaatgaccaatatatatacctcatttgcatgaaagttcttgtctaatgctctctgttttgtaccaatcaattctgatacaacagaaggttcaacctctaacactggccatccagaatattaagatttctttcacatacacagatgagctgagttggagattggttcatggtttacctgaaagtgtgagaggatggagcacccgctgcaatgctgcactaggttcgccgcctagagatccgtcgcaaggttgcctaccagggaggcaggaacagcttccctgagcccaatttctaccgcgccgccgccgccgcacgctcgcacgagggtttcgatgggagtatcaaattgggatgggttatatagtttcgctggttctatctctccctgaacacaacccatgtgatgctttaatagttttgacctaaaaaccgatgaagctggtaaaatcgctaagaacgggttggtccagtttgggttcgcgatttgtgctgagttcgcttgacctgtgaacaggctgagtaaaagccatatcacaatttcctggtaaaatgctagaatcttggccactgcttcacaattctgtacactcctattcatgtccaaacattcatgttgtgttttaattgttgttgttgttgctgatttaattttgtccttgaatttggtgtgttttaattgttgttgctgttactgatttaattttgtccttgaatctatttgtagaggagatgctcaacctggggggcctttcttcaaaggcaaaggcctgggagaagcgaggttagtcacttattcagttcctgcttattttccttttaatggtcacatgttttctgccctcaccgccctttatccgctatccgcagtgaagaagctgaacatcagtaacaatggtgtgtacccggcggcatccgcgaagaagcacaggagtagcgagatgttgagaactctgtcgttaggagtagcgagatgttgagaactctcattaggagtagcgagagatactctgttcctgactattgatgttgagaactctgtcattaggagtagcgagatgttgagaactctgtcattaggagtagtgagatgttgagaactctcgagatgttgagaactctcattaggagtagcgagaatactctgtccctgattgttgatgttgagaactctgtcattaggagtagcgagatgttgagaactctatcattaggagtagcgagagatactctgtccctggccataaatagtcgttgagaactctatcggtctaataagaccttatatcttctgctgcagtatcagctatttatgtgacgtctcattgttggtttgcttgagaaatgagaactagttatttaaatgtcagttttgcttggcttgagttcatttcagctttgcccggtgctgctgctgtaggcatgtaggagcatgcaggaggagctagaggtgttattctgttatgcggtgttattctgttaagcttttatatatatatatatatatatatatatatatatatatataaaagaaaatcgagaaggtgttttagagtaaggtcaataaaaaagcccgctattggttgtgataagtgaacatgtcgcctatagtaagcgttatagctaagacatacaatagagatatcatatacttgtaacataaatattttattgttttacgggcccaccatcttctcctcttctccttcttctcatccttacatggacgcctcttctcatccttacacggacgccggcaacggagaaggtggcggtgaacat

SEQ ID NO: 9157 - DNA, 36058 bp, Oryza sativa
ccgcgcctcccctggctgcccgcgagccgccccttccccaccgccgcgtcgccggccgccggccgcctgtcgcagacgccctcctcctctcacgccgcccgcgcgctgcttgtccgccggccgcgcaccgcccctcccccgccgctcgcaatcgcagagaatggagagatagaaagatgagatgggagagaagagaggaaaagagagagaaggctgacgtggcaatgctgacaggtggggcccacgctgactcacccaccacgtcagacaaaaccggggtcaaaaccaccagaggacctcaagcgaacggttttgttagttgagggctccgatatctgattttgcggttgagagacaattttgtaactcgatgacaagttgagggactttcggtgtacttttccctcagctatgacaccccacaactgttagtatgttacaactactagtaatatattaattgatcttcctcagtggtttttaaaggtgatttttgtactatgtgacattattcctataaataattagaccttgtgtagttggcaaaaaaaaatttactcctacgtgtcacatcggatatacggacacacatttgaagtattaaacgttgtctaataacaaaacaaattacatattccgtcaggaaactgcgagacgaatttattaaacctaattaatccgtcattagcaaaagtttattgtaacatcacattgtcaaatcttagcgcaattaggcttaaaagatttgtctcgcaatttacacgcaatctgtataattggtttttttatctacatttaatactccatacatacgtaaaaacgaaaccaggatattcaaaacattcaaaatatattgcttacattatagtatatccaagttactggcctgaaaccaagttgcaggaaacaagagaattctaatgcatgccttgaaacgtttgaaactagagtgtttcgtcacaaaaggaaagaagaagaaaccaaaaatattcagaacattcagcatacattattgctactcagctaatcgcattttcgcgctgatgaattaagaccggaagttaattacatgaggcgatgccatcaccaatccctctgtaatttgcttcctcagcaactcctgctcctcgacggtctgcggatactttgacggagcaaccttgattttgggatccaactcttcacagcaatcttccaccttccggtcgtacagggatatctcctctatgttaaccgcggtttccatgatgtgcctgatgtatcccaaaaagttgtcatcaggttggaaaccgtagatggtgagcttaaccagattgcaatgcctgaaaccatcaggtgaagatgactcccactgcacgtttgttttgtcacagtaaccctcttcttcccgttccaccttgtccgtcacaatattacaccaatggtcccaaattgtgatgcatagctccttcaggaagggtgcagcttcaagaaagaagcgtgttatcacatccttcacggagatcatccagagtcaaaacttgcagattctggagaacaggcgccagcagtttcgggcactctggctgaacccaaatctgtaatacaaacaagtcataaaggaaggatgcaggggttaagttgagaatgagatgttcataacatgatagagagagagacttgcttaaattaattaccctttcacttttgaggttgagatgcaggtctcttatggaggttacattagaaagaaactgacttaatctgataaggttgtgcaatctcagacctacattagtgaggcttaggcttgacagctgcggaacattgccaaaatacaagggttcttggggatgtctccaactattaaagaccagccgttcgagtttcggtagagaattgagcttgactagttttaaacatccgtggcagatatcaagctcaacaagccgctggtgttccacctgcagctgcaacacagtaccctctgtttgacacatgaacatacgcagagactctaatcgtttgcatgtggcaataatattgggaatgtcagtttcagcaagcctcaagttctgtaagtagagtcttgtaagcccagcaaaggcatcagtacaagcaccaaaaaaggtcatgagccgtttcccattgttgcggagaccataaaaagtgtaataatgtagcttataatctgtcagaattctgaactcagcgctgtcaagcttgtgggttgccatggctcgggcaacagctttgccgatggtgagacaatcgtagtattttaagtagaaacatatgctgagttggcgaagagggatctctttggctctgaaattgagaacattgtccgttgcatcggccacggcggcgttcatcacgatagtctccttaaaagtgatataatcaggatctggcgcgaacgaaactactccctccatccaaaaaaaaagtcaaatctgagtttccgtgtccaactttgattgtccgttttatataaaatttttttataattcgtattttcattattgttagataataaaacatgattaatattttatgcgtgacttgtctttttaatttttttttaatttttttaaataagacggatggtaaaacgttggacacggaaaccagggtttgtctttttttttgggacggagcgagtaggccaatttgaaagcgcgaaagcatgtgtcggaggtggagcgtcctcttagagaggaggcaggttctgacggcatcgggggtgtcgaggcggtccatgatgttgagcaggatgtcatcaggtagcgtggtgaacctatccaccaccattacgggagctgatttctgcatcgatatagtgtttatttgtgaaactaataataaattaattagtgcaacagtagtcatggatcgacagggaaagagaagactgacatgacagatgcaatgcaaatcagtaagtactcccttcgtatttatgaagccattgatttttcgaccaacgtttgaccattcgttttattcgaaattcttatacaaatatgaaaatatttatgtcatgtttaaagaacatttaatgacgaatcaaatcataataaaataaatgataattatataaattttttagataaaacgaatgatcaaacatttaataaaaagtcaacggcgtcatacattaaaatatggaggtagtaggaagggaatagacggcttacattgcggttgcggcgactacccttcttgttcttcatggttaatgaattccaatgttcaacggcggggcctgaccataacagacaagcgctgcgcttattgcgatggacgtcggctcctcctgacttgtttatatactgagaggagaagaagaggaaaagaaggcgcctccgactgaatccgattagaataggaaaatattggacacactcgatgatttttatggcttttcatcgcattcgagactgattcgattgcatgagctgtttatatatacttttttttttggaataaattggttaaaggaatcaatcaacaatagaaactcaatactagtactagtcaccagctgatggatggaggcgtggcgtgtccggatagacttttccaggcgaaggctacggaacgaaaccgattgctaatatggttatgtttagttcaacgtaaagtttgaattttaattgaaattagagataatgtgactaaaaagttatgtgtatgatagattgatgtgatagaaaaggactgaaatttgaatccaaacttcgaatctaaacatagcctatatatacacacacttcagacaaacagttaccagtctttttaccttcatcttcagtaggtcagtaaatattacaaacctggcattgattagattataaacgcctttgatctcgcttgaatctagtaccactgataagagattgaacaccaatctcttggtggtacttgaacaaaacacatttgcttcagctgtgagctggatggcaagttctcttactggacaaagggtggaaaatatttcattgcaccaaatagaaaagggaaaccagaatattcaggatatatattattatgcagcaagcttaaatatgtgctggctaccggcctgaaaccaaggttgcaggaaagaagacaagttcaatcaatgcctttaaacgtttgaaaccagaatatttcataacaaagaaggaaaaggaaccaaaatattcagaacattcagcatatattatttccagtaccacacagcgaatcacagttttgcaccgagcaaaattaagaccggaagtgaattacatgaggcgacgccatcaccaatccctccgtaatttgcttcctcagcagctcctgctccacgatgttctgcggataccttgacggagcaaccttgatcttgggatccaagtcttcacagcactcaagagccttcctgtcgtacagggatatgtcctctaggttaacagcagcttccatgatgtgcctgatgtatccaaggaagttctcatttggttggaaaccatagatggtaaacttagtcaggttgtaatgcctgaaaccatcacgtgcagatgacctccactccaagtttgttttgtcgcagtaaccctgttcttcccgttccaccttgtctgtctcaatctcacaccaatggtcccaaactgtgatgcacatctccttcagggagggtgcggcctcaagaaagaaacttgtccaagcgatatcacattcttcagggagttcatccagattcaaaacttgcagattctggagaacaggcgtcaacagttccgggcactccggatgaacccaaatctgcagtacatatcaataataaaggattcagatttatgtcaagaacaaggaacaaataaccagagaggattgcttaaagtaaattaccttctcacttaagaaattgaggtgcaggtcttttatgaaggtgatattagcaaggaactgacttaacctgataaccttatgccatctcatggctacattagtgaggcttaggcttgaaagcaatggaacgttgccaaaagacaagggttcttggggacaaacccacacactaaaaaccaatcgtttgaggtttggtagggagttgagctcaactaggtctaagttcgcagtggagatatcaagctcaacaaggtgtgggtgttccaactgtagctgcaatacactatcctctatttgacacgcggacaatttcaaatactctagccgtttgcatgtggcgatgatgtttggaatgtcagcttcagcaagccttaagttgcgtaggtggagacgcgtaaggccggcaaatgcatcagtacaggcaccgaaaaatgtcatgagcagcttgccattgtggcggagatcgtcgatagagcaatatagtgcccgcttccctgtcagaataatgaattcaacgctgtcgaggttgtggctgtgggtggccattgctcgggcaacagctttgccaatggcgagacaatcatagtacttgaggtagaaggttatgctgagttggcgaaggggaatctcttggtttctgaaattgaggatgttgtctgttgcatctgacacagcagcattcatctgaatctgaattgcatccttggaggtggcataataaccataataatggggcaaaaaggaatgcagcgaaatgtttaagtttgagagcaaatgtcgaaggtggatcgtcctcttagaaaggaggcatgtcctgacagcgtcgggggtgttgaggcgttcgaggatgttgagcaggacatcatcaggaagcttggtgaacctatccactactagtaggtggttattgtgagctgctgatttctgcatcaatataattttgcgaaacaggattaagcaaatataacaagtaaataggtaaatgcaaaatgaaggaagcgaaagatgaagaaaaaggcttacattgcggttgcggcgactacccttcttattcttcatgatgctgatgatggtgggtggttaattccaacgaggtacggtgtgagtatctagcttggctgatggattggacttccttgttggtttattattgctatatgaaggccaacggcggctcttcctgtcctgtatatacaaggatgaggaggcgtgggcgaggtctggccgacgggcaactactactccatctccgtatcctaaagagaaaatccataaaatgccatcgacaagcaccctaatcctagaaatgccatcgacaaagacaacttcccaaaaatgccattgcacaagcctctttctcccaaaaatgccatcaccgtcaactccacaccgttacaaccgttatttttttaataatgactattttgccctcagtgcaaaatatacctagtttttactgtcaaagaaaaaaaatgaaatttctaaccctaaccctaccactaccgatcctgatctagcgctctccccggcggcgtctcggcgacagcggctcggcggcgatcccctactgcggcggcgcggcgaggaggacgatggcggcgacgcgacaggacgcagcgaggaggaccagcgcggcggcggtgcggcaagggcacggcgaggaggactgcagcaaggacgcgacaggacgcagcgaggaccaggacggcggcggcgcggcaggacgcggcgaggaggtctacggcggcggcggtccccgacggtggctcgatggctgtcctcgacggtggctatggctcggcggcggtcccttgctgcggcggcgcagcgaggaagaccatggcggcgacgcgataggacgcggcgaggaggactagggcggcgatggcgtggcaggatgcagcgaggaggaccacggcggtgacgaggcaggacgcggcgaggaggtccacggcggtggtggcgcggcagggcgaggtgaggaggtccacggcggcggtggcacggcagggtgcggcgaggatgtccacggcggcgcggctattgcaggatgtggcgcgggggccgtagacgccggcgaggagaggtccgtaggcgccggcgaggagggggaggagaggcctgcagccgcagttgctgaggtccgtggaggaggaagctatagtcctagctggtgttgcaactctgatgttgaaattttccctttgtttgatttgatttgaagactttgtttgatttgatttcagtgaatttaattatgaaataacttgattgatagcaaaataatgatgtttgtgaatttataaactaacagaaatataatttattgtgagcaagcaatgcaaaatgatgatgtgtgagtaaatggttgtctaggggtaagattgtcttttcatgcaacttaacggaaagatgctaacggcagtttgacggtgatggcatttttgggagaaagtggcttgtgcaatggcatttttgggaagttgactttgtcgatggcatttctgggattagagtgtttgtcaatggcatttcatggattttctctatcctaaacggaggaggagggaaaggaggactctgaattggagtccgtctcgtcctagtctggaattggattggaggaggcacaagggcaagtgacgcatggagagagattagggttaaccttgcagagattttgctccggctccggccctaaggtggctgggcggcggatcaggggagacgctggcggccaactccggggtccccagcccggagtaacttagtgggcctatccactggtagggaaccagtggatgctgctgatttctgcatcgattgcaaattgcgggaaactaaatatattagtggcaggcagcgaaccaatgtagtactagtaatatgctcgtgctaacgctacgataatatttagtaatacaaataaaataatcaaaataccacatatgatatatcttttgtatctcaaatattaaatgagatacatttatgatttaaaaggtagaggtccccaccaacgtcgcaccaagctgacacgcacaaaactaacaagattatacccaaacggcacgacgtcacaaagattacacccaaacggcacgatgttacaagttgggtctccacccacattagttgcaccaaaccaaatactacacatacaaacctggaacggtcatacgtgtcgtatgtccgaacaagaaaaaaacatatctgaacaagtgggtcatgaaccgtgcacgaacattagattaccatgtggcgcttttggcagcacaccatttttaagcaatcctatatgattattcaaaacaattacagtgattcagcccataacttatacagtttgatgatagtatgtggatacgggtcatttcataggaatgtcacaaataacaatgttgtgttacatataatgcgaaatctgtcaaatttcaccaaagattttcacaaggctatttgagtcaagcatctttctaatgttcttttcttgtcttccggccacttttgtttacaacacctctactcggtgcaggactccattcttttttactacatctgtcaaagttaaggaagttaaggggaaaaaaaagatggttaccttgtaacagccactgttacctcgatagtgccatgctgctctggcaaatcgccatggcctccatacagctgctcacaaagattagagaccataatttggccaagctgaaaataataaaaatatgaagtattaaaataataaaaaaaatcaagcactcggtgcagcaactactgaacattattgaaagaaccagcgagaaattctttttggctcaattaaccgaaaaaaatatttgatttcccctgttccacgtgtagtgatattaatttgtagttcagcagcttcagcattagaaagctaaattcaattcttctggcaaccatatgtttaatagaaaacagtgtacttgtttgatatccaatgccaaaaccattgataaataaaaggaaaacagtgtacttgtttgatatccaatgccagaaccattgataaataaaagaaacctgaagcgagctaaattaaaatactgtctggcaaaggatgaaaacagacagattacctagaaatttattgaacaattttaaatactatgtaacataagcaaaatagtaataatcactcatcaacaggtttagccaaaaaaaaaagattagctgtgctcttctgttccaattttttttttctagatttcctgcaaattttagaaaggaatacagccaatgatctgttagtgcaataaaatttgttcagtgtaattcctgatgacctggtaaacaaacagatggtcggcgacgaagtccaccggcggcggaggcagcggcccatcgccatggggacggcagcagctttacttccttcttcattcacctcaatcaccgccttgtggatgacttggctcacaaacaacggcaagccggagccgtcgtcttccaccatcacggataggttggtgagctacggtgagaacggcagccggagccccagctgcccgaggacgccgacgacgctgtcggcgaaggacaccttgaacttgggcaccatgaactcgccaacccgcaccgattcggacgaggtgctcgtgcaggaacccggccgctatgccatcttttccacgatgccacgcagcccgtcgcgtgcgtcggggaggaagatgaccatggcgtactgcgtgaggtcgtcggccgccgcggccgcgcttgcgcttgttacggagattcggcgcgctgtagtggagcttgagcaccttgaacccgtcatgcacggcgacgtactgtttggactttggagttgctcgacgacatgtacgccggcgtcgaggcggtagaacggcttcttcttggtgttcttcaccaatcaccatgaagggatgctcccagctgccctttaggtagatggcgttgctgagcacgatggccatcgtcgggccgacggatcccggcggcaggacggagtcgatgaggcccctcctcacctgtcgcgtccactcgttgatctgcttcctcgcttaatttcccggccttcaagaaaccccaaccaaatcaagaacagtgtacaaaaatttaaaattatgatttgcatcgccctgaattggcatctggatatgattcattgattcatcgtgcagattagtaatggtagatactaaccttgttcttgaaatcgacggtggtggcctcggccttgtacctgccgacgacggcgtcgcaccacacgccggacgtgaacgcgacgcgcggcccacccgacgccgacctgtcggccagcgcggtggtcgccatgtagaacggcgaggagctcatccagagtgcagcaatgggcgaggggaggcggagcgatctaggcaccgcggtttgccggaaggagagcgcgtggcggcgtggggggcgtgattttcggctcaggagcgatggtttctgcgagtgggggatgcgagaggaggttgaggcgtacgtgggacgatttgaggcgttggattggatgattctggaccgttggatttgatgaatgagtaatgtaggtgtaagagtgtgttggtgaattatagggtagataacgaacgaacaaaacacaaaactaaattgatgtttttacagctagcaatgacaataaataatgatactatatatatatcacagtataagattggcggcggcggcttacattgcgattacggcggctacccttcttgttcttcatggatgatacacccttgttcttgttgcgtattcaatccgatggatcggtgtgagtattaagactctcctcctcttcctctcgatcagtcggcccggatcctatgcgaactcgtacatggatcgatcgagacagaagtcacctcccttaccttccctttttcgagatcaaatctgatgccaatgaaacagcacacagctatacctctgtttttttttcttttattcccctcgagtactacgggttctgttttgaacgtttggaaattggaactgatgaagtagggtacggtagggtgtatggataaagtaaggaaagacaggccggccctaaactttgggaggcccattggaagcggcggcccagatgagagcagatcccctgtcacgccgacgccgccgccgccaccgctgttgccctaacgccgatctaatgctggagctccattcgcttgttcttatactatacaagtacctatgccggtgatgtatagctgctgctgctggtgcttggattcggttgaatttcataggtatggtcggtcagctggaatagcagtcggtgtgggtatatatgtagcctagttcgcatcgggcggaagctgggaagggaagatctagttcgcatcggagccggaatcgaatcctcccttcttttcctcttctcctctccatcatcagtatataaacaatacgcgcagcgcttgtccggtcaggcccgccgccgttcagaagcttaacattggaattggattttattaaccaccatgaagaacaagaagggtagtcgccgcaaccgcaatgtaagtctcttttctttcccttccttaattaattaattaatttgcattattattattgcataataataatatctgcctttcctgtcgatccatgaattaatttcgatgcagaaatcagctcccgtaaccgtaatggtggtggataggttcaccacgctacctgacgatgttctgctcaacatcctggaccgcctcaacacgcccgacgccgtcaggacctgcctcctctctaagaggacgctccacctcccacgcatgctttcgcactttcgaattgccctactttcattcgcgccagatcctgattatatcacttttaaggacactattgggatgaacgccgccgtggccgctgcaacagataatgttctcaatttcagagccaaagacatccctcttcgccaactcagcatatgtttctacttgaaatactacgactgtcttaccatcggcaaagctgttgcccgagccatgacaacccacaagcttgacagcgctgagttcagaattctgaccgattataagctacattattacactcttgatggtctccgcaacaatgggaaacagctcatgaccttttttggtgcttgtactgatgcatttgctggacttacaagactctacctacagaacttaaggcttcctgaaactgacattctcaatatcattgccacatgcaaacggttagagtctctgcgtatgttcatgtgtcaaacagagggtactgtgttgcagctgcagctagaacaccagcggcttgttgagcttgatatctgccacggatgtttaaaactagttaagctcaattctctaccaaaacttgaacggctggtcttttatagttggaaacatccccaagaacccttgtattttggcaatgttccgcagctgtcaagcctaagcctcactaatgtaggtctgagacggcacaaccttatcagattaagtcagtttctttctaatgtaacctccataagagacctgcacctcaactttgaaagcgaaagggtaattaaattcaagcaagcctctctctctctctctctcaggttattaacacctcatactcatcttaacctgcatccttcctttatgacttgtttgtattacagatttgggttcagccagagcgcccgaaactgctggtgcctgttctccagaatcttcaagttttgaatctggaggatctccctgaaggatgtgatatcacatggacacgcttctttcttgaagctgcacccttcctgaaggagctatgcatcacagtttgggaccattggtgtaatattgtgacagaccaggtggaacgggaagaagagggttactgtgacaaaacaaacgtgcagtgggagtcatcttcatctaatggtttcaggcattacaatctggttaagctcaccatctatggtttccaaccagatgacaactttttgggatacatcaggcacatcatggaaaccgcggttaacctagaggagatatccctgtacaacaggaaggtggaagattgctgtgaagagttggatcccaagatcaaaattgctccgtcaaggtatccacagaccattgaggagcaggagttgctgaggaagcaaattacagagggattggtgatggcgttgcctcatgtaattcacttccggtcttaattcctcggcgcaaaaatgcaattagctgagtagcaataatgtatgctgaatgttctgaatattttggtttcttcttctttccttttgtgatgaaacactctagtttcaaacgtttcaaggcatgcattagaattctcttgtttcctgcaacttggtttcaggccagcagcctggatatataatgtaagcagtatattttgaatgttttgaatatcctggtttcttttttttgttgttgcaataattccccttatccttttccctacaactacaagagagcttgccatccagctcacaggtgaggcattgttttgttgaagtaccatcaaggaattggtgttcaatctcttattagtggcactagatacgtttggagaatccatgccctggtacaggcaatggagtttatcttccggcattcctttgcgaacaaaggaggcatatttctgtttcttcagtctcaagatgctactcattgatgcctctgttccaggcgcatcattcctagagatcttgccagtggtcagatttctccctccctgtttaattaagagaagttctactcagtggctgcagggagatttggcaggaaatggagaccagactcctcagttgaggactacaatggtacatcgaaaacaaaggatttgagaacaggcagaggagatacagaacagggaggttttgggtgctgtgaggatcagaggaggcgtcacaagtcgaggggcgaatctttgtttaccaataaaaggttatgctttcatttatcttccattgttatctatttccttgtaggtagagatgcgaatgcgagttccaaggagtgctgtcccaaatacctgtgacttcaattatacagttttagaagttatgtttttatctaacttcaattgtgcttgcagttttagaagataatgcttcacaataagaagatagttgacacactagagggtaacattttatagccccccccccctaacattgaagtgggtgtttcacttaatatcttgccctgtatgtttgaaaagggaggtggatgatagccatgtttgataattgattgagcgcattctaacgaaaatatacatgaatagataaaaatacccactgccgtagattgatgcttagacactttgttaatttgaaattgccatagagagcttatattgatcgagttaaacagcatgcagctacaatttttgtcccaactttttctgctttatgaactcctaagttgaagaaagttggtttccatggtaaacttagtggataaccgagacttgaacttattcattaccttacattgtgattgacacttgagctgttcaatatattttgcttattccattttatactatgtatctctgggagaactattcggctaatttagttttattttcctttttagctgttatggcaaatgcaattctcatcaatatctttatattttattgatggttgacgacagactttgttcaaacacattgttgaaaccctatttaactattcgctctctcttggtagggaatcattgtgatatcatccaaacagttcaaatttgacctttgcattgcagccacatgcaattaggagctagcgatcaacatgcaaatacttagctggcatcactgtaatgattataagttcaaataaatatgaatcactgctttgagcttcaatttgttgttcactgacagtttctttacactatcttctctaaatatatctattctgtacttctattacagcttgtgatgtctgcgataacctgaaagtgctttgtcagagttgagccaggctaagccatcaataatggctcaggtattaaattaaaaatttattactcaaactctcatggatctgttgacataatccaaaactgttttgagaaataagaacccattcttcgtagttttcttgtcttcatgcaacactgaagctgtgaaggaggtgccaattgttctgaagctcctatatgatcgggatgccctggatgaagggtcaaggagtccctggttatgaagaatgccaagccaattcatggagtggctccggagtgtggagtatttccagttcgtgtcatcgtgtgtgattgtcccaaagtcataagtactagagcctggggcgcgcccgttggcgcgccgcctgagtggaacattggtgaagaggcagtggatgattaagcctgagtggaatgatggtgaagaggcagtggatgattagggatatagatgggaggaaagaataagcaagttttggttaaaaaaaataagaaagcaggcactcatagagaagcaaactgcagctaataagatatagacatcttaatacttagtggtctctagtagtaataggcacatatacagatggtctttaacatctgcaaggtagtgcagtatggatggtaagcacttatggtcccaatgacgcatatccaatttcatcacttgtcgcacggcacaatgggctcatcttaaattaaatttgaatatatcaatacacttctaatataaaatttaaacaattgaccagaatggtgttaggatctcaagtttttattgtcgagaccgctcatgttcagaattcaggtatgcactactaatttcgtactaacaaatgaatcaactctatgtaattgtttttcagtactgtataaatcaacatttatgctcacattcttctgaaaaatgtatacccacttcttcaatattatgtccaaacaaagggaaaagaaaaggaccggcttattctcagtctatcctgctgtcaatccttcatcagatgcatgttatgttctcacttccttccaatcttgcccttgcccattgtgatctactgatctgtaaggctgtgagaacctttcaagagagctattgcctgcacaacatacatatgaaccaatttttcattagttcctgggcccgtgaaaactgagtccatctggtcagaaagaggtgctccaaattgcatcatccccttccttcatcttgagtgcgcataagcttgctagctggattacaaaccactccacactgcacctctaattgttttccaccgaccgcatggttgcttgtttcataaagaaaatgttagcagttggtttggtattatagtgatcttcagaaatggtatagggtatacaaagcaacggaagaaaactgatgtggtggtgttccattgcgcatatctgtcattgatgcttcaatatttacactgcccaagttatagaccacctcaatttcttaaatggagaacaaccccaaagcatgttgcttgactgctattattactgaaggcatgtattttttaagggatatattttttacacggtgttcaataacatactttgaacctattattacttaaggcatgtattttttaagggatatattttttacacggtgttcaataacatactttgaacctattattactgaaggcatgtattttttaagggatatattttttacacggtgttcaataacatactttgaccattaatttattccatgttatgctcccaatgaatatgaaattagcatcatatgaaaggacttcaaagtatgaatatcacgagcttgcaaataagcagagtggtagctaaagcgacaacccacaaaaaagatcaatgttgcagtgctgatcaatttattttcactccttgctgcgaatcatctaaaaacctggactactgtcatattacctgaagatgaattattgcgagctgaacatggaaaattctggtatgcaatccaaaggtgtcaaacctgacatgaaaaaggaaaatgatcagatcaccaaagaggctcatcataccataccatcctcaatcttaagtcaaccaaactcatattatttgcaattgactgaaacctccgcatgaattcattattttcgtctctcttttccttatgtctatcaagaaaccatcagtgacccattgcagtcccatttaaagtatttaacatttaagaaaacattcagtacagtaaaatggaagattgagatttgcatcttctgaatattagtgccaaatataaacccatcctgctaccagttgtactaaaaaaaattgactgccaataaccaaaatgctaactactaaaaaaatcatccagtatgtgaagctcctaaatttttccttatgctactttgtaaaactatagtacagagtttctggcaagaaaattggttcccaggtcatccactcatgatggatcagcaagcaatatcactgcagtctcattttccagacaaaaaatatagtgttaggaactcatggagttgattttgtaagatgcagatgagcaacattcagccatcatacagtaataaatcgaaagaaactaagatttacgttgttaaagaagataaccttggatgaatcctaattcaatcataacaaagccaagaatcataatccagtcttaatgaagccaagaatcctaattcccagtgtaccttggatatgagattgatgtcaatggaggtgcgagcaacagtcgacatagtagttgaccctagttccgaggcacgcactatattgccaaaaatagaacatagacaaattacttcttcaaattgcagtgaaaattcatgcattattcattagagggtaaattaccattgattcagagatggcgatcgttgccatttgttcattttagtctatgaatcattgtgttcattttaaactacaagaaccgcatgtggagggagtgaaggggcttgtgcttcagaataattttgatgtgtttcgtgttgaattgaatcttatttaaccctagcagtggtggattgagcttggacttttgggggctacgaacaaacaaaacaagagaagagcttcatccagatgtagaagagaaggtaggcttaatgcaagcaaatttgagacaaaagtaggtgtgagagagagagatgaatcacagaatcagaaagaggatgtggatgctcaccgggatgcagcaggaccacggcgcccctcccctcccctgctgtgctctgcttaccgctgacattgccaccagcttcggcttctttttcggccttggctccagctgcggccactctcacgtcgtcctcctgtggatggactccaacctcgccccgttgatcgttgcgagatgtttccttaacaatagattatatgtgctttctgccttatggagcagaaattataagccagcagacagcaagcaaatataccatgtcaagtaaataaatggatcagttaattgatatcattgacacattcaagaggacaaacttacagggttgtgcatctcttcacttaaaccaaaattttccagaatagaagcaaccaatgtggagaaatagtgtacagcataggagccaacccctacctgaacatcggaataccaatgatatgtgatgtaaccagaactaattgcaatttcctgaagagtgtgccaacacaatttataccagaaagttgtgggcatatggaacttaccgcagatccataaattgtgaggtaaaataaacttttccttcccattggtaacaatttcatcccctataatgaataataggtcacaccaacaatcaatttgatagaacacatttttccataagcaaaaaaaaatcctagttaaaattgagtcactgaacgttccttatcaaaagaaaatggtcttacttcttggtcttcccacacagtttagagttgcctcatggtgtattttacaacaaactaacagaattacaacgaaaactatcttcgctaattagatcaagagatttctatgtttagaatggaaattctataaataaactcagagtgaggtgtttaataacaaaatacagtaagttaacttaacaatttcatatacttaataataagcttgatggaagttcccaataacaaaatgcagtcagttaacttaacaatgttgtctgctgataagtaatcaattagaccatcatgttatgtagaagactgtcaaaaaaacacagaaaaaaaataataataggacattggaaccataaaattttaagatacaaacttacaaggggattatgaaacaaaacaaatatgcgaaccatacgaaaatccaagtgttgcgctaaaaggaatatgtaaataaaaggactatacacgaaaagaagttcataccaagcacagagatgaatcgaaacaaagtgggtacggtctagctattaagagatgttattcaggtaaaaatcatccatctgtatacttcgtaaaacgggaatacttatccttcaaccaaaaaggccgaaaccaccatatacaaaacaaattttgagacattaccgaaatgcattggttttgaagtgaaaggaaaggcatgtcactgcagatttattcacggcaaaagagttgcaactttccaatcacccctccacaaacccactccaaaacccaattctatgactaaaccccaagaatacctaaaataccaagatgctatcagacgcatcttacagcaaaaaccccaaaccaccccaaaggccctaaaccctagatagaacggcgctacgatccccgtgcaaacgcagcagcagtcccaaatccgcccatggtgcaccaaactgcgggcacgattatacctttgatggaccgccccacgatggtggaatcgaaggccgcagtgtcatcgccggtggagatgatgatgggcgcggcgagcgaggctaggagcaggagcggatttgggaaatcccatgatacataagcgttacaagtaaataatgatttacacagtacagcaagcagtgcaatggtttctacaaatataaccgaattttaatttcataggcaaatgaaagacaagcataaattctacaatgtcagataattcaaattgtattgtcatgctccactaactaatgattttaatggaagaatgttgaaaaaaaagtaataagatttctgccagaaaatataagtttcagttcagtacaaaccacccataccaagagaatagcaccagttttgaatgatccaagtgatagcatctcaattccctgtaagataaagagaatcagtaggtttatctccaagaagtttgggaggaaaacagaacatatttgtgaagctcttgaaccatagtcatttcaataatgcatattaaccttatatctcaagataagacaagagcatacctgaatgcagaaagcaatccccaaaacattgtttgctagccaatgcttcttcgcagaataccatatgcaaaagaaaaatcctgggattgatgtaacaacttgagacttggtaaactccactgagagcgctgaaataagaaattaatgaacttaaaagggccaccaagacataagcttgtaacatgattcatgattgcaccaatctgacagatacacatgcaacaatctgacatatgatacacaattgcaccgatgattgagcatttaaaaaaaaagaggtttgggtcctacagacatacagtggaaaaatgcatcatgctgaacgatgaaattatcattccattcttttggaagaaatcatttcatggaaggcagcaatgttgcactgcatcagaaaaaaaaaagcacataaacaatcttaattgcacaaatacaatattacgtagttacatgaatggaaaagctactatatcatccaacctgccagcttttgtgtacatcattgattcattttcctaatgatctgcaacaacaacggtgaaaaaaatgattatagagatttggtgggggcaattagatgagatgaaggaaggggatattagatataaggatgtaccgtgaataaggcactactggaactcgccttcgatttagcacaacactaatgaggtaaattagaacatggacaaccagacaactaccctacccctgcatcagaaatatgaagctgcacagatgagcttttatctcagctgtcataagcagtgaagaaaatcaagcaaaacttgtaattgtaccaatgagtgagatggacagatggttgcacctcattaaaaataaaaaggcccaaacctcctgtccccacctgatgctggcctcctcccttgttccccatcacatcgctccagccgctgctgccatctctcccgcgcaacatgatcagaaatccggccaccctcactgcatgcaaaattgaagctcatcagaaacgactctgtgcaacaaagaacaaccaagcaactcctctgagcacagccttgccacctcttaattatcagtgcatagtgatgtacacattcatgaaacaaaaaaaatatccacagctagagaaacacgcaacctttgatcgtgcgaacacgataaaggatcagtcattttgtgcacctccattatcctcatatactgtgaataatagaacccgtacaaattgggatcgtgctgcatcagtaaagaatcggggatgagaggagatttcttcctgtaacttaccgagatggccactgggaagagccttggggatggggcttggacgccgccagccacctgcctcatgaccgctatgagcagcggaagcagcagggcgaggaaccgccaccaaggttgagcggccattgctgtcgccgattgaaccggtaatttttttctctgttgtgaaagggatgaacaccgcggcaaagacaaggggaaggaggatctgagacccttagcctccctgttgcagccgattcatccccttgtcatcgttgacaatggcggcaagctgctcaaggagagctcgattctgtgtccgctagatcaaccacaagcaaaagtcagtattgcttgagatcacaacacaaaatcatcatagctgcacaaaagacaaagattggcatcgattaccttggcccttggggcgaggcagcccatgagagtggcagcggcattgccggcgttgttctcctcaataaaactgattgtggagttcattacgagcagtgtgatgatgcccacgaagtcctgccagcccggcagcttccctgaaaacaccaaacaaatcaaccctcgtcaattcaatcaaacctctcacaatccctcacatgccatgctctggaacatcatgattcattaaattcattactacttactcctccattggcaagagcgatggccatgatcgccgcggcctccatgacccaggacagcgggttccacatgaacctcaagaacttgctttcctgcacacacacacacacacaaacaaacatgaaaaaaaactctgcaccatcgaatcgattcctaaacagaacaagaaactttagtgatggatgcctgggttagcctccaaacataaaggccattactatgaaagagctgcaagagagaaagcagttgcgggtggtcccagaaggcttggattgcacagattctaccagaggatgttgagatgctcccattgcaactcactgatggagaagaactggagagctcagctagagctggaggaggtggtagtaccagttccctactggtaccagtggtggcttgatcacttcaaattggagggactattgggccaaattcctctactgaatcttgggagagaaactacggattgggtgggtcaccttcttctccttgagcttgttggggccgaagaggttgaggcactgctcggcattggtggaggtgagccagccggagacggcgatcgacagcgacgacggcagtggcaccgcgaggcggaggaggccggcgagagcaggaggtggcaccgcgatgggcaggcggcggcgccgtcggcgtcggcgtcggcgggggtggagaagagtgttcgcctcctccctttctccatgttcacctcgaagcccacgctcggcggaaaggcgtcggagcgaggggaaggcagaggtgaaggcagtcggagactgcgacacgacggcggcgtcggtggaggtggaagcggcggcgcgagggcgaggcagatgtggacgcggtggcgcgaggcgacggcggaagtggcggcgctcgacggcgacggcgacgacggtggcggaggaggggaggcgggcgacagcggctagggttaggggtgagtggaccggcggcggaggaggaggatggttgagggagagggagagagaggaggagcggcggcggcgttcggcggcggcgcgagggggaggcggtggcggcgcgagactgcggcggcggcggtggcgcgaggcaaggcaggagagggagagggcgagacgggagcggggaggggaggggatgcaggcggcggcggctagggtttgggttagtgcgggtagtttagcgaaaagcccctcaagttttaagttttacagcgcggtcctaactcgcgtactttccttacttctcatgtaatatccatattttttaagggtctttacgaaaaataacacctcacaagtactattctcgggggactgcggacgaattacgcgtgaaccagagggctttcgcaaaaaaatacagtagaaatcctacgtggatacgcccagaactcaccccatccgccacacttaatagtctctaatttccagtctgtttgtgtgcgtttcttatcttatgagtaatgttggtcaatacagccagacagtcctgggaccggattatgtggtgccatatctcctggcggttgactttttatctatcgaattgttttactcctgaatctggtggagtatgtgtgaatggttaatacccgaatctcgtgtactttaggttcacaagaaaatattgatgacaagagcacaagattgacgtgtttctgcagtactaaaacttgtttttgggtaaccaggaggagcagcgaagcaaatctttttcggttccctggctatactcgtggagtgcaattgtaaaacacaaccgcaaaccaaacctttgaaacaaccaaaacacacagattccagggcacatcccaccagccaaggacaagtagctgtgcccttcgaaccacatcagaaaactagcaatcccaaacggagcaggacatcaacatatttccagagttgcaaaaaaagcagtatcacatacagcagcgaaatagcgtatggttcaaatgattgttactgctgctgaattgtcttcgtgggtaaccgagtggcgtggttcagctaagtcgctaccttatagttacaacttaggtatgttcaaaactcaaccacatagaacaaaaaacgtccctactacaagcggttcaaaattacttggccccacggccacgggcccttccaccagctttgacgcctttcttctggctcatgtatgcctttcccatcttccctttaccttcagctgaaaatattggtcgtacagtgaagagtaaatgagacacctagtagttaattagggggataaaaaccaagataaaataaattatagttgcatttaacaagcgaggtcaaattcagagtcctcaatcagtaatggcattcacaacatgaaaacatttcattggtccaattgtacagtgtgaagagtaaatgagacgcctagtagttaattagggggaaaaaccaagatacaataaattatagttgcatttaactgtgaggtcaaattcagagtcctcaatcagtaatggcattgacaacatgaaaacatttcaacacaaaacaggagaatgatgtccaaacattaaactaaaatttctataaaatggctgcatgtgcttagaatataaaaaaaccagcacatgaagatatatctataattctatataactagaagacactccagatagaaacaacagagaacatgaagatatatctataattctatttaactagaagacactccagatagaaacaacagagattaaaaaataaaatgttgttgaacccaatgaccaagttaactgttcacaacatgacaagttgaaaatttgaccagtttactattcccttcatccaaaagcttaaaacctattccttttgtcacgaataactcatccgtcatgtgacaaaaccaatgaaccattgacatacatgcagccaataagactattccttttgtcacgaacactaaggtaacccattcgacaaaacaaatgaactatatacataaatacagaccaatagatagcttcacaaacacagtgacttaacacagttaggcttattgaggaaaggcagcagcgtaccacccagagcggaggcctggtccctcctggccaccagaggatcgtcgaaatacccaactgcatgcaaataaacagtatgaggcacaccacaacgaagcaaaggtcatgtaagcaacgaggcacaggtcaggtaagcagtgcaaagaacttaccggagggcatggggtagacgatgaatgcgaaaccggacttagtcccgacgagcgctcctttgcggtagcgcgtgaacttgttctcgaacatgacctcctctgtgtcctcctccttggtggccatggcttccctgcaagtatcaaaaaagaaaaatcaaatcaaatcagtactaaaatgcatgagatccaaatccacgcccaccaaaacgcaatagcatacgagaaatcggcaagcaagagatccaaatccgcaccaaccaaagcaacaaatccgcacgagaaacaaacaaatcggcaagcaagagatccaaatccgcacccaccaaaagcaacaaatccgcacgagaaacagcaaatcggcgagcaaaagactagggagatccaagtcgcgaataccacttaaactcacagggaaacggatctgcaataacgaagaagcggaggccgaggacgagagacacacacagtgaaggcggcggcggcggcggaaggtggagaaatgatgctggtcgttccttttatacctataaaacctgggccggcccaaacctagtgcctcgtcttttgccttatgtttttatgtttgtaagccaaaatttaaattttctatcttaaatttaggccatgtttggttctataaaagttttactgttttcgagcactttttgctataatagatctaaacactagagttgattttagggttctttcatcgtagcttatttttcagcatttgcttttatatcgttaaaaacacgtatgtaaaaaatttatttataaattattttccgtttgcaaatatgccgtcaataagcagaacgatagagtcctaatatagttttgcgttgaataaaaaagaacatgttgcaccaaatattgaaaaaacaaaaaagaaaggaacatggatcaatggatggatagaacaccaaccaatctcgatagtacccgtaatatatcatttgatctctaatctaacaaagtctcgtgatcaaataacatatcatttgatcagagacgactttgtaagattggagtggaggcgcgaacgaggtccggcgccgccgcgcagatcgatgacgccggcggacggtggacgactgcggcggacgaatgaatcgagacaacttctcttctccatgatggatcgtggatgaatggatggacggactgaccgagtatatatagagccttcaatttggtgccttgtatatcgggtccccgtaacggaaattgaccatttaattcattctatttatttcaattcggtgccttatatattgggtcccagtaacggaaattgaccatttaattcattctatttattcgtatgccaaatcaaatcttcactaactaatttctttccttgtttcccagtaacggagtagtattgttattaaaacaccgcaatcagcgccacccaatcacaattaacaacacctacttataaggagtaccatagttgggctaacggcttggcccatggcccgtgtacgtacgcttagtacagatctgacaaattcgatatttctggcttagtaagttaaggctgcatttgatcatgcatattagaggttagtttttaggacgtgaaaccaaaaaactcattagcacttaattagttaagtattaataaatttttaaaaagatttattagatttttaaaacaacttctatgtagactttttattttgcaaattacgcaccatttaatattttgaaatatgtgctaacggagaaggagagagctgacgtttgaagttggagaaaagaagcatgcaatggtcattaatacatgtctcttagtcttactattaattaggaaaatatttcttcggtagaaaagacacaagaataggaaaggcaaacatcggttcaacattaactcttattttatataaaatgaaaatatggttgcacgaggatgaaaaaaaaataaaaaatagtaacaaaatatatatttttccatttaatgattacaatctctatatatgatctctaaatagggtgtgtttagttcacgctaaaattggaagtttggttgaaattggaacgatgtgatggaaaagttggaagtttatgtgtgtaggaaagtttatatatgtagaaaaattttgatgtgatggaaaagttgaaagtttaaagaaaaagtttggaactaaacaaggccataatcttgttcttatctctactttccaactcacctacctcgttttctgcgcgcaggctttgcaaactgctaaaggtgtgtgtgtgtatatataaaagttactataaaaatcatattaaccctttttcaaatttattttagctaatacttaattaatcatgcattaaacgctgcttcgctttgcgtgctagggacgatcacacccttaaacatgccctaatagcattcaacgaaataaaaaacttccttaaattttatcagtaatgcagtatatttttggccatgtatgtacaacaataacaataacaataatatgcctatatacggccggcacagctacgtacatactcccctcattttaaattaaaccaacctagaaaatgatttagtctgtgtattttaggttgatttattttaatattgaggaaatatgataagtagtactcccatattagggccgtgtttagttctttttcaattttttttaaagtatacggatatacatttgaattattaaacataggctaataacaaaacaacttacagattccgcatgtaaacggcgagacgaatctattaagcctaattaatccatcattagcaaatatttactgtagcaccacattgtcaaatcataacgtaattaggctcaaaagattcgtctcgtaatttacatgcaaactgtgcaattggttttttcgtctacatttaatgctccatgcatatgtccaaacatttgatgtgatagaatttttagaagtttgaagtgaactagtttagtttcacaccaaaattagaagtttgaagaaattgaaacgatgtgattgaaaagttaaaagtttgaagaaaaaagttggaatctaaacaataccctatgtgagtgtgacacatctaatatgcaatcaagatagatcgaaaagacagctacagtcaaaaacaggcaacagggcagtttcttcagtcagatatgatcgacgatggcagatgaccagatgtattgcgagcagaatttagagtgtgtttagttcacattaaaattgaaattttggttaaaattggaacgatgtgacggaaaatttagaaatttatatgtgtagaaaagttttaatatgatggaaaagttgaaagtttgaagaaaaagtttggatctaaactcgaccttagaatgacatcagtatatgaagtgtactacatacctttaccactagtaggctgtgtttagttcagcacaaagtttagattttgtttgaaattggagatgatgtgactgaaaagttacgtgtgtatgacaggttgatgtgatggatgtcacaccctgaagttctcctcccaagcttaaaattaaatttataaatgaccctaagaaaataccggtgcaaatcaagataaaaccctaagaaagtaatacaaataatacccgcgccggtcaccactcccgaaaccgctgccgccgcgccccacctcccccgctttccccgcgcccacgccgcgtcgcctgcgcccactccacatcgccgccccctctccccgcgtctcccggccgcgcctgcgcacgagaggggcgggattcaattttgaatcccctcccatcttctctctctccttccccacgtcgccggcgaaatcggagtatgacttgctgagtacagtggatagtactcagtcttgctctatttttcccccaaccccagagtacgagtatgtgtccgatggtgggttcttcgaggagtaggcttcatccgtgcagtcgaggatgcctatggagtgatgttcccgctgcagtttaagtcaaggcttagctcctgttacctttctttttcccgctgcatttatgtaagacttttataatgtttgtaagacgtggatctgtatgtcaacattgtcgtttgtgtaccccggccggtcctggacgggggttttaatgcatattctgcttggaattctattcgggaatttctgggcgtgacaagttggtatcagagccgaccttgaccgtaggacaagccaaatggaaaacctaagagccctctgaattcttttcattgcataagttctttgcaattggatttgttccaggaaaatttgggatctgttctcgtggttcaagggaaaaaaatcttgtcgctcgtttaagggaggtttgccaaaacaagtcggtctagggttttagtaaaattatttgagatgttttgaccgtcagtcgggattggatgggatttgatgggcgaaatgcattagttcttagctcaggaatatgagttgtaaggtatttatgcttttattgttattataagtatgtatctaatttccccattatcttatcgctatgtaagtccgtcttatttattcgctctcatgcaaaataatctatgcataaaatttcgctcttattcgattctcttatttgagtcctttattgctttatttaatttggatttgagcatgcattgatcctacccctttgtcttctctagatggccgagcacccacccaaccaccgcggagaaggcatggatgacttcgtggcagagttggcacgcatgacactggtggtgggctaccccaacgcgccggagtacacgactgttccaccgctcagtggcgagcttcctcaccgtgtccgcttggaggtccatggttacgtggggacttgcctcgctaacatggtggtcgaggcgtctggagccacagcagatcacgcatgtcaggaggcagcatatctgatgatggccagactgcgggagcgccacaactacatcttccacaacacggtgtaccgtttccaccctcgtcgagccaacgacagtgatgtcagttccttccgtccgacagccggcgagaacgacaccaccttcagtcacgtgcgctgtgatgagggggatggacaggatgcactcggacctgcacaaggcgtccaaggccttgaatgatgggaagctcatgaggatcgtcgctctgaaggacgagatagcgcgcctgaagagggagaatgctcagttgaagggtcttcccgcgccaggaggagtccagatccgcaccacgcctcgcaagtcgacaacggcacccgtgcgcatccagcttgcgcccaggaacccacctccgtcagcagctcccgcagcacctccagttccgcccgcagctccagcagttcctacagctccagcgccagccccagctcctgttcccgtgtcagctccagcatccgctctctccttcgcacctgcatcagccgtcaggggccccgccagtggcaatgggggttggttgcctgctactcccagtggcagtcgcgaccgcagcagcagcagctccagtggcatagagccgggcagcggcgagacttatctgccaggctccaggagtcgctcagaggacctggtgacgagcaggaggacgccttcaacttcaccgaccgcaggagccgttccgagcattaggctcgttttccattagcttatcgactgtctagcttctgcttgttagtttgtgtgtttaggttgcttgcttggggtcagttgacagtcgatatcatgtgcctatgatatggctgtcttaataaggatttttgcttgctgtttaaagtattttaattcagattagaacaattgcagtttaaatttctatataataaagcttagttcctgagtatctgtttttctccgtttccccgtctgctcttcctccagatggtctacaccaggactggcacccgcacgacaggcgagggcagcaacggcgaagaacgcgctgatggtgtgcaccccaacagtgattccggcaatggtccgccaccacttcccgagaatccgacgctagcccaagttatggcacatcagactcagatgatggcagccatgatgcagcagatgcagcagcagcaccagcagatgcaccagaggatgctgcagcacgctgaacagcagcaccggcagtttggtccccctccccctcagtccaagttgccagagtttctacgtgtcaggccacccaccttctccagcaccaccaaccccatggaggcgaatgactggctccatgccatagagaagaagctgaatctcctgcagtgcaatgatcaggagaaggtcgctttcgccacacaccagcttcaaggtcctgcgtcagcttggtgggacaatcacatggccacccgcccgccaggcactgaagtcacttgggcggagttctgtcgtagcttcaggaaggcacaggtgccagacggggtcgtggcacaaaagaagagggaattccgggcgctccatcagggcaataggacagtgacagagtacctccatgagttcaatcgcctcgcgcgatatgcaccggaggatgtccgcactgacgccgagaagcaggaaaagttcatggcaggtctggatgacgagctgaccaaccaactgatatctggggactacgctgattttgaaagactggttgacaaggcaatccgtcaggaggatcagcgcaacaaaatggacaggaagagaaaggcggcacagttccggtccaaccaaggaaaccatcagcgaccgcgtttcactcccggacagcagggtggacctaccaccatgatcgtccgccagcaccgcccgttcaactccagcaacttccaccagggcgctagtggcagtcagaaccaccatggaggtcagcctaaccgcggtgcagctccacgcccaccagtggcaccagcacaatcaggcccgtccgcacaagctaaggagaccgaagccaaacctgggtcctgtttcaactgtggtgagcttggccacttcgccgacaaatgcccgaagcccaggcgtgccgggccaaggtttgtctaggctcgtgtcaaccacgcgtctacagaggaggcgcaagcagcaccagaggtcgtactgggtacgttccctgttaactcaatccctgcaacagtactttttgattctggtgcaacgcattctttcatttcaaagaaatttgtggggatgcatgggttaaggaaagaagagcttagtacaccaatgagggttcataccccaggaaatagttcaacctcagtcaattttagcccttcagtgctaatagaaatccaaagatcaccatttctagccaacctcattcttctcgaatccaaagacctagatgtcattcttgggatggattggctgaccaagtttaagggagtcatcgattgtgcgaatcgcacagtcaccttgaccaacgagaagggagaaaccgtggtgtacaaatcactagtctcaccaaagcaaggggtctccttgaatcagatcgagatggaaatcccagtggtcaccgaggagaagaattcgaggaagttggaagagattcctatagtctgcgagtacccagaagtgtttcccgaagatctcactaccatgccacccaagcgaaagattgaattccggattgatttggcaccgggaaccgcgccaatttacaagagaccgtacaggatggcggccaacgaattagcagaggtcaagaagcaggttgatgagcaactgcagaaagggtacattcgaccgagtacttcaccttggggtgctccggtcatttttgtggagaaaaaggataagacgaaaaggatgtgcgttgattatcgcgcactcaacgaggtcacaatcaagaataaatatcatttaccgcggatcgatgatttgtttgatcaactgaagggagctaaggtgttctctaagatagacctgcgatcaggctaccactagttaaggatccgggaagaggatattccaaagacggctttcaccactcgatacgggctgtatgagtgcacggttatgtctttcggacttaccaacgcacccgcattcttcatgaatctgatgaacaaagtgttcatggaatttctcgacaagtttgttgtggttttcatcgacgacattcttatctattcaaagtctgaagaggaacatgagcagcatcttcgtctggtactcgagaagttgaaggagcaccaattatacgccaagttcagcaagtgtgacttctggttgacagaagtcaaatttctgggtcatgttattacagctcagggtgtggcagttgatccatcgaacgtggagtcagttaccaaatggaccccaccgaagaccgtgtcgcagattcgaagttttcttggacttgctggttattaccgccgattcatcgaaaacttctccaggatcgcccgacccatgactcagttgcttaagaaagatgagaagtttaaatggacagctgagtgcgataagagctttgaggagctcaagaagaaattagtatccgcaccagttttgattctgcccgactagatgaaagacttccaagtctattgcgatgcatcccgccacgggcttgggtgtgttctaatgcaggaaggcagagtggttgcgtatgcctcgcgacagttgcgtccacacgaagggaattatccaacccatgatttggaattggcagcagtggttcatgctttgaagatctgggggcactatctgattggcaaccgctgtgaagtatatacggatcacaagagtctgaaatacatcttcacccaaccggatctaaatctccgacaacgaagatggttggaattaatcaaagactatgatatgagcattcactaccacccggggaaagccaatgtggtggcagacgcattaagcaggaaaagttactgcactgctctatgcatcgagggcatgtgtgaggaattgcggcaggagtttgagcatctcaacgtgggaattgttgaacatgggttcgtagccgctctagaagcacggcctacgctcgtcgatcaagttagagccgctcaaataaatgatccggaaatagcagagctgaaaaagaacatgagagtcggaaaggctcgggatttccttgaggatgagcatggcacaatctggatgggagaaagattgtgtgtacctgacgacaaggaactgaaggatctgatactcaccgaggctcatcagacacagtattccattcacccaggcagcactaaaatgtaccaagacctcaaagaaaagttttggtgggtcagtatgagaagagaaatagctgaattcgtcgcactctgcgatgtttgccagcgagtgaaggcagagcatcaaaggccagcaggtttactccaacctcttcaaattccagaatggaaatgtgaggaaattggaatgaactttataacaggactgccccggacatcattgggtcacgattcaatctgggtagtcgtggattgactcactaaggttgctcactttataccagtgcataccacctatacgggaaagagattggcagagttgtacctggcaaggatcatgtgtttgcatggggtacctaagaagatagtatctgaccgagggagtcagttcacctcaaaattttggcagaaactgcagaaagaattggggacccgtttaaatttcagtaccgcctaccatccgcagacagatggtcagaccgagcgagtcaatcaaatcttggaagatatgttgagagcttgcgctcttgacttcggtggagcttgggacaacagcttgccatatgcggaattctcatacaacaacagttaccaagccagtctacagatggcaccgtttgaagctttatacggccggaagtgccgcacacctctcttctgggatcagacaggcgagcgtcaattgttcgggacagaggtattaacggaagcagaagagaaagtcagaaccatcagggaaaggttgagaattgcccagtctcgacagaagagctacgcggataaccgccgaaggaagctcacttttgaagcaggggattatgtgtatcttcgggttaccccgctccggggagtgcaccgttttcaaaccaaaggcaagttagcaccacgtttcgtgggaccctacaaaatcttggaacgaagggggaagttgcttattagctagaacttccatccaacatgatcggcatccatgacgtgttccacgtgtcccaattaaagaagtgcttaagagtacccgaagaacatgcagattcggagcatattgatatccaggaggacctgacatatgtggagaagccggttcgtatacttgataccagcgaaagaagaaccagaaacaaggtcaccaggttttgccgagttcagtggagtcaccattcagaggaggaagcaacctgggaaagggaagacgagttaaaagccgcccatccgcacctcttcgccagctcctccgaatctcggggccaagattccgtttaaggggggtaggtttgtcacaccctgaagttctcctcccaagcttaaaattgaatttataaatgaccctaagaaaataccggtgcaaatcaagagaaaaccctaagaaagtaatacaaataataatcgaatctggcatgtggaatttttcttgagttctacatgtcgaaattcactaacaagatttttagtggaatttttagagccctagaaataattttaaccaattaaaatggagcatgcaatattttaattccagggaaaatccttttctcctttttctttttctttttcccttccctttccgaatgggccgccggcccattctctcctttttctccccctcctccccgctgggccggcc

SEQ ID NO: 9158 - DNA, 28160 bp, Oryza sativa
  unsure (1)..(28160): unsure at all n locations
atgtctggtcatttctcggtttcaccgagtgaggttgagagtctccttaggggcactgacggcaaagagcacctaaatgagctttctggccaagatgcagtttctgccgaaggtgatgacgaaaaattccaggacacctgtgagcataaactgaaggatgaccttcactggattccatcctttgacaaagggaaaaacctttccctggttgacatggagtttgataaagcattccaagggatgggtttggttggtgaggaaccacttgggttctcatcatctcgttacaatccaattgatgctaacaatgagaagaaaactgaggagccaactgtgcaaaatgtgaaccgtgtcattgattcatccaaggttgttgcatctagtgaacaaaacaaacctgatgattctgaatttccacacgaagcttcatggaagaagcaactcttatcactgtacaagaatgtgaggaaaagcaacaaattctggcccatcgttgttgctactgctttggtgggagtcacatgtttttggaggcgctggcagaagggcaagttgcagcatcagccggtcaaattgtatcccagcagcaatgaggtaattgtgaatgaacatctttgtttttaagaaaaaaaatgccttcctttttttcttttacaaaacgtgagggattttcctatggtcaacaagtaggtcggtaggaatgtaaggacggacttgaccagtagcagacatctttagttagaatcaaaccatatgcatcctcttgcaggacaggggcaggcctagatatttgatcgggaagtatgctgtggttttccccccgaccaatatgaaggtttctattatcacaaggatgtcttatagcacatactgtaatatccctttacaccttaagggcttgtttgggtaggccgaaatcatggtcaacacatgtggatcctgtatttgaggcccatccaaacaaatgctgttctgataagtatcttaggttgtaatgctaagtgagaaacacatggtgagggacaccttttttcaagtaactagaggattcccctcgcattgcagcgtaagccagaaagtcttcatagtatattacatttgaagggagcaagtaactgaaggcatgaatgatggttgagattaaactcaaagagagatccagtggcctatgttttttaggtgatgtggctcaatgcattttgagcatttggtgctaattatataggaatacaggatataagataagattgtttattttggcctccatggtttgctgaaatccagcatgtttgatgcttgttgcggcaattctgattttactggttatgaagtggttgctatcagctgagttctaattaacgcaggcttctgttggcttttcagaaaattaaccaagctgtaggaccgttgaatcgcatcaaggacatccttgttgccaacaatcacccagctccagctatccatggacatgctcgattgagctgattatgctcaccaagtcccgccaacatgctcagtttatgagacatctcctgaatatgtacccacttgagtcatcatcatcagtgaagaatgaatgcactggggcatcatctactcaatactgaaaatcgtctgggtgtttatgcgttgaagttatgtaattgattcaaacccccccttggatttgtatttatgtgtttagtgtgattcatcttcttcctcttttgagagtactgctcctggtttgtcaattgcagtgccctttcaggttgctgcagaaaacttgtatatatatatatatatatgatcatttaggttgatgatgtttttggtctgtctgtgttgtgtgatcctgcttatattgtcaacacttacgtttgatttcccaagaacagtttagcagaagctgtaactcgatgagtcaggctttcagataccaaagctttgattacatcacatattgtagtattgtctgaagccactactgggtctctttttaaaactgtgctatattccattttgtattactagcatatcatgaataaatacataattaccccacttttacattgaagaagacaaaacaactccatttgaggaatgtgttgggtacccattggctgacagtatggaaattattccttgtctgttagtattagcatagaataatcttgccccaatcgtggtggctggctggccgaaataagaattgctgcaatggatttaagaagattgtttcaatcatgttcctatcctaaccacatggacgcgtttttgcagtgttaaactgaccaagcttgcaggcttctttagaggataataatagtacaaaatgatggcaattatatatataatacttaggaggagagtgagacaccttgattaacaccacacttaacactttagaagtagccaaaaaccagagtttggagatagccccagcacatgtgggtgttggtgtcatccccagatgattctgatggggacaaccaaccaaaccccaaaccttgcaagaaaaaaggattatgatgctaacaactgacagcaaccaaggtgtcaccctaaagcattagctggatttttctcatcttccaattatcactgcatggttgttacacctgcaacacagcatctcatcttcttctttttgtgtgtgtgtgtgtgtttctagaacaacaaattacagtggtcactcacagtgactgcaatcagcacctactttttcttggacatactattacttatcatccttttttcctatccttttttttcagtagacaagaagtatgcatcaacgatgttatgttcttttccagtgcgatgaccaagtctacgttgaaacaaatggacttctatgctgaaatacaatgcaggtggcaatcaacttattcacagtaataagggaaatacataaattaaagagaaaaaaatgttactatcaagttgattagacagatacacagttcttaaataaaccaactagtatttcattaaacagccgcttgcattggaatctggctaatcacttcatcagtacccagtcctatcgttaagcaaccaggccatcatttttaattatttttttctcctccaataacaacaaacaaaacgagccctctctctctcaaaaaaaagagacaaaaaaatacagataaacaaaaggagagcccgtcgtgtacgtcgttagaacagaaccaaaaaaatacgagaagaccactccactaaaactctctctcatctgactccccccatgaaaagcaatcgcttttgtttgtatctaccaaaatttgtttgaactcgtcaaacagttgacttaaagacttgagttacgcacgcgtgagaaaaccttcacggaactctgcaaacacaaatatacgaatttcacattcgtacgacttgaatggaatttttacggaattccagattttgaattttgaagtttggcgttgaaaagattattacagtagaatacaataataatttctccgtatgcgtcgcgtacgaatggttatacggtggagtttggtcaataaagaaagcaacggaatggaagctgtgcgtgatgatttcacgagcaaaagttgaagaaaaaaaaaagagagagaaaaatgtttttgtttgtttttccaatgggaaaaaaaggtaggtgggccccacccatctccagctgcacgagggggcgtgcagtcgccggctacctcagaagccctacccgcctcgccgtagtgcgaatgacaggtgggcccgggaaccgcccgagcgcacggatagcgcgtacgatgtggggtgcgtgcgattattattatcggctgcctccacacgcacacgtgggatagtgccaccgggccctctccctgaccaaaatgccctcgcgaactccttccattttacgatactgccacctgaggtcaacaaccaaatccattttcctcccattatattctcgtttcacagcggtgacacacggagaaaaaaaccaatattaatttcggtaaaatacgaaatgactaatatgcccatgccctaatccccttccgtgtcttgtgcttctctcttccccggcagcgcgtccatcgaagtagtagcatactactctctactcctctcctctcctctcctccgctttggtttgctccgatctgcagcgagagcgggaggtcgtcgccggcgaggaggcgcggcggaggaatcctctccttcccgatcccgtccggtgcttcctcttcttggtctgcgagtaaagctcggccgccgccggcgacgaactggtttggggagagccacgtacggcgccgcctcgaatcgaatcgaattggaggtatcattccttctcgtagaggcacctcctccaccgcgtgtggcttgatgagcgggcgtggcgtggattgggaatccatcggtgtttgtttggtcgattgattgattgatttattttttttccttccattaaaccatcgtttattcgggatttgttcatgcgtagtggtagtggagttgtaatagcagtttgtttttttttcgaagaagaaaaaagaaaagaaaagagggaatccccgtgcctcacgttacgtggcttggaattttctttttttgatgatccattcattactggatgatttttttctcgattaaaacgtttattaatcttgcaggttgatttgactcgttggttggagcgctccatcgattaagcagacggagtcatgcttcttctttgggtataaaagtttggatctcggaggctcgattcaatctctggagtgggaacaatcgtttgctcgtggtcgtgggatagctcctctgcgagatgcagagtgggagcgagatgagacccgtgcacaacagtgtcgacacggtgaacgcggctgctgttgccattgttacagccgagagccgcacgcaacctcaggcagagccggttcgtgcctcactccctgcttccatgattttttttttcatgtatgatatcttcgttgcgtgattcagctgggtcatttaggtagcttacttcgatgatattgttgtgacggcgttcttggttgcttggtggtgggagcattactcggttgttttttagttaaggttgctgtatttagtaggcaaaattgaagaactgataggcaaggtacgttttgtagtcttagatgtggttttacgctagagtgttgatgtattggacagtaaacttgcatttttagggagaaactgcgtaagtggatctatgagtgcaaattttctttgcttattcatcacttgttgacttgcaactaatttcttgtccaccgtctttaacttttacaatatatcagaaatttttagcacttcaaatcgaaaatataacataaatgctgccaggattagttcctgctgtatatttttctagctattgcaatctatgattcatttatccccggtatatattaccatgtttgaccttgaatgaaacctatgtatcaccttaaaacattgaaaatatgcatggataaattaccattataaatactgtgagaacaaaggaggggaattgttgaaactgtcagtttgaactcttcagaggaatagatgggaccaaaagattcttcctgtgctggccatatgcaagtatgcaaccagccattattttattttaacttgctgaggccttggtcattcttgttttttttattacatggcctgctgtttgggctttcatctttgtatattattaatttccctctgagattacctctcatagggaaatgcagcactatggtgctcattcatgatagccactctccaggctatttagttcgggttatctcgtggctatgatcatttatgaaaccttcttaatgcttttattttgaactggaaagtcattacctggctaatgggggatctatgacgtaattttgatgatttgtggaatttcatttctagtttttcgttacggttacatggagcctaatagctcgatgatgctatatttctattgccaacctgtttacatgttcacgttattggtcatcctaactctgcaatacaatcgctatagaatgcatgtctgacaaaagctaggtgcaggctactgtactcgactgtgcttatgctgtttatgtgccaaatatttatgctacaatagtaatcttcttaagtcacatttcaggaggattaagactttccttttgaattaaatagtgttgttcttttgcagcgaagaaaatgggctgattggttgagtgtgtacttctgctttggatcacagaaaaatggccgacgcatcagccatgctgttcttgtcccagaacctttacctccgaggacagatgcacctatgccagaaattccaatccatccgccacccccggtattcccctttgtcgcacctccatcctctcctgcttcttttctccaatcaggaggtgcatctattgtacaatcacctgttggtgctccatctttttcgcctctctcgccaaattctccatcccccactgggccaccgtccatctttgctatcggaccatatgcacatgagacacagctagtctctcctcctgtcttctcagccttcacaactgaaccttcaacagctcctttcactcccccaccagagtctgtgcatctgacaaccccttcctcaccagaggtgccatatgcaaagctacttacctcaatcaacaacagcaaaaatgctgaaacaggtgagcttcagtcataccagatttaccctgagagcccaataggacgtctgatatctccaagctcagcttgttcagggacttgctctccatttcctgaccctgaggtgcagacttcctcacgttccacattcccctcattcccagttcgtgagcctccaaagatactggatggcgagggaattgcaacacagaagttgatacctcgccatatgcgcaatggcggttctctcttggatggacatatttctgctgctgtaccagtcgtagacttctctgcccgacttcaaaataatgatcatgctatggatcatcgggtttcatttgagttaacagtagaagatgtagctcgctgtcttgagaagaaaaccaacattaatggggagtctgctgcagcttcttttcgccttgtgcccaccggtaacggagatcacattcatcccagagaatcgaatgatacaagagcagggctatgtgttgatgaaacataccatgatctgcctgagaaagcacggcgctccttgtcccttcgtaaggctaaagaattcaagttcaacaatgttgatgctcctagtgtggagccgagcgttggatcagactggtgggcaaacgagaaagttgctgggatcacatcagagccaaggaaaagctggtccttcttcccagtggcacagccaggggtcagctaacagttgcactgaccataatcttacaagatgaagaaataagcttctgtcatttttgctcctgctgtttctcagttccccagataccatcatcataactgcaggagatgcaaacttatgcaaaatattccagttttagcggtaagttggagttagttagtaactcagtgtccagctaatatcatcataagatactaaaggtgatgcagattctggaacctgttgttataaaaccataatacttccatggtgtagcgtctgttgtatcctccttaactgactggctgttctgatactgatgctgtttatgtacataataaactagcgaaaagagtagaactcttcctagcagcagtgtattgtcagagtggagcaagcaaatgactctgatcccctcttcaattagttgtgctttggctttagcagaagaaacttgaaaatattgttctgtcgtgcttaccagttcggcaagaatttcaattctgtcttggcatatgtgatgtcacatctcttatcacaaattctgtaagcaacactattttgttgtgctctgtatattaaattgggccaagtgctgactgtttatatttgaatgtttgattacccatggtcattctgaaatgagaattattctacccttaacttaatcacgtcatttttttcataattaatggtgtatgaggattgttctgttgtagttgctgagcctggataggaacaaaagagctggaaaaaaaatcaatcagagctcttacgttgtgctggctagaactctggacgaaattcattgatggcccgccagagattacatcaagatcacgagacgttgatcgtgcacatagagaaacccgacgagcaataattatcactgatatgtcaagatttaatgaccccaatgcttgtcaagagacgcatcgctaacgaaaatattttcccatgcattctcgcaagagatgagcatatgcgtatctatcaatcttgtgttgcttctcataattatccacgaaataaaactatcagtacgattggaattatatagcttggatgaaataatgtcaatccaggagagcttgaactaaacagaacagagggtgttcctgatatttgtttttgtttgggtcaaaatcaatctacgtccaattgaaaccgatgaaaacgaaacacaaaacagcaaatatcatagtactgttcctattaaaaatggaaacaagaaaaatgcagcttgagtcaaaatccgcattaagcacggagataaacttaattaagcatgggtgattaatggaacagaaagatttgaggccatagctgagggagagagagagagagagagagagagagacaatgccacaatggtgaggataacgttgatctatcaccaaacccccttgtggcccctttctctcacctcacaaatcaataatttaggcctctcttcgccgccgccgtctcaccgccggtgagcttaagctgaccacgattgcccggcctctgtccctgtcaatgggccccgctgcgtggttaatattctccctgatcaatcattgcctgcccatatcaaacatgctcactaattaaattgtgagagggcgaagcagaagtgatcaacttccaaacttgtggtaaccaatcagtaacaggaactgtcgtcacaggttatactaccatagcaccatatcttttatttctctataacctatatgagatgcaatcgtatataatcattatcgacccatctggttatagataaatgctagttttgactttgagttgttctacttcgaacaatattttttttaataatttaactatttagcattaaaattatgccattagatttgtaaccagaaatagtttactagtactatcttacatttaaatatattcgctttgatatcacttagaagcaactgttgaaattcatctactatatttgtttttttaatacataacgttattaacttttgaaataatgtttgatcattcgcattatttaaaaatttactcctttcattttatattgtaagtcgttttggctttttcctagtcaaactcgtttaagtttgactaaatttttggaaaatctaaaataccgaattggttttatttaatctagcattgaatatattttgataatatgctattataattttctatatactcggtcaaactcaaataaagttgactaaaaaaaagttaaaacgacttacaatatgaaacgaacggaataatatagatatgttaagatataagttatacttaaagtttatttaaagataaaacaagtcatatcaaaataaatcatatttatatatattataaatggacataggaagtacaatacttgtgttgagatccgtcaattatttattaacagagaaagtataatgcctttatattagagtataaataaaatgcccctaagtgtgaatttagtgatataatattcacgtagacaatttagctgagtttgttatattggtgaacaagctgatgaagaggcatgaggtaataattcatctgaatatgttactagtagtagttagtgatattttaagactcagcagagggtgagaaacgttccacccatgcatctctttgcctgtcaattagtgacaataatagtatacaaaaatcagctgatatgaaagcaacattcttacatgtggcggtgaatcatcgttaccaagtaaaaaaaactctgtggtaataacatgatcgtattgtcaagtttccaggagaaattctcaaatataaacccagaaatcaaacattttattccttgtgcagctaggatccaatagagacatgtctgtagtaatcatgttcatgtaaacaaatgaggtgagcagaccgcagcgagtgagctcacatgcgccaaccatttttctgcacatgaaaatacaagaatgtttttttcttttttctttgggtgtacacatcatcctcatcaatgagtagagagaagagtagagggtagtagagagccaaaaaaaatcgatcatggagaggccatgtggagctcgccaagtgtgagcatttaccttcttggaaagaatcccaagctagaaatccacagaattatctgctctcaaacattggctcatctgctcaacaatcctatcctcctcctcctcctcactggcagtgattcccccaaccccatttctctctgaattgggcttgtttctttgctgaattattattttgctcattccactctggttgcttgttcagagactccatgtacaattagttgaccattcttctagttagcttctcttgtgttcttggagttggagctggtctgtccatgtgagccatgttgcagattgggctagctttgggagcaagagagtggtagatcttcttcttgccagatttattgtagatacaatacaatcccatttcttgttcagatttcttggtgaaaattcctagctagatccatactttctccagtgtagtgtgtagagaagaagaggccttgtgaatcttatcttgggaaaaagaggtatatccatccacccatctgtgtgctgttcttgattggcggcaatggcgatggagccgacggtgaaggtggcgctggggacggcggcgttcgggatcttctgggtgctggcggtgttcccggcggtgccattcctgccgatcgggaggacggcggggtcgctgctgggcgcgatgctgatggtgctgttcggcgtgatgtccgccgacgaggcgtacgccgccgtggacctccccatcctcggcctcctgttcggcaccatggtggtgagcgtctacctggagcgcgccgacatgttcaagcacctcgggaggctgctgtcatggcggagccagggcggcaaggacctgctcgtccgcacctgcgtcgtggcggcgctcgcgtcggcgctcttcaccaacgacacctgctgcgtcgtgctcaccgagttcatcctcaagatcgcgcggcagaacaacctcccgcccaagccgttcctcctggcgctcgcgtccagcgccaacatcggctccgccgcgacgcccatcggcaacccgcagaacctggtcatcgccgtccagagcggcatctccttcggccagttcgtgttcggcatcctcccggccaccctcgtcggcgccgtcgtcaacgccgccatcctgctctgcctctactggcgccacctctccgacgagaagtgcgtcgaggtcgtcgccccggtccccaccgacgtcgtcgaagaggaggacgtcacctcccaccgcttctcgccggcgaccatgtcacacccccgttcctcctcccaccaccaccaccaccagcagcctggcagctcgctgtcgtcgcctgactgcgaggtgttcgagccagtgaagcccgtccctgtcaccagcaatggcgactccaacaacaagccggacgccgccgacgccgccgtcgtcgtcgggatccaccagaggcgcgcggcgtcggcggcggcgtgaggatgaaggaggaacatgcgttccggtgggtggaggagaaggaggaggccatggagcaatggaagagcacggtgtggaagacgggtgtgtacgtcatcacattgagcatgctggtggcgctgctgttgggtctcaacatgtcatggagcgccatcaccgccgcactcgccctcatcgtcctcgacttcaaggatgcccgcccctgcctcgagaaggtaattctgaattcctgatgctgaattgatgtcaaaaacgaaatttcactgaattctgatgctgaattgatgtgaaaaacgaaatttctctgaattctgatgctgaattgatgtgaaaaacgaaatttcggtacattttcagttgtttatggactgctactagtatgttcattcttgctcttattttggaaaccaatgtgttgtcgctctcactcgctctgaattctggagctgaattgacgcaggttgtatgaaaaaagaaattttggcaccttttttttccttgggtgaatttgtttacaggcaatccaatcacttcgattggtattctctgcgaaacagaagtcattactttggtatttgataatccaatcatactgaactacactaaatttgttttcagtatacaatccaatcatgtagcactatgttcttattacttctgtttttttcacatagcagtagattgccattcattttgaaacaagagtctttacttgataatccaaacatatcgaactacactgattactttgtcaagttccttgtcaccttgatgatagtactttggtcttgattttcgataacatttggttctgtcacatccctgtgttgttgctaaattgaagtaattgtgtgcaccaatggctctgctgttgtatttagtgttggttttggatacctaactgatgttaacttgagttgttaactgtagttttgctgaatgaaatttcaggtttcctatccacttctactcttcttctgtgggatgttcatcactgtggatggattcaacaagacgggcattcctagcgcattctgggaattcatggagccctatgcacggatcgatacaccgaccgggatagtaatcctcgccctggttattcttctcctctcaaatgtggcgtcaaatgttccaactggttagttctgccctctgttcatggtcaataatttcacatggcacatgtagaaattttcatccttgttgttactaatccatccagattttaaacaataactaagtcaaggaagcagcgtagacttaacgatacatgtgcttcgcactttccatgctatgcttgtcaagagtagaaaggaaagctgcttctttttttaatggaagctcacaatgccatatgtgccatggttgtctagcaatgaagcaacatatgagaggaaaagtttatctgtcatcctgcactttgcgcaattctcgcttccaaaaaaaaccagaaaatctccactaggttcactcacctactcatgatagttaatagaacaagatatcaaagaacaataggttcattttggagtctgaatttggggctggttctaaacaaagtgtgaatgtcatagctgataaccatgaagttcttatcagttaaagattgctctgtcctagtttcttccagtgaccagaaaaaaatcgtacaaaaatcagttgggcattctttcttttgatttcctgattcatgtatatacctgacaaatctcattgcagttctcctgcttggtgctcgggtggcagcgtcagcagcggccatctcccctgcagcagagaccaatgcctggctcatcctggcctgggtcagcacggtggccggcaacctctccctccttggctccgccgcgaacttgatcgtttgcgagcaagctcgcaggtcggagcagtacggatacaccctctccttcttcagccacctccagttcggcttcccggcgacgctcatcgtcaccgggattggcctactgctcatcagaagcaactgaaaaatggtacagaacatatatatgaagaagacatggatatcaggacatgtacaaaaagaatgtgaattttcaggtcaggtcgattgtatttctgcaaagattcaattgtgggataaaagaaaaatgtctatctttgcctcggaattaagcacggatatcatggtgcttggaggctttttgagctgtacatttgttagttcatattggggggagaagatgtatatgttgcagtagcaaggatcataaaagggaaatgtatatttttgttcagcattctacttgtaatccatatatattttttgaagtcgaataatttgtataggcaggagaagagaaaatcaatgaaatgcatgcccctatcgatgcagctaatgtgtcttattgcgatttactccctccatccaaaattctcatacacatttcatctttttttttttccaaataagatgctcgtatttgcatttcattcaaggatctgaaagattgatacgttcctctcctctgcgatccgacccggaccgttggaccgttagtgttccatcgaacagccagtaaagccaaaaatgcttatagtttgggatggagggagtattttctatcaatcgcagcggtctaatttcctattggggtaaacaataatatggaacaaatgcaaatattagagaaaaacctaatactcccaacgtcacagaatataacaactctcatcctaggacaatgtatctggacatgacattctatcctaagacaatgtatttggacatgagatatgtctagatacattgttctaggatgggtctcgtcctatcttaggttgctacattttgaggcagaggtagtatcaaataaatagaatgtctgagatttcgaacccatgaacccaaactgactagtacaccactgtcgagggaagatcctcaatagcggggagtcgtgagaccccccatttgtgagttcggccgggggcggaggctcgtctctcggaaatcactcgctcgtccctaagattaccggcaagcttgcacgcaatcggattatacaggttcgggccgctatggagcgtaacaccctactcctgtgtttgcgattatggatgagttttacaaaggtttcttcactctaaaaagcgcgctcactttctctcttctggagttcaggttttctgggcatcgtccccttatctcagtgggcagggtcctccttttatagctcaaggggataccacatgcaccgcctctacctaccctctatcggagggggatcccactccactttgggcttcaaaccgtgccttctcccggaagctaagcaataaccggttctcgagtggaacccggcgccgccccccgcctgacacgggggacagccctgtcatttcctcataaatgaacgatgacttgcgatagcccttcctcgagtgacgctcggatgtgacgggtcatacccacccccactccgccgggtacaagggcgacgtgaggacatggttgccctatccatcggatatgacggtcacagaccggtcatatccgttggacagaggttagctaggcgcgccgcacgtctgcccttaccgcattaaatgcggtgagggacagttggggcgtcgcacatttatggctgttcagcctgtgctcccttctcgctctctccctccgccgcgtggcagccgggtgagggcctcggggcgaagccgtgggagagcccgagggggtgacgtcatgccccgagccccccccggccgcttccacgactcgtgtgacgcgtgagtggggccagcctgcagagtcacgtggccggagggaaagtaattcccctctacttcatataccccctgtcgacgggtgatacccgtagactggatatagagggtattggggtacgttggaacaaggatctacgtagtacgacatcaagcaaacaaaagataagaattatactggttcaggccccttgataggtaatagccctaatccagttgatgtgagattatatgatagaaaacacaggttacaaagagaacaagggaacttgtcggatccggcgagattgtagtcgagttgattcgactagctctcgatgacttggctccttataagctccggcttcgtaggctgtggaggttgtgttagctctgagattcgatgcctaaaccctccccggggggccccttttatatcgcagatgtggaggtctcctcatagaactcggaggtatcagaccttatacgatacgccaacgacccagtcctgcccgagtaggattcttcccatctgtagattccgtgaaaggtttccttagaatatacaggaaatatccgcatgcgcgtgggtatgccatatcgatatgtaacgtatatcgaagggtaaagggtatgcctaacccgtaaccctgacacccccaggcccatatctccgacaaccacctcgtaaagttaggcggaagactcctagacgtttcttgtaatacgggacaaacgatggggttttaagaaaagtgttgcttgctacattgtagttgaagaagagaacgggcgagggatttcggttgcttttaggaggaggaggataaccctttggatcgagacgaaggtgtcagtggccggccaacatcctcatcgacggcttcgcccgccacctcctgaggctccccagtggcgaggacaagctcgtccttaccctagctccccgctttgttgccgggcacaattacaattgctcgcctaggctccgccacgcctcgctgcggtcgacctcaccgctcttttccccagccatagccacaagcatctcaaacccgtgtcgtgaggttgaaactatactgagattgaaaggctgacttgttgggcccacgcttccatccacgttagcaagccatggtggcatgtcacgttgacataagtggcaaatagttaataaatcatcttttctcatgtgtaataaaaaagtaaaaataaatctaaaaaaaggggtatttaaatagttcgccaaacctatcagtgacaaataattaaatacttaaattcctcctttagttggaccaatttatcggtaaataaataagtaataaaaaaagaaatcttatcttagcttccaaaatcattgcgcctcgactcgagtttctctcccccgccgccttccgctcgtcgcgcatctggcgagcagagcaggggagggggcgccgccgccgccgccgtccttgtgcatcctcatcccggtgagcatccgcatcctctctctctcattctcattcatctctctctccctcccagtctcacccacacttttgtctcgaatttgcttgctcgcgttaaccctagcttctcttctagatctggaagaagcttttttctcttaatttcatcagagctttaatctccttttaatataagtaacagtttgttttttgcccccaaaggttttgggggtggttctgtcccaggttggatccgcgccccctggctgtcaccgtaatctttcagggttttcgcgaggatgtcgtggtgcacgattgagtctgatcccggtgagttttagtttatatctctttgtctatatcattagttgcatgttgttcatgggaggtttactggatgctagccaatgtattgtgtttattcattagtaggaaggatggttgttgcctttggttttccatcgattgagcactgtggggaatatatattacctagttttttttttttactttgttactagtatctgtaagccgagggttactttctagtagtaattttgatgtgtaaagtctttactccattagttcatctgactaatatccacttggggtccttcggtatgtgtataatcatggatgaagtaccaaaatactgtgatctcaccttacacatttcattgcgaatgattgagtgaaaataaagctttgatcatgctatcctgagtacatcacagattatcgcagtgcttatttttacgtttcaagtgttcttaccattgcctttccaaaatatacctgttgtttcacctgagtatatgacctgtaggtgttttcaccgaattgatccaggagatgcaagtaaaaggtgttcaggttagcttccagggcctgtttctttcctaccatgaaaaattgttagaaacgaaatctatatcaagtgttcttgatatgtccttaggcttttaattattacttgtaaaacagtgtaaattggatggttggctctattggttgattctactgtttctagaatacatgtttaactgatcttctgaagatatatgctttgcttgtgttgtgaagctaaccttaacctgattgaactcactttaagtaactaccacactatatatctctatgatcagcagagtgtatgctaaacaacgcttatgggaaaacatattgctgcatataccatggagctgtgtgcttgaatgtaataaacaatacccttgtgaaggatatggagtaggacaatacctgtttggtagtaataatttctgaagggaatatggtggccaactagtaagggttaacgaatatacatcacagatcagtgcgatatgtctattaatattgttagctcagctacaaaaggaaaagacctttattttggcgttgtatatacttgcaaatctaatatacttccacttttggtgccctgtccttttatagttagtggtaggaaattctagaaaattgcaacagatggccatggacctggcattgtcagaaaaaaaggccgtcatttagcttcagtttatgactttattaaataactcttagctgccttttacattgctattgtatctttaaacaggtggaagaactttactctcttgatgtggactctattagtgaactgcggtgagtctcttcaattttttgttgtcatgcgtctctgttctctggatggccttaacacattgttgtccacttctcataggccagtttatgggctaatttttctcttcaagtggatggctggggaaaaggatgaacggcctgtcgtcaaagatccaaacccaaaccttttctttgctagccaggttagttccattttgctccgttagctacctctgttcagaattggatttaacatttgatctaactaaatcaatcactgccaggtcatccctaatgcatgtgctactcaagctattctgtcaatcctcatgaatcgcccagaaattgacataggtccagaactatccaacttgaaggaattcacaggagcttttgcacctgacatgaagggccttgctattaacaacagtgattctattcgcacagcccataacagttttgccaggcctgagccatttgtctcagatgagcaaagagctgcgggtaaggatgatgaagtgtaccatttcataagctatttaccttttgaaggagtcctctatgagcttgatggattgaaggaaggacccataagccttgggcagtgttctggtgggcctgatgatcttgattggctaaggatggtgcagccagttatacaaaaaagaattgaacgctattcccagagcgagattaggtttaaccttatggccatcattaagaataggaaggatgtatatactgctgagctgaaggagctggagaagagaagggaccagcttttgcaggagatgaatgagtcctcagcagcagagtccttaaacagcgaacttgcagaggtgacatcagccattgagactgtcagcgagaagattatcatggaagaagagaagttcaagaagtggaggacggagaacatcaggaggaagcacaactacattccctttctattcaactttctcaagatgctggcggaaaagaagcagctaaagccattggttgagaaggccaaacaacagaaggcttccagcacaagcacgagtgcaagatgaagccaagtgccaccaatggctgtaccgaattcgttggttctcattttgaggaaagcatacgttcatgggttactggggttagttgttgcattttccctttttgagaatgcgttatgctatcagatacggcaccttgttggcagcttagagatatcactaagttaatgaaccagagtacattctctttaatctttttctccgtgttgtattattatctgttatgactttctgcccttgtgtgatggatagaaactgtagaagaggtcaattgggtcttaagggtggtggcattgtttatttcgcgtcgtggcaatcgaatagaaaaatacatgttggaggatggaagttttgtgtctagatgctgtcttggaaatgcccacttgctaatcttacttgaattagatagatgctgtgagtgtatccatgaccatgagagagctggagcctagtgctggtagagttgactttcctgagtgaaatcgcttgcttgggttggcttgtagatataagtataagaaaacggataagaaaattcaggcaatgaatctgatgcgcatgtgattgattctggtgggatttctataggacatctgattttctgttgaacagttaacgcaaacgacaggtttgaatgatacagtattcgaacttgttttttttttctcttgtcatcaagattcataattgttggagcatgaatgatctggtgtgcaacctcttaagctctatagctaggacgttgctgtcatctctgttgttgcaccagctaaaggacgaattgtgaccaaaacccgaattgtgaccaaaacctttgggactttcagagtgatctttctgtcgcacttgcacacactcttttgtcattcagagtggttattatccacccattttgaaacaggatttcaagaaattaggggacaaaaagaaattatacacattggatttgaagaaatttagagctggtgtcgtactcctattttattttggtctattatcccatacttatgcagatcagctggatggattgcatcgtcagatattcttacaaaacaaacttgctcaaaccaagaccagattagattagattttgttgtgaatacaaagtcaagcaacaacaaaaaaaaaagagattgagaaagagtggcgagttgcgacgtgaccaatggaaactcgaaaaacagaaaagcgaaggataataaaaactcataaaaaggggaggagggagaaagaagcgagaggcgcatttgttgtcgttgttgttggttccatgccgtaggcccatcgcgatctactagtgtttttttgcctctctcccccntnnangcntnnannnnnannnnnacccccaccactcccccccccctccgcttccgccctccgccgccgccgccatggaagccccgggctcccctaacgcctcctcgccggagtccgcccccaagcgcgccccccgctcctcgcccccgcccccgcagcagcaggcctcctccgaaggtaacccgctcgcgcctcccatccccccatctcactctcgatatcgatctctctcaacgtggtgcgcgcgtacgtgcgccctcgcgcgcggtttggtctggatccgcgagatccaggcctccgtgttccgctctgagatcgagatctgcaaccacgggcggcaaatatggtggtcacatggataacactaggccgctgctgatttgggcgtgttctgcgtttgtgtgcgcttgtgcaatggagaggggagatgcaacgatcagttgtttcagtggtagttgatttcatgttcatcttgtccgctggggtgatttggcaccggttgatgttgacgatgagttcatccgatgcgtttctgtgtatgcatcacaagtttattaacatgtccaagcgcggttagtaacagctgcatgtgtgatcatatacaatgagcttacacataagagttgcaatttgatgagtaccatcatttaattgtagagttgagttgaccacatgagacgtataccgatatgcatcgctatctgtactcttactagcgatgacttgctggatgatgccgtggttgggtctgtcactctgttgatgttcagggttttctacttttcgcagtggaaccgacacgtagatataataagtattctaggaattcaaccctacatcttgattgtctatcccacagtagtctgaacacacccagccatttacttaacattgtgataactgatattggatgttgtttcactttgttggttgttggcctgtaaatatattttttcggggaaattgcaattggggaacaagaggatgcttacaggaaatgcgaagtcatgcacactctatttagcaagcacatctcacctttctggcatatgccaatcattaatcttgtccattatggtttcctcgggtctttggttgacacacttattgcctttaaagtgttatcattatatgttggttgttctaatggttcattagttacatcaaaatataagaaatataaagttctcctgatccaccttgagtggaaaggtatttaactcagtcctgtcaattgctgctttcactctgttcgtagcatattcctaccattatgcttgttgctaattcatgttttttaacttgttatatgttcaaggagaatatgatagaccatgccaaaatataattcggtcataatgtgaatgaccctcttgttattgttcccaacaagcatacatgacacaactgtatataccaaacttctaaactacactgactggaaaccaaaattcagtcagtagtggttctacagaacatgtatagttaagtgccccagttggaccattagctgtttttactatgcatcatggaccacttttgttgcttgagttaaaaaaaacaattttgtgcctaaacaaataatggcatgcacagtttttggccctctcctttattgctagtaattctgaatttccaagtgatcattctccacagatgacaaggagaagccaacccatctgaggtttctggtatcaaacacggcagcaggatgcattattggcaagggtggatcaaccattaatgaatttcagtcccagtctggggctcgtattcagctatcgcgtagccatgagttcttccctggtacaaatgacagaattatcatggtttctggtctgtttgatgaagtaataaaggccatggagctgattctcgagaagcttttagctgaggtaaactattttattccgcaaatagttgtatcatagggccatgttactttatttgatgattggtattctatggttactttcccagggggaagaaagcaatgaagctgaagctagacctaaagttagacttgtagttcctaacagttcttgtggtggaatcattggtaaaggagggtcaacaatcaagtatgtaccattgataaatttgtttctggtttctgaaatcttatttttattcttattcccattgcgcttcttcattttcttagttggttataatgtatgtataccatgaagcgtgtctgaaccgaatgaggaaatgcatggttattttcctaatgcactcatctttgacttaactgcacccaagttattgcatgctctcttgtcaattgtacgcaagcagtatttgttgtttcatttgtattgttttgtgttggtttatgtttctttgaatgtgagttgacatgcttgttttctcatcaggtcattcattgaagactcacatgctggaatcaagatttcaccacaggataacaattttgttggtttgcatgatagactcgttactgtcacaggacccttggaccatcagatgcgtgcaatatatttgatattaagcaagttatcggaggacgttcactacccacctaatctgagttccccatttccatatgcaggtaaacaaatttcaatatttgatttggtgtcaaacggctacttttcttattatggggtgccttaattctcggactgcatttcttttctggaattcatatactgcattgtataggtcacaaatgaacatgcttggtcactcgtaccatttggcagccatgagctttctgcatgaatttttattcagctactgcacgattgttctctttccgtttcagtgatcatgttgaatgcgttcacatgctatgtccattcagttactgcatgatcattttatctgaattcctcttcttttgttttcaggccttggtttccctagttaccctggtgttcctgttgggtatatgatcccacaggtgccgtataataatgctgtgaactatggacctaatgggtatggaggaaggtaccaaaacaacaaggttagtgattgctgctgctttactcttgtcttgtatatcactaaagcaaaccttttgaattcaatatcagcatttttatgcacatgttggtatgagctaacatgtgttcaattttgttatgcactagattaaggttatgttcaaggtgatttgcattagatgttctataatagaaatactattttctggttgtggttttgtacttttgtcatacatcactataggcatctagaatttctgcttcaaaccaaccttaacaatagtaagactcattggatgagatgtctgaattactaattgtggtttatttgagtgacatattccatccatttgttcatccatagtatgctttagtacatgttagtgcaaagcataagacagcttttaacgaattgaagtattattacctatgtcatgcatgatgtttttcaccgtaagtaacatcagtgctgtaaattctaattcagaactgtaagtaacgtcattgtactgctttctactgaattccacaaacattaccattcactatttttcctttttttccctttgagtgaaatttgatatatgcgttcagagcttcaaattaatccaacaattgtctgctgttgaaaattttgcagcccagtacacctatgagatcacctgctaacaatgatgcccaagattctctcactattggtattgctgatgaacatattggtgctgtcgtaggacgtgccggaaggaacattacagagatcattcaggtggtttcttgcgctatgaattccacagttattacttttttcggtgcatttttcaattgcttaataccttgtacctatgactgtaccttctctttttttgggtacaaaaggcataatgtttttttttgtagtatcttaggcgaccatattagccatcttcttgagttgtatcaccctatgtcccacatgtcagttgtttttctgcctcagaaatgtcataacctttcttcatgcttcaaagattttgtaattgtcccaactgatggttgtcttccagtgtgatcatgttggcgtgtttttactgaaatagcttgcaatttgtcgagtgcaggctagtggtgccaggatcaagatatctgataggggtgacttcattgctggcacatctgagaggtatttccttggttacttttcaccatcagaacaagctcttaaagcatattgagcaccaccgaccttcatatgatatgcttgtacagcaggcctgaatccccaaattttactgactggtgcaggaaagtgacgataactggaacatcagaagctattcaggcagcagagtctatgataatgcagagggtgacagccagttccgagaggtgataaaatctcatgaagacgaggggcatcatctgatggaaaagaagcctgatgccaagttaggaggaggggttggagattgtcttttctagttttagcactatccgcaaaaaaagcttgagagaaaatttaagataatctattgttccttattgagtctgattgtgttagtaactggagtagtcagtcaatcagctgttctatttatttcttatttttgttgggaataggattatatttcacaacatgtttggctgttgtcataactcaacaacgctggtgtgctaccctagttttgataattgtgatccttaggttacccttgaccccttgtctttgcctgtttgtttgtctcctcaaaagtcgaaatgactcgttttgctgaaagacaaagttgcttcctagtgagaggctgcatcttctgtccaatttgttgcatttccatgatgttgcctccaaaatcttgcaagtccaaagccaggaaaaaaaagcgaggctgcctactcttgtggggcgtggaaagtcacaagcatctacctttgcctgcgtggatgcaaccaatgccaagtaaaaaaaagcaaaggctgggcttttctttttctttttaaatgttacagcgagttttagctcccatttggaattcctatgaatatatcctatttgaaagcatttgaaattctttcaaatttggtgggcgagcaaactagtacgagcagaaaaaaagtcgaaattttctcaagatatatgtcgtgaatgaaataataatactggagtatcatggaggattaaatctgtttgtaaacccccaaaaaaaccggaaccggttttnttttccccctctcccaaaaaaaaggtttgtggancctaagtaattaccaaccattaaaattaacatttctgtggcatccactgtattgtactatcttcagctcactacgtttggagaatttccggagtagaatcaaatcttagaaattgcataatactccctccgtttcaaaatgtttgacaccgttgattttttaaacacatgtttactagtttctcttattaaaaaaaattatgaaatatgtaaaactatatgtgtacataaaagtatatttaataatgaatcaaatgatatgaaaagaataaataatcacttaaattttttaataagacaaatggtcaaatacgtactaaaaaaatcaacggtgccaaacattttgaaacggagggagtacatctcaaaaatctctgaataaaatttatccctagtagtatatccttccatatataaaccgaaattattaaataaaaaggtatattcctaaaaagttttccgacagaccagagggcaggagtcttctacaagacggctacccaggagtatgatatttcctctattattattttctttctcatcacgcggctgcgtccgtatcgcgacttttatcctctcctccccaactaactcggcgttcgccatctcgtgtcgactttctcctcaaaaccctaattccatccaccgctcgatccaatctacccttctctcgattctcaattctcaattctccctgcaaaattcccaatcctccgtgcagaattagaattatgcgggattgatcccctcccacgggatctccaatatcatatccatccagaaattgaaattcccctcgccgccgatgagccaatcgccgccggactcctcctccgcggcggcggtgcccctggcgccggggtttcgcttccaccccaccgacgaggagctcgtctcttactacctccgccgccgcatcctcggccgccgcctccggatcgacgccatcgccgaggtcgacctctaccgcctcgagccgtgggacctcccctccctctcccgcatccggagccgcgacgcgcagtggtacttcttcgcccgcctcgaccgcaaggtcaccggcgccggggccggcggccgcggcggccccgggaacaggaccaaccgcgccacgccgcgcggctactggaagaccaccgggaaggaccgcgatgtccaccaccgcggcaagctcgtcgggatgaagaagacgctcgtcttccactccggtagggcgcccaagggccagaggaccaactgggtcatgcacgagtaccgcctcctcgacgccgacggcacccaggtacctgtgaaatcatttgatccatctcaaatttcgcaggatctaccgtaccacgagatcacgagattagcggtagcaccaaaaaaattctgttcttttagcttgtctcctgctaggcttgtgtgagcggtaggtgggaactggtcctattctactttcaacactcgttacttgctgctgcttagatatgttatctagtgcgaccctgtcccgggcctagaatggttacaacattctcatgtttgttcacttgatacctatatatggtaggtaaaaacctttccttacaacatcaatgacttgctttgagaaaaaccaatatgagcatgagcttatcttttgtcaataaaagaagaaaaaagtgcgagatgcactggtagaagtgatagagcacgtctggaaatgtatgaagcaagggggcttttaactgggctatttaagcattggaaatcttatcctcactctgaattgaggagtctgaattgcggaggaccaatggtttttaacctgtatagaatattgatgtagcatccttttctgatagctgatgttagtttcctgttgagtgcgcaggatctgcatgtggtgtgtagaatcttccagaaaaatggatctgggccacaaaatggtgcacagtacggtgcgccatacttggaggaagattgggaagagg

SEQ ID NO: 9159 - DNA, 8389 bp, Oryza sativa
aggcaggaggatcatcatatcctgctgattaaattaagtttgggacagagaattgctagttagctcggtgtcccttcaaacatcatacattcaaatggaagatgatatatataggagtaatataatatatctatgcatatccagttgcgtcgtacagtgttatgaattgtcctcatatatatcgatcagtcatattcatataactttgtcccttgtttgttttcaatcttctttctcatgtggttgcagtatgaaccaaaattgaaaacgatattattccaaaaaaaaaaatggaaacgatatacataatggcttgtggctgtatacatatatccacgatatagtagctagtactgtggatatgatttagtagaaccgtatagtacacgtgaatcaattaagtacatatatgttgagaaaaaaatgatgatgtggtggtaaagtcaggggtgcatactatgtatgacgtactccaacggaccatcactaacctttaaacaatgatatccatagatattacatatgtatggtttgtgctatcaatagaaatttagtaagctcagatttattattggttgttatttccttagagtatatgttagaatacgtatttgtgaatgtgtgagtgtgccgtgcgtataaatcatctaaccggaaaaaaaaagaaaaaaatcaagtacaggtgttatagcagctgatgacagcaatcaactcatcgtgacattgacatgaatgtgtttatttgctcatctctgattaaccggtcggtcggtcggttatctgccacgtgtttcgcacactgtgcatacgtatgcatgcatattaacatcaatcacagagacaaactacatatcaaattaaacgttcggatgcaaattaagatatttccactaactggctagcttgtgttagctatagctagctagcttatttatcaataaaaacatacagtaccatgtatatattatggtttcattaaacaaaagtaaaccatatttcatatttagggatcaaacttcagtggttgagatatattcgacgaacgtaaacaaatacacaaaaactttcaatcgaatgtatctcgccaaacaagatcaaagaagaatatgtgatgcaagcaaaacatgaacattatgcgcaattcgtatatggacatggcataattaaaaagttacgggtaatggagatgacctgttaaatgtgtatcttttgttgctttgcatcgaccggtcggttcattgatttcaaggtagatcagatgctgatgctctgtgttaataattgtttatgagctataagctagctagtggaagcccatggattgatgaaatacaagctgggaagcaagatgcaaagcagagcacacatttctatttttttttaagtgccaaatttgcaacatgctaaagcagcggttttcgtgatcaagctaatttaaaacgagctagcaaaaatattctgcaatctttggaagttgaaatgtaggatggatggattgattgattctacagaaagtgagaacaactttggccacatatatatgttttcttccactgaaaattcttgcaagctaaggaaagaattaacaatcaaaataacttcatctttttttagcttttgacatgaattaagatcaccaaaaagattccttgttttgttgtagagagtataacataaagaaaatgaatctttgtacagaaagagcgaaagattgatatccacattatattggtcgtatactttgggaaaagaaagaaattaaaggacggtaatgaccgactttttcctcctgaagaaaacagttgagatcatctgactataatatcgttttggatgcatggtatacgtgcatgcaaaacacaaaagtttgtacttacgtagagagctaatttcaaccatggaccattttttttataattaaagaaagtacgctatcagttggaaatgtactttatgagaaagttggatggaagattggaagagagatagacgcgtggttggtggtccgtgccttttgatcgtatgaacgtatgatcatagcatcattttggtcttgatttttgcagcacatgtacacacatgtaacagtattagtacgtgtgtgtagcccacttaattattagtaatcgagactttgtttaatgtgtggatcgagtcgagtgagcacatatattccggcacgcactacagtgtactatagtatagtgtttctggtgtgcattttgtttgatctccttttcaattcgccagctagcttaactggatcacctttgtttttgtctttccttttttttttaacggggtacatggcacgcgtctacgtcttgtatgctgcaaaatgatactctctccgtttcaaaatatttaacactgttaactttttagtacgtatttgaccattcgttttattcaaaaatttaagtaattatttatacttttcatatcatttgattcattgttaaatatactttcatgtacacatatagttttacatattttataattttttttaataagacaaacggtcaaacatatgttaaaaagtcaacggtgtcaaatatttaacggagggagtacaatcatacagctgatagctagatgcaatgcgtgctaagcatataggcatctgatccctgatcagaacctgaaaagtgcacgagacgagagccaaactgtacgcatgaatgcacgatcgtgctgtcaccatgcatggatgccaagctatagctagccaagcatatatcatgtgttagagtgagagtgagactactcttttttctgttcatgagtatatgctgttcatgagcactactcttttcttttcaccccaaaaggtgctttatgtttctcctaatttaaattaactttaaccaaatttttagaaagatatcaatacctataacactaaaattagcataaaaaatctaccattgaacatgttttgtaggtacttcatccattcaaaaatataaatatttccatattcattttgaaaaacgtactgaaatgtttatatttttttaatagctaaagtatttgttctatgtaaaagtgctgatttatttctctgtgaacttgattaacctataacaccatcaaaccttacaatatgaaacagagtaactatatttttctttctcaaggaactaccttgtgtactctctgcagtcaactttactgtgccattgtcactgacatgtggactcgacgacatatcaggtccatatgtcattgacaaaggcatagtacattaaccgcagagcagaggatcctgatccgtgtactactactgttctgttcttccctatccctagaggcagctggctgagaggactcaatcaattaactggtgatcgatttgatttgatctgatttaatgtgcatcgtcgttgcccctgttctgttttcttaatcaagcagcagtaattttccaactcattcgattccaatagattagatatagataggtagcctgttgctgtatgaactatcggcgtcacccaccatggagatcgaattaaggtcatggatgcatgaatgcggccctacgtccgtctaaaacatgacacaaaccaaaagacaaaaaaatattgtgtgggtttggtttatcggacggcgccgctcttactctggagtacttaccttagcttgcgcctgcagattctataattatctattgaccgtttcgtctaacactgatctcatcctcctaatccttgcactcacctacttatacttgatttaattatttaagtctaatcaaaatatctctctgatattgagctctttttttttctccctttgagctgtctatatatgtgatctaatcgaatcagccggactgatcctcaactacacgcttcatcatccaacgctccagtgctccaccatctgcattccaatttccaaaccacttccctaactttttccaccctcacccacaaacaaatctaacccaaatagtttatgtactaacaggatgactaattagctcagctttgcccgcggcacacacttttggcatataaagtccgtgtcaaagtttcagatgaaaagtttctggatggaagtttccaaacgaaggttttttcagatgaaagttttcattaaaaaatgtgttgaaatccctatgtttgggcctaataatacagcgaccaagcggcccaacctacgaccaccagactgcctacgtgccattttggcccacccaacccaaatattgtagtagctctatcaaactatatgactataaagaacgtgcacctttaaacaagattacaagacaagtatcagttgctctagactctgaaccctttgttgtttacatcatgcccatttaaccccataacattaacacaaataaatttgtcaaaaaaaaaaaggtgcaagaaactgactttacaggtaggatggacagtggcaatgtgtaaagaccaagccccgtgatgtgacactgcaccttggagtttcagcaaaaatctctgcaagtaaatcattgcatgaattcagctgctaacacaattgacgaaatgtatatgacagcttaagaacggagcaaaaggtaaggaacaatggaatgccttgcagatgagcttacctggtgaaatcagaattcatccaaagcccaccatccactaaagattcaatcaagcagcttcagggcttatttcgcatatacggtcagccttacttgagctgtgacttcagggtgaagcttaatctctgcaatgtattccccaatttcacgaatttctggcactgtcacgagacgcttgtcgacatccctacatgaaatagtttccggtaagcaaagcaacagcagcaaatagagcatcgcaatccttccttaaaaggtagtgattgtcagtgcacttagaagggcatacctattaagttgtgactttatgatgtcaacaagatcttgtgctgtgacgctgtagaatagaagaaaaacttgttattaagtgcaagtaaaataagacgatacataaagaactatctactcgataaaaacttgcctcccaaatatctgttttcctttcccacctttacgtggcactttgaatgccccaatagtttcaaaaacacgggcaagttgctgtgcctcttcttttacctactcaagcacaaatgctcaacagggtaagattatgctaacactggatgaaagttcttatactcttatggaaaatgatattggtaggaacaaatcatgctttagactttttacaaaataagctaaaccacaactacgtaccctggagaacaaggattagtagggtataactaccacagtagtttttagacagacaggaacaaataggaataagtttcaactatatcaattcttactgagtccacaaatagaataataggtttacttacccgcttcttttcagcatctatcctctcctgttctacttgcatttccctgtagacagcagcagaggaaattaagtagcttactagccatccttttacaagaactaattgaacatgttgaacaccccagaagaactgaactagaaatgcagaataggcatctataaaagtttgcagatttatatgtcaatcctgggctccacaaggaggcaagagatacaatggctaacacaacagaataaatagctgcaaatttacacctgcagcatactgtgaaaaccaactacgatgaaacataagcatacgtcaattaatttactaggagcacctatctgttggttgaaacatagcctatacaattcgtgagatgtggtaaatgactgtaagacagaagattacttgagtacttctggggtgagcagcgttgccttgccctttggcagaaggaagttgcggtagaacccggccctcactttaagcgtgtcccctttcttccccacctctgctatgtcatctgtcagtatgacctgggagaaaaagaaactcaagtgaagtaaatcaaatacggaatcgtgcattacatgctaaagtatagaaatgcataatagacaaggaagatgatgacataggcttggaacattttacagtttacaggtgcaaattttgaactgggtgtatctagatgccttttagttgcaactttccctacaaacaaacagcatggccaaaccaacaattccggcgttccggggcatatacagaatcatattagagatgacttttgcatctgagttgcaatgctaagaggcacctaattaaaaacatgacgatagtttcttccatttccatgtactgcatcagagcatgcgtccatggcaatgtatcttttcctatactcagatgtgtgaatgcacacagtaatcttaagcttacagctgctgcatttcgaatttttcgatcgatggaatgcagtcgcatgcgctttgtaatctactgtactgattagtggacagggtggtgacagacagtacattgggtatggctagttctaaaagaggcaaaacaaaagcatcaccagcaacagcttgttcaatcagtcagtactagtactgcttagctcgaacgaatcgcaattaaatacatacatacatacatgctgcaactgtggagagaaaatacaagtggaagccaaacctggcgatacttcttgaccttgccctgggcgacgacgaccagcgacggggagcggcgcggcgggaggcgggaggagggggcggaggaggaggcggcggagctccaggcgagcgtggaggccatggcgttggggatggattgcgggggaagggaaggaactgcggctgctgctctcttatccacttccccaacggatttggtgccctctctcttgggctttgcgctgctttgggcctttcaaatcggcccagtatcaaaggttttcttcggggttgtcatgggcttgaagattaagggtcattttggtttggcgctccttcttgccttactaattctttgataacttaaaggtcaaaaataaattatttggtaactttgaatagttaacacgtaactatttgaattagagtcaaattttgctaaatcaataaggtgaagccaaatagacaataacaaaaatttagtaataccaaaatttactcaagatttggcattgccaatattttggcatggtttcataccaaacaagtcgtaataataatccaccaaattgtaacccccttccactcaacgtatagagaaaggtaggagatatatatgtacgtgatacctcgacgatattactaagatagatagatagtacatgtgatgccaagatgttataacatacattaagagaaacactcaggggtcttccggctagctccacaaggtgatagcctaaatgacctggattcgtaacctcaccccttctaattatttgatattaggtccttcactaatattcatgttataacataaatcgagaaatatattattataacactattttggtgctatcttgaaactcaacgatacatcactagctaccattacgtataaacgtgtattaatagtataagcaaatatcaacgagtatcatcaagtatcaatgtgcaagaacgagtattagcaaatactccgtatcttcatgaataatatcaaagagtataatcaagtatcattgtttaattatcaacgagtatcatcaaaatatcatcctcgtatatcatactccagtatcatcttgttgtactttttctgacaaagatctccagctggtgacctgtttctcgaaaggaacaaaaattaaaaaaaaacctagcaaatcgttcttaaaaagaatggcgattatatatcttattgaattagtatgtctactgctcaacgagatgagaaaaccgaagagaagaggggtatataatcgagtatatgtcatcgtcgtcgtcatgtcatgcagccgtccatgacttcgtccttcccgccatcggagaaaccaaacaagcggactccacgaagctagctaagctagctagcgcgccaaaactttaaaaatcctcacaccctcttccaccttcgcttcatctccaatccaattctccatcgatcgttacacccaaagatcgagataccaataccatggaggaaatcttggaatccgagtactcggccgccgccgccgccggcgacgcggcgtccttcgtgctctcccgcttgccccaccccgacaccacggcctccgccgctgccgccttcgtcgtcgacgtcgccggcgccggcggcggacgaacgacgacgctctcgttcgtcgccctccgccgtgccgcgctctccctcgcctcggggctccggttcgggctcggcctccgccgtggcgacgccgttctggtgctctcgcccaactcgctcctgctcccgcccatagttcttggcgttctggccgccggtggcgtggtggtcgccgccgacccgggctccacggctgaggaggtgg

SEQ ID NO: 9160 - DNA, 35640 bp, Oryza sativa
ctagctggtcctttggaagatcaaacaatgtaatgcctcaaaaagcacttatttccaaatcatgagcactgtgatgaaaaaacaaggctaatcttgcatctttttttttttgcggggaaggctaatcttgcatctattgtctcggggagaaaaaagtaataataattaacaaaggagctgagttcttagaccctaatccttccttgtcccccaaccttttcaataaagtgaaatgatgcaatagactttttgtttagttgtctatgggaagcactgctagctacactgtacttggcaattggtaggatcatgacaaaaaaacaagggttttactagtttttatctgtccatctaatcggttacagatataattaccagttcggtataaactaaattattactacagctcgaaataaatgaagtaatccttctctcctcgcgtatgttgaagtacaacaacagtaagtttgccagctaagaaatatcggtagctagtagtagcaaattatgccagacccgtcgagcgatagccagatgccaaataataacaacaacaataataaataaataaatagataataaagagaagaaaagagaagagaagaggaatgaaaaggaagtgctagctagctagctaggtcaatggatgagcaaagtcgcagttttgtttaatagcgaagtgataacgccagtaaacccattatgcagaggagtagttgttaaaagtgatgttgcatccaatcaaagaaaaccccggaaaagaaaaattatagctcacagtgacactgcacgagtatggtcctttcatttttctctccgatgtatagctattaatattattgagtattcgcatttatttatgtttatacctaaaaaactttaaagcttgtgaacacatttgcggtcatatggccctaatttttcgtttctcaaatatagcttgccatttccttttcttttgtgatacttggaatgaatttgcagttaacatgtttatgcaattttcaagtaaactgaccgctatgatcatatatctgtaaaactagaaaaacgtacaagaagcctacagggcccaaaatacattaagcccataacagagaaagcccacagacctagacaatagggccttgtactccttaacgggcctataaaatgcaccgggctagcacctaacatagccgatctaactcggcccatttgagcccgcgtcggtgtgaggtcctcatctcattctctcctcctcctcaagatttttctcttctcatcattcgttggcttgttgcccttgcagagctcgcgcgatccatcggaggccgcttcctttcaattctcactaattaatcgagttccatatcctctcaagatgaagaataacaaggttcgtcgtaaccgtaatcacaatgtaagtaccagctttttttttacccccctcaccatctccctcatactagttatttatatatatatactgctaattacctgatcaagcaagtgtttttctctacttgttacttatcacatcatttgaggcaagcatcttatataataaactttcggtcctgattttagtactattactatactaaaatctgtgagtcctctctccagctgtaataaactttcggtcctgattttctcaatgcaaaatatgtgaatggcatgattcacatgatttgttgttgactattccctcataattatctcccaagaacccattgtaaagaacaaaaagaagtagtactccactatttattttcaacaatttgtatgaaattacctaaggacgaccagtatacttttgtttgaccctcaagaaatgcattcatgaacaacagcttatttgaactgcagaatttcacataaattaatttgcccgctgaattcttccaaaggttgttttaatttgctaccaattgaaaaaaaaaagggaaaaaaactcgatctcaaaatgattttaacaagtgggtacaaagaggacaaggcagggaagaatggaagggttggggggttgcaccggggcagtagtagccacatcatcgtcttttttctaatccattccatccgtcccctacgctgcacattgcccgaggcaatgccaccacacatgctcccggtctatcatgagccaccctagcaaacccgtgccttatcctatccaatgaaaatggggcggatatttcccgaccgtccgtccgatccgagacttgcggaagaaatataggagaaaaaataggatactcgatactatctgacttcaaatccgaattcgttggaaaaatatgggttaggatacgagaagatacgtatccgtccgtatgtcccgtattaaaaaatacatatgaaaatttattataaatccacataaaaacatgataaaatattggttaatcacttatttacatgctcacgtataatattgtatatttttttcttgatgtatatcttttacttcctccgtttcatattataagactttctagcattatccacatttatataattctatatgaatgtggataatgctataaagtcttataatatgaaacggagggagtagtactttaattatcttattatatttaatatctatgaattagagatacaaataaatatccgttcttgaatccgattcgaagtaaataatatgggacatgatacgggatgagtgatatgttacccggcactatcaaaatccaactccgaatttaaaaggaaatatgggttagaatatggaaaggatgggatccgatccaacccgacccgatttcacccctagtcacgtggtcccgtgcgtccggtcccaccatctatcctgcagtattcccctgccagtgagaaccatagaccacgggtgggtcatacgcctgcatcctcgtgcctccttttcatgcaaaagaaaaaaaaaaggaaagaaaagaacaaaggatgcattgctcttaccaccaccaaccagagatcttagagacgggatgagttgaggattagggggaaaacatgcattggatgagttgacatccaaattcatcatagcttcacactgtattactaccttcgtactaaaatatagttatttttgagttatgaatccaaacacatagttgtccagattcataactaaaaatatctatattttgggacggagagagtagtactattactccctttgtcccataatataatagattttgatattttacctgtactgtttgattactcgtcttattaaaaaaattgtgcaaatataaaaaacgaaaagttgtgcttaaaatactttggataataaagtaagtcaataataataataattctaatttttttaataagatgaatgatcaaacaatgcaagtaaaatatcgaaatccttatattacaggacggagggagtagtatttagatgatggtgataggtcagtagttgctgacactgtgactggggttacataaactctttacaggtaaaagtaaaaaagaattacttactgatcgaatgcacctcttatactatctcctttctgttcagctctctcaaggctaagattaatttaaccacatacatagagacatctaatctaatttgttgagatctacacaccgagatgttacaggctaggagtggtacagggtcttgagcctctttgctgcctggatgaagcccagaatcacctgcaactcatccaattgctgctgctttttatttagcatttggaggagattagagccagaggttaagactacaaactgatcacaggttatactacaatacaaactgcctatctaaaaggtataggtggtgtgtaataggttttcagctgctacctgagactgaaaatgctgctggaccccatggaagagctgttcctttgatggatcggggttcatgcttacctgtgcatagtttttcagcattagaccatggaaatgaaatgtaaggtttgttggatccaggctgcttacaagattgaagtgcttccagtatctccacagggtaggagttccgagtcttgtcaggtttactctctgcaaacaaaaggtaagaaacatactttgctcagaaaaaggaaatggtatgagatgtgcaaaagacagatcaaaatcctagcagctttcccagcaaactgaacgaatgatcaatgaaagttatttcgccctgttcataataagcaagatgcattggctaaaacagcagaagggcctatgacaacaatagatcctacataaccatggaccaagccatgtgatccaagggtcacactggctttaattttggattgtacacggcctgatatctcgattagtaattaccgtttgcaatattgaactggggtgaaaattgcctcggttgctggattttgtacaggatgaccagggccttgtatgccgaactcttggctttgttggtttatggtattctatgatcgctacttgcaaaagcagaagaaaattgttagttgattacactgttaattgttagtttaaagcaattggctatattgcaattatcacaggatggtcttacaatagtccatgtctttgtctcccatgtcggaactgctacagaatgaattgttgccgtcaatatcatcgtcgtcttcgttaccagttggaggttccaagacactcaaagcattcctctgcagcttcacctctacaccattctttagaacctgcattttcatgaatatctcaggtcttggtattgttttccattatatttgcatttaatagttcaactcctaagctcataaacacttaaagaaaacatataatctcaaacaatggtggttatagattatgacggtattattaacacagatgatattttataaacatgtagagaattacttgcctagctactttctaaaacaaaaaaatcagtactatatcgttcacttgtgaaacaaacatttcaagataaaaaaaaacacaataaagtaaagtttaagtgggatactaaaaaattcagtgggagactcaccagccagtgccaacctcctagaccaacagccttcttgacaacaccttgtagaccgaccaagacagattttgttcggttgttcccagtgacgatgacctttgtgtgccgaggaagcactgagagctcctcatctccactatcgtaccgaggcagagacagaacccgggaagagcatagttcagtctccatcatcatgctgattctctgccctgatctctccctggttcaaggttttgcatcaaattcaatcagtacacaaacaaactcaatactgtgaagtgttctatgattgactctcaacagcaaacaataaatagctctatcaacccagtgccagaataatttccaaaattagcatgatgttcaagatttattgcatggtgcaagaaccaagaaagctgcatgtgagatctgcaggattggtgaactttgctaaaacagtgctagtcctaaataaaagaaaaataccaactattattaggcatagcagaatttctgaaactagctcaacattaaaaattaaaatttgaccacgcataaagggaatttgaaattcaaaatcgagtcttgagtcctaagttacacaggaaattcatattttgcatagattaatttccattgggggggggggggggggcgatgaagcctgaaagcgatcaagatgatgtgacacctccatgcaactcgatccggatcggactaaatctctcatctgatgcgattgcaaacagattgaagagcattagtgactcccaaccactaaccattatggtgatgaatcggcagagacacttaccaggacccactaccagctagctggctacaagaattgctcgttacttgctggagtaacactcgtcaaagtggtgcgtctaaggaatatgtacaaaagcagtgcaggtggccaggtagtaaatcagaaaatgaaattgtgtagatcaattttggttatgaaatttagcaggtggctaggtgatttgcattaattctgtgtactagatgtaaaattatgtggagtaaaccaagaatttatagttggggcaggtaactctcctgtgttcatactttcagtaaattcgcatttaaagtgggagttacggagattgcagactacagtaatgaacaggtcggttagaataattttgctacagtacagtcttgtgatgcattttctcccaactgataccctgatgtgcccaattctaatgcaataattttaagtatagattcgaatttactgtaaaacacagtataaatttcacggtacaacgcagaaacccgatctaatcagtcagtttacagatcgtctagcttcaagatcttaattaaatggaggatgaattgggaatgctatatgagaagaaaaattgcatgcaaagccagaattccaaaatgcaatcaaagtctggatatgaacttctgttgactgaggatcgcagctgtaacagtgtattttgctatagacacaggatcctagtacatgcaattaaggatatgtgcactcttgctgcaaattgtactgtaattttgaatttgagaaagaagaagcgaattcaaaatgcacaagactgtttttgtaagcgcaatccgagctcgaattatttaaaaatcagcacaagaagggatatttaatcacgggtttaacactagcagatttatagaaagatgtaacttcgaattgaaattgcaggaccaatgatggaaacagacaacccgatcaaaatcgaatccatcccaatcgagcaccaggaatccgaatcaagctagcacaaaaccctgcaaccgagagcaggcgaaaacccgaagaattcaggggcggatccaacttgggaaatgggggttcaattgaaccccaaacctttacttgtattaagagaggctaaggctctgaaattaagagaaaaggctcgttccagatctagaagagaagcaagcaaaatcgagacaaaattaagtgggaggaagacacagatggatgagaaagagaaatgtggaggttcgttaaaaaaaaaaagaagaagaaaagggaagagaatgtggatgctcaccaggatgcagtaggacgaaggcgcccctcccctgctccgctccggctccgctatgctcgcgagatggatggagatcagcgctggccgcaggtgcaaggagcggagacgagactggagtttttcttggcgctggtgggaaggggcaaagatactcgacgcaatgattccgtaagtttatgagagaagggaaagagaagatgggtcaataagtaaaacgagctgaatcatcaatacatgattaattgagtattaactattttaaatttaaaagttaaattaatataatttttaaaagcaactttcctataaaaagattttgtaaaagaacacattgtttaatagttcgaaaagtatacgcgcgacaaacgagagaaatcttctctcagctaccgaacgcaattaaagtaaattaatccagctttaatcaaccaattgtcactttaaataaccttgttgtctcaaacttttcaattaaaaccagccatccattatttgcaatgactagtatcccatatgtaaatagtgcttgaagaaaaaaggcaaataactcaattgggatgggtggcgaaaacaaacttgttccactgacagcacccattgtctacctttcctctcctccacgcaccaccggcaccgctccttctccacgagccatcgccgttcctcctctctatctccgcatgcgcagccgcacctactagccactgacttgtctcctcttctaccccgtcgccgcgcacattgtagttatagtcgtcattgaggccagcaacgtggggactcgaaaggtaggggttgacctggtagagacttgcagacgctggatccaggttgtcggaccttatagatccgcagctgttggagggaagaaagaaaaaaagggagagatctagtgtgtggagcgatgataaagttaccggacttggaagttaagtgatgatatccatttcaacggaagtggcataacactccactctccacagtccacacttgtctcattaagactcaagagcagggtgaaggtatatatgtggtgaggcggaattggcaagggagtgcagctcagggttagaaatttcggtcatttcggatcccccgatataatattattttggttgaaattttatttttttaattttttgtgaatttagtaatattttgtttaaattttactaacatttgtttaaacttttggaaatttcggtatatcgatgacctctaatacaatcggctaaaccgaaaaattaaacactggtgcagctgcggggacgagctcgacttaattttgtcggatttttatcgtgggctgtgaaggacttttttttttgtttaatggacttacagggctgaattttaatccggaaaacagcccatcgatctaaacatattttatggagctattaaaattacttacatgcctatattattatacgctggttttaggtctaaaactggacttccaagtaaagcgtatttactcgttcaggtaaactgtgataattcatagctgtatattggtatgttactgtcaggaaagatacttttttctaaggcttggtttagttcccaacttttttttttaaaacttccaacttttccatcacatcaaaatttttctacacacaattttccaacttttccgtcacatcgtttcaatttcaatcaaacttccaatttttgcgtgaactaaacacacctttaagtcatgtgaatgttgtaaattctaatagcagaaagctgcttgtaacctagctgaggatgtatgttaacttgtctgtcagtgtacagttcattactgcttgtttagatttgcttctgttcatacttgctcaggtaaaatgtggtgcatggtccgctataattaatagctctaaccacaagtaattttcatacattgaactgaggaatttaaagaattgtttacttttttcttatgcttttagtttttacttgttcaagtaaaatatgatgcatggtccgctataattcataggctcatagctagtatgtatgtatgattatggctgtcagcaagatttttttttttttttgcacaattcgtaagtcttctcatacaccgtggcatttgaagacccggcaataatggcgccgatagggccgatagcatatcagtatagcactaacaagtttacaaatacgcatgcttaacatttacttaacgagaggggatcaaatacttgatcacacataacataagaggggatgagaggaggtaaaaatagtaactagtaaaattcacatttggagatggaattgatgcaaagctatatatagctgaaggcgtgcaaccaagaacatgcatgcctccgcacacacaagtaccatttctcacaccaaacatactacgtacacatagatataattacagcaacatcagatatatataaacgcgcttataattatgcagcggctagcttcatcgatcaccagacggtaataacacacgtagtactgtagagacttgatcctccatcatcttgcagcatcaactcggttgattatttcagagtaattatcgcttaattaagatgatggtgcatggtaattaattagtcccggctcttgaaggggattgctctgatcaccaccacgtggtagatggccgccagtgccgctccgatgaacggaccaacccagaaaatccactgcacaaatccatccatcaattagcactaatcaatgaactaaattaacgtgtgattattagcaactactccctcaaatcccataaaaaacgaattttgtacgatgaatttagatagtatatatatattcagatacataataatagaatgtgtcacgttccgattggttttttatcggatggatggagtagctaagtagttgagaaagcattaaataatggttggttgcatacgtggtcgtgccatgcgtgggcgcggttatagacgatggcggcgccgaggctgcgggcggggttgatgccggtgccggtgatggggatggtggcgaggtggacgaggaagacggcgaagccgatggggagcggcgccaggatggggacgtgggagtccctggcgttgcgcttggcgtcggtggcggagaagacggtgtagacgaggacgaaggtgcccacgatctccgccccgagcccgtcccccttggtgtaccccgggttcacggcgttggcgccgccgccggagcccatgtacaacccccgctggaaccccttcaccacgccggcgccgcagatggcgcccaggcactgcatcgccatgtagaacaccgcccgcgtcagcgacagcttccgcgccaggaacagcccgaacgtcaccgccgggttgatgtgcccgccggagatgccggcggtgcagtagacgagcgcgaagatcatgccgccgaacgaccacgcgatgccctggatccccacggtggcgcacttggacgccgacttgttcacccccatcaccgtcaggatgctgatgtacaggaacaggaacgtcgccacgaactccgcgatccccgcccggtagaacgaccacgacgtcagctcctccacctcgaacaccggcgccgccggcggctcccggtagtccttctcctccgccccctgcgccgccgtcccgatcggctgcctctccgtgtacctgttcgcccccagcctcacatcctcctccttcccctccattactattaatttgcctcttcttctttctactactcactactagctctcttgccggagccggagacgacgacgacgacgacgacgatggcgagctgtggctgtgaggagagcgagtggcttcctgcttctttttatagctcctgctccactactacgtctgcaccaatggccttctctttctcttcctctttactaattaattaattaattaattattcattttgttttagcagtcggcaatttagtaattagtggacgacaacgatgatggtaggggtttttgttttaccttgattaatctgtggatgacaggaagcgctactgttactaagcttgaatttgatggttcatcggttattgtcagcgagagataaataattcacaagatgatatgatagattagtagtatgggttcgtttgctacggggcaggttctggaaattaaagccatttttgtttaggtgacacgggccctgtttggatccggagggctattaaatagccctccggaatttcgttatttaagagtattaaacgtaaattactgacaaaactcattccataaccactaggctattttgcgagacgaatctaacgaggtatattaatccatgattgggtacattaatactacagtaatcagctgctaatatggattaatttacatcattagattcgcttcgcaaaatagcctaggggctatggaatcggttttgtcggtaatctacgtttaataatcctaaatagcaaaatttcagaggactatttaatagctcggaggatccaaacaagaccacggacagagtggtcagtttggaagattatcctttgtgtgagctcatcgagctgtctcgacttgcatagcattatctttagcttgatgatcgatcaatcatagccacaaactagccattcttcctaattgctagcagttggcaaacattgataattcagcattgctaacaactcgacccaagaagaatgaatatataccttcatattatgtgctaggtactgtctcacttgcaacagtaatcccctctcgatttaacaatctagcatataataatgtgcgtccattcctctcagtgataagactatcaagtagtagcaaagtcggctagtatgggggaaaatggccactaggggaagaagggcagctagcagagtgggtcaaaaggaaaaggagagctcactcgtttattcacttccaaattttttcttcaaactttcaacttttctattacatcaaaactttcctacatacacaaacttccaacttttccgtcgtatcattccaattttaaccaaacttctaattttagcgttaactaaacacaccctcagctatagctgcagctgttcattcattcagtcagtcagtcaccacatcaatctgcatggacatcatgatcatgatcatggaatccagatgcactagcgaacaaaggcgaccaaacacaacagaagccgcaaccactcacgaacaaggtctactgctactacttctaccgttctacgagagcagcaaacggaaggaaaaacacacgagaaacaagaaggcgaaactgtactgcacaagagaaaaggggagcttgggcggtcggaccaggacagagacgggcacggcagccgttgcttcatcgctggccacacaccactagccgcaccaccacctcccctccactccggtctccggcctcacatcacctgtgcagctgcatacaaaaaatcaattcataaaggtgcacgcccttggttagaaaaatgatgctacttccatttgcatatatacatcaaagtgacgtagtgatatggagtggttttgtcttggtagaaaaataaatggtcaggacatcacagtatttctgtatttgccgtttgctgaacaacaactgttcatctatgatgattccctcccctgtgtgtcgtgtagtgcatatctcctgcaccgacaaagctactaggctcttgccacgcgtccacatgatcagacatactctttccgtaaaaaaaaaaaaagacaaaccctggtttttcatgtccaacgtttcactgtccgtcttatatgaattttttttataattagtattttcattgttgttagatgataaaacatgattaatattttatgagtgacttatctttttaattttttatatatttttttcaaataagacggacagtcaaacattggatatgaaaacctaaggtttgactttttttttttttagggaccgatggagtagaatcgatccagggaaaagaaaaaaaactggagaagctggtttataccttcatggtcctttccatagctgtgacactcctatctgggattcgacacagttatattgtcaggaagaaacatgacagtttgagaattacagaatctgtatataaaaaaaagagtccattcgccatggatcagatggacatgttcatggattgttaggaccatggaactaaaatcacttaaaaattccttcatttcttatgtggccacaaaactatataaccggttactatacaaaagattgatgcctgctagtgatgacaacatggatccgtagttccatactaggacaacagcattgaagcctagtgccctagttacaaatacttctacgtagtactacgttactacaagtcagtggagtcgcgattctgcctccagagaacatattatgttacaataccgtgagcaaatataatttacatcagacgtatcagtgagcctctccaactccaaggccatgctgataagctttcttacgagcttacagcatcacaattggtgtccttcggtgaaggttgcatgtgcatgtgcgtgcagactctctcaggctgtcctcttgtccagaggttcctgagttcaccccgtttcctgccgagcgctatgaaggtgcctgcagtagcatggtgccgtgttaaaatgagagcactaaacccctgaagctatgaaccttctcaccaggcacaaggaaggctttacttaccaagcgtaaaaggcacaatgtaaagaagagctggttgaccatgaccatccataaggttcaaggcaacatacgtgatcataagacctaaagaaggggcaaaagaatacagtatgtcagactacaggtaaaaaacaccaacatgttgccgcacgggttttgttagatgtttcaattgttcacgtatacgtatgagaatcccttttctttcacattcacgtatgataatccttttattttgtcatttccatcaaccagcagaaaataaaaggtactacgtccatccctaaatatatgacgctggttagttaaaaaatgaactaaccaacatcatataaaaaataacaggggagtataaaccaaaggtcccattgtaattttgtttctactatcaaaagtatcccattataggacaatttagtttaagctgtatctggcaaactgtacctagagagttggaaaacacagggaagtgcatgtaagaagtggcgtcttaccagaaccataagcaaccattgaccacaaaaagtaaccagattgcaaggtctttttggcagcccaatcatacctacaaagagagattgaaaaaaaaatcagtgtagtgctcaataacgtactgtgctcagacacctgcaaatccaaaacaatttatgctgattgttctcaagcctcctgagcaatttatgatagcccaccaggattaggctatttttttttcacaaatatgcaaaagccttgcacgttaatatagcaggattaggcaaagacttgtagataaagcggatgggcagaatttaacactgaccttaatgcaaaagcaatcaacagcccaggaagaagtatatcaccaaagccaatgatactgaatccaccccatggatcaaacattcgtgggatttttaacagcatgggcacaccgtcttcatcagtcttatcaccacgggcaacctacgagcagacgctagggcaattagcatttcgcaagttgcagaagcagaacatcacagtatgaaagtagtcatctgtacctaccacaatcatcacactctcatgaaaccacatcttggagataaaaacccaaaagatgtcatataagaaggaacaactgagaagaacagatccgacctgatcatgatggaaaaagagcaagaattgttataaaagtccccactccccactatatggtaagcataagcagcagggcacaataattaccttgaggttaggtatcctaacaatttggattacagtaacaatcagagcaataccctgaagacaggcaccatgttaattaacattcaacctcctaatcatcccaattgagggtgagggtataaaaacgaaacttcacttacaagaatatcttgcccaatccaagcataggtcatccggcgataaacagcccatataacagcaaacacaatgcaaaatggacagactgcgattgtaaggtatgaaaccgctccaaagaagggcactttcacgaaagattcggcagcaggtttaaaccatctgaaagatcacatgattactggtaaggaaactttcttatgttctcttggccacagcccacagccatgatatataaatattcatctgagacgtgtctactatataaatcctagcccataaaacaatttcaaagggccacaaatgtaccttgacaataaagccaccaagcaagtttgcagaccctgcataaacaaataataaagaacacacaatgagctcaagaaatgtaagaacaacaatcatacaaacataaatattagttttgaatatcgactaacagaactaaggtcaatttaggccctgtttgtttagcttaagattattgtaatctagattatcaaatcaaattactataaactagattataataaactgacatagaataagctgtgagctgtttgtttctctggattattagaggcatctaagggtagtgggtctttagccactcaataatcttggaaaaagctcatccatagaagattattagattataataatctatcataataatctacttgtttgtttcagcttactcctaataatccaaattataataatcctaagctgaatcaaacagggccttattcttctattcgataaaagttatcatgcttggcattaaagagaaaccacaaagctccttgctcagtttggcatgattctttcatagtagttcatatagtactgcctcacaatttgtgaaatttagcatttggaaagcatacagattatatgtttcaatggataaacagtataaagatcttagggccagatatccagctaattaattacagggaaaatggaatggcattgaacacacctctacaccaccaatgcaaaagatgaccaccagaagctccacaaaccagtgagacataagcttgtagagcattatcaagaagcaagatgcaataacaacaaacagtattgccgatgtcatgttgatatctaccatgccactagaaccaccagcctctaagtttagtgaactttcatggccatcctacataaaccaaatgactgttagttctcttttcaagcaaacaaaatccagaacaatagtcaaataagcttctgttcagaacctttagaagcttctcttgttcaataactgcttctcgagcactccatgctgaccagtatgatgcacaaagaatggtaccaacagccataagccacaaaaacacctctgcagtatcaaccagaggacggtctggagagtatagctgcaccgaaactgagaaattgaaaacaaattcgatacatatgttagatactatggccaaaaaacaacttccaagacaaaacaaaatttgaaacaaaaaaaaaacctacataggacatggcacaagatttcaggtggtggaaggctttgaagatttacctttaccacgtgtaagaagcttctgtaaatcattgcctgcatcttttggcagaagaactgcaggtatatttatgtccaaatctgtttcatttcggtcgcagaccatcttgtatagctctgcaagtggaagcaggagtgcaggacacatgttaaccacatttatgagtgctcacctatattgacaaacatgtggggactggtgcaatacatgtgtccaactttgaaaaaaatctgataacacagtcaaaagtaagtatctaacttatcaaacaatatgaagtgatgaaccactgcaactaaatttgggtgtgatgcatagacattgacctttcaatgataaaacaacctaggaagtatcttgagcacgcacgcacattaactatttgcacccatggcaagaatatatgttgatctgcctatgtagggtaaagagactaatggttgtaatcttacaatagatagtaaatgatcttttaacaaaggtaagacacagaagagatttcaggtaggatggcaatggtaaatagaaggtttatagtggtccaccatgcatatgcatagtaaaatggtaagggagaatattatgctattcgactatttcaacatcttgatctactaactaatcagctgctgaacgcaggtataaagcaaaggacattatatgtatgaatttacaaataatttcacaaataaggcataccatggacatgattgatgattataatagcagaagccccagcagcttcagcattcttagcttttttagtgaacttacagtttcccctttgcactaacaaaacatctccagcaacctagataaaggaataatcagtcactgggtaggaatgtaggacaccatcgagaaatcacaaactattaatttgtcatttccagtaagctaaccttctgtgtggggggatcacaacagtcaataggatctgctaacaatagtcctgtccgattggcatgcttttcctttgactctatagtggggccaaaacgagcaccaacaccaacaaactcaccatcctctctgttattgacccaggtttgcacttttacctgataacacggtgatggaaaacaacatagttaaaagaatggtcacatgatgggtaggaatacttgttatcaataaagtagcactgtaaggtgttaggtataaaataacaaatttgaagctatgaagctaatgcccctgtgttgtgaccctgcctcctactttgcaaccaaacaggcacctggagagggcccgaggcaggttgcaacaacaggggttagccagtgagtcaggtaatgcaaggaccatatctccctgcatcgaaacttgataattctaaaactcgccattttgaaacctacactgacaatcaccatatagaagagactacaaaataccatatgctatactgaccatctaaaaacttagtttaacaactataaacactaattgaatagcactaataactagttgttcaacagttcaagtaaactagtaactaacgacaggtcctcagcttacaaccgaagcctccaaagcagatcgttaattgtaggctatagcccgctccaacgattgactgatgagcttcagaattcaaaccaaatcgggcaggctaatttagtcgagactctaagcaaagccgcgagtccgtgtccccaagttatcaatcacctgttctgagcagcaaacaacatcggtgaagtctacaattgacaaaatcggacaggctctataccgtccccctgatctgatactgtaaagtcacaaatcaatagctcgaaaccctagcttcacctacgactgaaattgaaccgaacactcccgtcccgtgcagctcggaaccgaaaattcgggtcgcatcgtactaagggcaagcgaagaaaccgcgcaagcgagatggtagaaagtctgggaaggggcgtacgaggacgaagtcgttggagcagccggggatcttgggcgcctcgtcgtcctggtggacgatgtcgccgccggccgcgaccccggccagagccgccatgaccagcaagagcgcggccgccatctccggcgagctggtgcccatggccaccggacctctcctcctccacgctgctctccgccgcgagggatggatggggatggggatggggatggagatggacttcttcctcctcttcttctccgcttctgttgtgagttgtgacgcggaggaagttggaatggactcgggggggaggtgggcgggtccacctgccagtgagccagccagagtagtacacgagaagatgggcaacgtggactggtcgcgatcagcgggaggagtatcgtgctcgtacccgatggacttatccccattctctctctctcttcgggaggtaggggctttacctgggcctaggcctgctatgaaaatgttcatgggccaggttgacggcgaagtaatcttttttttcactctttttgagtaaattgccatttggtccaccttttattacccaaattttaatttggaccacccttaaacctattttttcaatttggaccgggtaaatttaccattgttgcggtttggactaccatgacaacttttctcgtcatgtttaatttccctttcggcaaacatatgaaccatatatagaggagatcggccgtatactagagctgatgtgtttaaggtcgttgattgcatgagaaaaaaaatcattcgtggtggtccaaatcgcaacaatggcaaatttatccggtccaaagtgaaaagatatgtttaagggtggtccaaagtgaaatataggtaataaaatgtggcccaaagcgtaattcactcttttttatcaaaatatttacaaaaattagggaccggattgcaaagttctactctatctaaaaaacaagagctgacatattctagtataacagagtcaaggagggagtaggtcgctagccatgagcaacgatctgattaaggtggatccatcatgagggcgtgcggggttttgagccgccactactagcgtaaagaacttgagagcctctacaaaggtcccgctaaatttttggagagtcatagatgggaggggggattgtagatttatctagtttgttcagattcctctgatatttttctttctgaatttttcactgaaataattaattaattagggacttggatgcaaaaatgttggaccattacgcctactgggggagaacggtccaaaatatggatcgaaatggaaaatgccgggggttacaatcggaaatacgggccgtggactgtaaaaaagtttaaaaaaacccactaaaaacgtgggccttacaagtgctaagggcctagtagtagtagctatctaatccagtagtaaagttggttcgcatggcgcggcggaggcgccagtggtggatggcgtcgcggaggggatggttggggacgagctcgcggcggggcagcttcaggttcgtcatcggcgacgtgtcgcgcccgctgcgcagccactccctgatcgcctccgcctcgtacgagaacccgtctccggcgatctgcgggtcccgcatcacctccttcaagatcgggcacacgaagtaggacggcgccccgccctcaccgccgtccgacgacgacgacaccgacgaccacgacctccccggcgccgcgctcatcgccgcctccagcacgccgcatgcctcctccagaagttcgccgggacggcgagctcccgctggctcctcctccacgtcgcagcatttcagcccgacgagcgccacctccctggcgacctccaacggccagcctccagagctcgcgtcgaacacctcgtgccacgccttgctgccgcccgcggcctcccgcgcctcctgcttcgccatcaacggcggcttcccggtgacgagccggaggaggaccacgcccagcgcgtacacgtcgcgttccggggtcatctcccccgtcgccaggtgccgcgggtccacgtagcccaccgccggccttgacagcgccacgccgccggagctccgcaccagcctgcacatgccgaggccggcaagcttgctcgagcagcactcctcgcccaggaggatgttcgccggccggacgtcgccgtgcaccgtcgcccgtggctgcgtcgagtggaggaacgccagcgcggagcatgcccggtgcgccacgccgcacagctcgtgccacggcagcgccggcgcggcgccggcgaggcggtcctccaagctcccgcccggcacgaactcgtgcaccacggcgcgggcctccgggcacgcgcccacgagcgtgacgaggttcgggtgcctcgccctgccgacggcttccacctcgcggcagaaaccgacctcgtcgacggcgacgtcacggccgatcatcttgacggcgaccgccatgctgcgcaggtcgcccctgtacacgctgccacggctgccgtcgccgcctccgatcctgacagattcgtcgaaatggttggtcgcctcctccagctccggcaagccgagccgcaagaaggtcagtctctggtcaccagcctcgcttcccgccattgcttccgccggcacatcgtcgcgccggcgctctcgccggagctggtggaggaggtcgtacgattccgacagcttggcctcgaggtctctcatcatccgctcggagctcgtgatctggagctcgagctcggcggcgcgggcgtccacctcgcgtgtctgctcgagtatgtcgtcgagctctcgcctgtcctgctccatggccgcgcgctccctcgccagcctctcctccacctccttccgatgcctcgcctccctctgctgcgagctctccgcttcgttcgcctgcatcgatcacatcatccatccatggtgaattttttcacgaacacgtaaaagaattgcacgtcaatatatcagaagaaaagaatgtttgtttatacaacgtaatccgccagaccggcttatgccaagagaagagagaaaagacaaaacaagaaaaactaaagaagaaaaaggaagagactactacgacgagtaaacgcaacttcaatcagcgggaagcatccatggtgaattcgacatgaacaatgggatcgaaccaacgatgcaatgcagcttggattcatttcctctacttacaattcttgtcgcgtcggcgaggtcgcgctcgaccttttgacgccggcgagtctcctcgtatgcctcatgcctgaggttctcggcttctatcacagcatccttgaacttgtcgtacgcatcgctcacatcaccagcatcctcctgtcaaaacggaatgcaccgtttattgtttaaatgtttactatctgaaacacatataatgtgtattacactgatgctgtatattctggtgcagatcagttggccaaaatcttcgacttatgaaacatgtgctgttcaaattatgtttctgtagtggagacaaaaacaagtcatttcgacaattttagtaccattttcagcagtccaagatcaaacaatctaggagtaggaaaataaacagatgtctagcacttgatgtaactgaacaagtaaacagatgtcatgtaatgtggaattcagatagtttttttctacatgttgggatttgttcattttttctttaaaaattctttcaactttttttcccttgaaactagtattatactgtatgatttatgaaacgtatagcacataccgaaccatgccctgaaggagttggtgagtcctcttcaatttcttgcagagactgcacaacagcagcagctgatctctgtacagcctctacattttcagacactgggactgttgatgaactagcaacagcaactgcttcatgattaaaaccctcagtgccacggtccatggcattgtcctccctgataggagtctgatcaactgatgatgtcgtcggttcggctggatcctgcataccgaattgctcgctgcttaggctgtgcactcgtggcgaggatctcgacctcgagtaatcagaagtgctcgacctcggagttgtgctagttgtcgatgatcctgttctattgagtccttcgttcacctccctataacggatcagacaaatggaattaaaggaaatatgtaaatcttataatatttttccaggaaaaatagaatatccttatgttagaacagctagaaagctaatagaagaatgccaaaagttcagaataatatgtcacaaactaggatgttcaggcaatctcagtgcttccacaggtactatttttgttcaaggtttgttattttgttagtcatttgtcataaacattatcatattatcagtatatcagattattctttgtctggcctaattcttttttgagcaggatgtctggcctaattcagtctgtgatcattgtcttaatgtgagaacagctaaaatggtcatagaagaacggtaaattcccagacaactatgtcgggaaatgttgccgacgcaaccacagtttctatcatgtttatctcgagaaaaaaaaagtttctatcatgttccttacaatgatagaagaataaccacgagttaaacggtgtgctacttcaattcagtcttcagtctttgtcatcagtgctatcatagaaatctacaaatacctgtcccattttgagcaagacagggagaagaaaaaccaaaggcttttgcaagttgcatcgttggcattaagacttttttgagtcatgcatgcatacctagtgcagataaggtttcctttgcagacaaaccagatcttgcaagaggggctcgccttcagttgcaccttccgagctttcttagatctcggcgcccgcattttcctaacatcacattgcatccagaattccagatcatttgcctttgaattcagcaatccactggcaccaagctggaccagccagttcttggaccgatcgattgataacaacagcagcgacagcgagagctggatttgtatgtattaatttccaagaacaagacagccataccttgaataggccttgtcagatgctgctcccatgacaagatcagtgatcccatgatcatcgacgagctggaggaggcctctcgcgatgtcgtcgcaggagaagatgatcttgctcgcattgacctgcgagtttttttcagcaactttgttagcaacccaggctgcatatggagaagagggagactgtcataataagaacacagccagaggctgctggtgagttgagactagcaatctgatattgacagcaagcaagatggatcaaatgtaaaacaatgaactctttatcatggtttcaaccttttgacttttgcaaatgtccaagagatcatctaagactttgctgatcctctcctcctccagctgcctgtatgcattcacctcctcctctgcaagctgacttactgggacccatgcccccactgcaaatccacaggtagtacccaaaaaaaaatgtcacaaaagatccaacattttttggaacacaaaagtgtaatgtaaaaggtattgtaaaggtaggaacataacaaaaggcacctactttcaggttgacagatttggtgggaaaagcaaagagaacataaacagccagctggtgtcattttacaagaaaatattggtagccaagtctaacattttgatttcatcaaaataatagccagataaaaggggaaatgttttacaacctgattaaggtcagagctagcattgcaattcttaattagactgaaaatacaaacagtgaatatgcttttagctgaagacggatatgcttagcagaaactatagtactgttccacttggcagagatgtatttgtataagattattctgagcaatagtttaagttgtccgagatgttgatttctacgcattttttttccttgataatgcacgtccacgacaagtcagaaaacaaattgaggcctcaaatgggaaaataaaaggaatgtaagcagtgcacgtagaacagccgcagcatcaaaaaaccccagtttccatggaggagacagcagctagcttgaaatgggttgttatttgccaaaaagaaatggaatgatctttctagaaaaattagatttgtcgcatttagggaaggtggtttgaattattttctgttatttgcaagagcggatttgaaaagatcaggtatttgccgataacgggagatgaattttatatatataaaaagtttgcaatggttggaatactgagattgcaatggtgccatttcgaaggagtgcaatcaaatgccaagaaacagaaaaaaaaagccatttctgaaccggattaattacaagcaagaacagatgcatgggggcaattgagaacccgtaaaattaaacagaaaaaaaaaacaataagaagcataaacaaccaaaacctctgcaaacaacaagaagaccgcaagaattagcgaactgcaacaagaagaacgcacgcaatgaagaacgggagttaattggaaataaactggaatagtatttggaatgaaatagctagcgatggagcatactcatattgacccgggaaggcgggcggtggacgtggatgaggacgatgcggctcctcctcctcctccaggggaaggcggcgagcacccacatgaggttcgccttccattccttcaccgcctccttccccacggcgcagtacaccgcctccgcctccgcctcctcctctagccactgctcgccgccgtcctcctcctccgccgccgcctcgcgaccactacctccaatggctcctcctgcccctgccgcagcttccatgtgttggggttggttcttggttgtgcacaggatcacgctgcccttctgctcatccaaagctaggctaactaatacggagtactaaagccaagattagctgctaactaactactctggaattaaaaaggacaagacggcgacgcacgcatgcagcagcagcagcagcgttgaggaatgaaggaagctaggaggaatcgaccatggccatggagagcctgctgatatacagacgcatgcagatttaagcggtactattactaagctgaatctctttgcctccaatccaatggcagtggaaaaggaaggagggatgatcttcaaaagggaggaggaggccgtggcaaatggcaggaggggataggagaggctgacaggtgggcccatggagtcggatattccccgtaccttttctttcatgggatcccgtgtggccatccacaacgacgtgctcgccgtggcacccagctgcacacttgcagtttcagactagctagttgtcgagttcctccatcaatcacgatcactactgtacgtgcatgtgtagccgccttgtgtgactcccggtcacaaactgtcagtgtacttcaattgtcgttcatgcatgcatgggaccaaatactacaccaaaacctctctctgatctctccttctccatggattcaatgctactccagctagtacacgtagtagatggtcaagacatcttcctgtttaattctaatttctgaattaatgtccctctttgcatgtgcacttgaattctgaaacttcgctctgatttccagccctgcaacctgcatatgcctttcgctgcctatacgaacccaaccttaaattggattggtcggtgaggatgatgcggctctcgatcgattcattgcatgccatgttcctcctaaccctgctagctagttagttaccaaacgcatcaactaggttgttcagttattaacaagctagactctgaatctctgagtagtaagtactaggacgcaaattaatttaaaaccgcggataattgattaattagttgcgagcgagaagaggtcgccaacatgaatcacgtacgggagacatgccgtatttatacacaccgttgactaaaatggatgcttctatactaggaatatcccatgaacatagatggatatgccttgaccctgcaaaataaagcccactaccgtaatgtttcttaaacagagctgtctacatacccattaatgatgtttatagtataatagcatatgaacatgtcttaatacaccaccaagctagcttacctagttgtatttttcaaattaatggcacccttaaatgctcaaagatggttaattagtagcaccagcattaagaaaacatacctgtaggttaaaacttaattggttatcagggccacgaacatcggagataaataatcatctgggggagacttgaccaacaagttcatctgatgtcagtgatgatgagtcctcttaatgacacatggtggggaaggatgagcaatctatagtatatgttatgttttggtttatctaccttaattctcagcatttatgcgatccgaatataatgctgatctttggtttttctggtcattttgtagtctgaattttcagatcagacaacagaactgaataaggttatgaatctgtgcttacattcttagctacttaattttttcatagttaaacaagtttgttataaatgaaaatgcgagctgctatcagaagattgacatattggcggtgaagcatgcatcatgtatggaagatggaacaagaggtagttgggaaaaaagcaaacttaccaacccctaactgttctaaccttttatctccaacatttctcaatttgttcctcgttggaaaataagcacgctacacgcgtggggttcaatcagcagtactatcttttctgatttcatgacaaaaacatgtcattgtttaccttattcagaaacaagaacctgaacatatacacaccaacaaatactactattccatttaacagcgggagaacttttgctgatgtatcaagaattctcagagcacacgcatcatctacatcactgcatgcgtatcaaccgtaccaaaaattaatccgttagcttaaccaaactcatctggttatgacaaaaaaaaatgctattgttctggtagctatctggacaccattcttcagttgtctgcctgtcggtgttagctaaatagttcagtcgctttctatgattcgagatatggctagctaaacacaattccaaaaggcccagaattctaagattcacactactttcagctctttcgtagtattaggttaatgattctaactggacacctaatcaggattttaaaaatattatagagaagagagagtgaggatgccttgtcaacctcagctcattcctagggaaggtgtatcgatcgcattacgtctccgagttgtcgcataaggcacacgataagtttgtttgcgcattttatatagcactccgtatcacttttgtacttctttgatctttgttagttttgatctgatcaagcagtagtaaactttaactattagtaaagtggttatgattacaaactaatgatacaattttgatactataatcagattattttataaaaatacagttggtgagagattggtaattcaaagtaaaaaccgacatttgtttctgaacggaggtaatactaactacgtacgcacgcacatttgagtaaatttgtacttcctccgtactcgtttaggacaatgtttaagtcaaaccttagaaatataaatcatgaataactctcaagttgttgagtttgaaaatgtaaaaattatatgaatagatttgtcttgaaaaatactttcatatgagtatgcatatattattttttaataaatatttttatagaaagaagaagttaaagttgtgttttggagaccgtgtcgctgtccaaaacgacttcctttacgagtacgtagggaatacgttaataaaagaaatacagtttacagtaaaaaaatccaataatatgcacaacaatagacaattcaataattaatctacactttccttccgcacctatagtacttggaccaaagtacatgttgaatgccaacgtctcatcagcgcattcaccttcaaaagatgtacaggccaccatttacgtcaatcgtaagccaacgcgtattcacgagaatacgttttctgtacgtgagaacacattccagtgtatacgccttcgcgctccatttacgatttcataacagggaggcgtatttcatagcgaacgtgacacgcagaaaccaacgaggagtccactccagtgatccgcgctcgcttggaaatccgagccgcggcctcagatccaattttccgagtcaaaattctgggaggaatccatccaatccgcggaggaagcttccaccgcgcagatccccaaaccccggcccatccccgtcctccaatccacatcgatcccctgcagattcgaggcggaaatgggggaggggatcaacggcgacgccggcgacctcgcggcggcgccgtacgaccagtggctcccattcagccccgccgggggatccccgcgcccatccgcgcgttacaaggtgcgcccaattccatttctacctccgattactcacggccttgtcgtctgatttttaatttttattgttgtagcagtagttttcgtaattttgtccgtattgatcagttggagtagtagatgttgtcgtatcaattctcagggaacgcacgttaagaacaaacgaatgcgagtagtagatgctgtcgtatcaattctcagggaacgcacgttaagaacaaacgaatgcgaaaatgtgacaaaccgcgtgcctaatcctgtggctttggagatgccatctctgcgtatagtgggacaatgccgagggattggcattaggactgaaatggccgacagaagtagtcttgagagaattttggtttcagatacgcgggtgtggccacattttggtaatttccctactgtcctgttttcatggttatctgattaaagccaaagagtttatgcaaggcggcatactgaaaccgttgttgtagtgtgctccatttgttagactgtgaaacccattaaaccttaagatagtatatgataaggataacttgaaaatctttgggttgcagcgttgcctagtcccctaggagatcttcttggtgcttagtcactactctttctccttttctcctctccttgttgttctcaggagtatggtttctaccctagttaatctagcgtgccctccctctcccctgtaaacccccatgatctgcgtcagcactcagcaggtcgcagttgtaaaatctctcttttcctgctaacatatcgatgcgcaaggcttttgcgagttcgccgaaaagaaaagataacttgaatagcgtgatgttctttggttattccatatgttgtctatcatattttattgaagtgctaatacatgacagcatgctgcggaagtggttcgtgaaaaactctatgtggttggtgggagtcgtaatggccgctatctatcagatatccaggtttttcagtctgcactaatgcactctaacaaatcatgtttctcatgccatttctccttctatatcataacaagggaaaacttcacaggtctttgattttaggacactcaagtggtcagcattaagtgctgctagagattcaagtcagttgaatatcgaaaataataccacagacccttcattccctgcactagcaggccacagtctggtaaacttactatcttttctctttcacttgtatggcaacttagcaatatttttatcatacaatccaacattggtatgtttcctatgctaacatagtgtcaccacttaggtcaactggaaaaaatatattgtggttgtagctgggaacaccagaacatcaacatcaaacaaggtttcaggtactcattcaaaagctctacaattatttgatagatatcgtcacactgaaacatagagcacagaatcttcctatcatagatcttcttagacatatatattgctaaataatccacttatgactttattgctttgccacaccaccaattaccatgatcctttatgaccttacatattgtatagatgcaatatttgaagcggctatatgtacattacatctttatatggacctatttatcgcttaagatagataatctccaataggggaactgaagcaatctgtacgttagttcagaaccctttcctggttttctttgcctctacctgtaaaatggtaccgactattccttgctccatgtcatttcatatgtcctggcaaaaaaatgagatgcaaatgaaatgctgactaagataattactcgatgtagtttcatgtgtttaaaggctgttcggattaactttgatattgttttaagtgatgatttttacatttccttatgttatgcacttgtacacagtgtactgaactttctatttaatcatatatgcttcataattagcttcactttcaaggtgccccaaacagtctatagtacttgctaacatgtaatatcatccttgcagttttttaattatgttctattaaaatttcaagaccggtatttatcttaaatgatagtgctgactatctgcatgcagtttggcttattaatgtggaaacaaatagctggtcttctgttgatacatatggaaaagttccagtaagaatcatttccttttgtatttgaaacaaaaagtaattcttttgaagtgatagaactgaatgtgctggcatatattttctgcagaattttctgaatactgaacttctctgcttttctcaaccagatatctcgtggtggtcaatctgtatccctggttggttctcgactgataatgtttggtggagaggataacaagaggcgacttctgaacgaccttcatatacttgacctggagacaatgatgtgggaagaagttaaaacagggtaagaatttatttattgattgtgcaaggttccatttacgtattgttattgcataattcattattatctttgtgtgaaataggaaaggtggtccagctcctaggtatgatcattcagctgctgtttatgctgatcagtatcttttgatctttggcggttcctctcactctacatgctttagtgatatctaccttcttgacttgcaaactgtaagtgttatatactctccatgtatcttgccatacagatggatttgtgcattgagtcacataccataagtttcaaaggcaaaaagttactcagttgtcttgatatttattcattgattgcctattgaagatctccaaaccccccgcactggtagttctaggttctagtaggcctttcaagtttcaaactgtatccagttaatggaaactaaggttgaatttctgggtggttgtatgcaatgactaagatccaacttcagtctgttatggcgaaaacttaacagcaactaccgtatatcataagctggcaataggtacataaaacaaatcatgttgtgcttctgaatgaaggagaattttatttcctccccttatatcaacccaagttatgatttgactaatactcctatgaacattgttttctattcattcttgattaagtgaagcttaatgcttacagatggagtggtctcaacctgacactcaaggcgcgcacataaatcctaggagtggtcatgctggtaccatgattgatgaaaattggtacatagttggtggcggagataacgcaagtggtaattcctgaacacatgatgctcatattttcattttatttgcaccacctgtgctgctgaagtagctagaaaatacaacgatgcaggttctactgatacaattatgatgaatgcttccaagttcgtttggtctgtagtcaccagtgtgccagcccgagatccgcttgcttgtgaggtaaacaattgtgctacctagttctgtgataaattttgctcatataaatttctatcgcacaactgtgagaacaaacacatttgaataggaagttccttcctctatacttacgtaaaacaaatcatgttaatagtaaactagccgaatttcctgcacagttctgtggcgattgctgaaaatgaaatcgtatttcttatacagctttaacaactcctatatatttctgatcaatctacatcatcataatctgtacccaccacaatttatggtatagataattttctttttcctcaaacttcagcagtaatttcaagtccctgacagcaaatgtggatgcttctctttctactgttttaagaacataatggattttgctttgctgacaacttttctttaatattatatttcttttttttaaaaaaaaaacttttcagggtctcactctttgctcaaccacagttgatggcgaaaagtttctggttgcctttggtggttacaatggacaatacaataatgaggtattgaatttaaaagagtgacttagttctatgcatagtacttcaattcagctttgaaatgatccatctgtagattttttacttttaggtgtcacatgtcttgtgccttcaatgcttgacacactcaggatgaatttgcatcttttttctcttttcatcttcccttcctttttggtgcacatttttccatttgcaatttcttcacaagtggacactgctgcagatatttgttatgaaacttaagccaaggaatttagtgcaacctcgtctgctccaatcaccagctgctgccgccgcagctgcttctgtgacagctgcctatgctgtaataactgatgagaaaaccagagacattgttgcaacggatgatttagatgtgaagagagttcagccttcaggttcttccaaacaaattactactgaacttgatgcacttaatggagagaaaggcaagctagagtccagactggcagaagttcgtgatgaaaactcaaaactaaaggatagactagatatggtaaagttatcgcatggtgaattgacaaaggtacatgtttattttccattttgtaaaatggaattctcaattcatctctaataaatcctcactatttttctttcttatgaaggagcttaaatcagttcaacatcagttagcagcagagggttctaggtgccagaaactggaggttctgtcttaatgcactacaatgaattctaagcatgagcatgccatcttcttttgtttgatccttttacatgcttctgaacgctaacctatttccttattctcgttaattcagtcccaaattgctgctgctcataaaagactggaatctactgattctttggagaatgaactagaagtgttgcggcaacaaatatctcaggtggagcaaaccatgacaactgctcaaagacagaaatctgggggtgtttggaagtgggtggcaggaagtgcagagatctctgatgatgaatagtaagtgctacttgcaacatcctggagtggaacttctggtgtacttgtgctttaagtaattgtcaaagcgcttttgttttgcaccactttactactggaactttattttaagaatgatgagatttgtgagctgccaattttaactcattttggtattgctattgtaacattgatataaaatggtaatatataacgatcggcaacacgaacatttcaagagttattgttttatagtatttcttcctatgtagtggttgtgtgagtcggccgataaaaaagttggtatttgtgaaatgaacccaataacagatcatctggggtagaaccttttcttggtcaaaatgtcatatcatatatataatcatatgcaagtcgtatttgctaaaatgtagatctcctgcgtgttcgagacaaagatatttgctaaaatgctgtgataccaaatacatgtagtcacgtacccacagaggttatttgaatttagacctgcatttcttctgtactccaaatacaaattcacacacagagttgtcacttaagtcctggaggctgaaggtacagaaatcaagtgctagcataaatactgcatttttctcctatcatgcattatgcccgtttccatacaatttgattcagactataatttcgtaatctgttgccactcattcaattcgctatatttcacagtacaacttttgcagtgcttgtaaccctttgagcatggttgtcaggtccaccaacaccaagacaagcagctaccaagcagagagacgcatgcagagctgctacagttttgagataatttctgggtgctccctcaagatcttgttcgcggttgattttgagataatatctcccaagacagtcttctgaatcttcttaagtagtggcacctggtagaaattttccataggcaagttagacattcaatagtaagagcataacatcatacaaatataccgaatcatttgtatcacattctagaaataattgattagttattaattttgtgttcgtcatggcatacttttctgtagtcggtgttacagaagtagaaagtgttcattggtttcggcgaggggatgaatacattgtttatatacctcaaacttgcaaatatactattcagatataaatttggttcagttgtcactatatgcatgtctcaattctgtgtgtatctcattcataaaccccgagaaggacatcgttccttgccaatgtttgttctagtacatatgttttcatgcatgatttttctagtgatgttgagtcgagaattttaccgaagaagttggttcacttgtcactgatattgaatgggcctttccgctgttttgcctgcaagaattttgacatgtaaagaaggtgaaatgtgccattttttcgtaagtgtcaaatattgactgatacatagaatcttcagtaagggcgcacttactgtgctatcaccgcggcgcttgcagcgtcaggcgccacctgcacttgctccgaagctgacgccatcatcttctccggcgagccggacatctccgtcagctcgacccacggcagccaccgccggaacgcctgccgcgcctccgtcgtcgcgagagcaggcaccaccgtcaccctcctcagcgaggagagcatcgtcaggggagccgcgagcgccgccgcgacgtcaggcgtcgccacgacgtcggtggcgccgtgcgcggccgccgcctccatggccgccgttggatcggaagacggcgaggcggcgagcagcaccgtggtcactccggcggctgggagcgcgagggcgagcagcggcaagccgtggacgctgcagatggggagagacgccaagcaaacacggccctcctccggcaagcttgcgccggagacggcggcgatgaggtcggcgtgcgtcatggtcgccgccgtcttgg

SEQ ID NO: 9161 - DNA, 29056 bp, Oryza sativa
  unsure (1)..(29056): unsure at all n locations
cgtgcaacaagtgcttccccaccttccaagccctcggcggccaccgcgccagccacaagaagcctcgcctccccggcgccgacgacgacaacgttaacaacgtcaccaacaccaacgccatcgtcgtcaagtccaagccgccgctgacgacgacgacgacgccgtcggcaccgtctccaccgccgcctcaggcggacgccgtcgtggtcccggacgtcaccaccgtgctgagcctgaacaacgtggccgccgccggcagcataatcaacaagctgagggtgcacgagtgctcgatatgcggcgccgagttcggctccgggcaggcgctgggcggccacatgcggcgccaccggccgctgcacgcgccgccggagcgcgcggcgaccacggccgccaccaccgccgccaccgccaccgccccggacaccaagaaagagggaagcacgagcatcaacctggagctcgacctcaacctgccggcgccgtccgacgaggagtccgtgtctcctccgccgccgccgccgccgccggtgctcctggctctcggcgggcagttcaacgacggcaagaagccaattctgcagctcaccgcctccgccgcgctggtcggctgccattattgacatgacatgagcaaagctaagctcaagaattcttttcgtgattaacactgatcaattgatcatttttttcacttcttcttcttaatttttttctgggggattaatcactatacatgcatgtttacttacaaatttgtttggcatgtacatcaagctggaaactgtaacatatactattgattctttcgattcttttctgtaagattanctatacatacatacatacatagggattgattgacatttatacatatgaaaatgaatcaagtttgagatcaatttttgtccagaaattattaaagtttggccgccacttggagtgtgatcgatcgagagtgtgcgagcacgagtgagtggtggaaagttgtctgaaaatgtgacgaaaaaaagaagatggtggcaatgcaattcgttgccattcttctcatggaaattaagaagggagtgggtgcaatgtaatggccggctacggactattcaactattcctttctctctctttttttattttaaaaaaattgatctgtatcctagcttagttagctagctagcttaatcacttaatcacttctgttcagtggcagtgtttgcaaaaattaaatatccctgtacatataaagcatgatctgtttatatacttttgatgcaatattattccctttcggacactgcactgcaaacatcacttccaattagttaatttatctcgggggagaaattaaattttgattaacgcctgctgtttgttcttaatacgtgttggtacgttaattgtatttattaatttggtaagtttcaagtagtggtgtacattagtacatacgtttccttttgggctttgctatagtagctagctgccttgctgcaataaagatagagatagtgaagtaggcaaagttgccaagggagttgagagggttgcaagcaaaagacaattggaagctagccaacaatgcaagctgctactagctagcagtatcagtatgagtgagagttgggcaaattaattaatataattggcatatatatatatatatatttgatgagcaagagtgagttgtttcagtttgttgcctagcttcactactggcctgtcttgctcaattagttgcttgcccttggatatatgtgtgtgtatgtatgctttattagttggtttctccagcatcaagtaagtaaattaatcacaggggcatatgcatatcagcatatgcaatgaaagatgcaaattaggccggatcaggtgcttttcctgcaggggagcttgttttgtttgcaagctagcctgcagccacagccagctgcagtgtgcatgcatgctgtgatcctcttcagctctgcactagcatatatacatgagcaacaagttaaggagataataacatatactatatgattaatcaattaattagtcgatctctgaagtggatctcatgcatgcatcttcaattaccactaaagttaattaatatattagtgttgatcgatgaaaatcattttttttcgtacttagacctaaagtcagaattttcatgatcccctgcatgtgtgtgtacttgtgaatatctatctattgagtgctgatattttccctcttatgcaagaagtcacttgatattccaaattgggcaatttggatcactgcatgtccaactatacacactgttcatgtcatcagcatcccagccgtccccttattaatgtagtgtacatatccacaagctgcactattaattgttgattgcaaaaattaagctgaactaacaaaatttcaattctgaattaacgtccactccatatagctaggtgtttaatttgcaaattaattaaaaattaatccgtggtttgcattaggcaccaagtgtttccaagtggccaatcgctgcacctgcaaaggtaaggtagctgaagtgaaaaggcaggcaggcaggcgatactttccgtgacatgtacttacttttattaatttgacagcaagacgaacatataggccggccagatgagctgagctgagctagctatagatcatggatcgatggatggatggaatatatacttacctgcagaatgcatgcatgcatgcatatgatccatatgcatatagattgttggtcgatcatatctctctatatatatctatactatacggcatggcatctcatcactcatgtctaatcttctcctctatgtacgtactttggcctgcctgcctgctgaataaatatgcgttgaattaataattaagctaagctagatagatatgcaagcagtatgcaagtcgaccgatagatcgatctgtcgcaaattaaattaagacgcgtatatatttgcatgcagtacaccatgaatttctccttgtatatatgtcactactgatcagtaccactactctcgagttaatgaaaatccttatctaaaaagattagactgatatttatgttatcagtgatcgatttttattctgatttctgaattatactcgtattaattaattagcaagctagagagtgtatcttgcagctagtcttgaacgtaccagagtagtacgtcttgaatattcttggtacacgtaggtacatatatgactggatcaaagagctaattaagctagctattactgacttttttatttataatttaaccaaccggccggtaccatcttgcagcaacgatcgatcgatcaatgatattctgcagtaagatgatatatatgccattggtgaagtgcacgtcttgtatatatgcagtactagctagctattttgctgtgtactcttagtttgcgtaagtagaccaaaaattcagccttaatttctgtcctcgcaaaaaagaaaaaaaaatgtgtctttctgcaacagaagaaaagtaaactgcgaagaaaactagaaattaattaaagagatttatctttttgaataaaaagatctatctggggttggagttgacattattgccacatggctttgagttcttgcggttgcccaaataaagcttcttcgttctgatggctagcttaattgatcatcagttggtatactctgaagctaatagggctagctagtacatgatttgtatggcttaatctgttgcataaagaaacaccgttagttagctggtgtcatctgattactagctatatatacagttcttcagctattagctcgtcgtgtgggttgatttcgacctgacttaatcacgggagctccatgattaatctggtgagttgtactgactaaccagtaaggtagctagctaattaagcagggtatgatcgagtcaagtggatcgagtagctagcagtgcacttttttttaattaattatgagatgtactagtagtccaatagtgctagctactagtgtaattagcttatggagtatatggtttttgttagttgcctttgcaagcttccaatgtgggccccaccccattggtaggcaagaggaacatcaatcaaacatgtgctgatatattggtacagtagagcaataagagtagcagtagcagtagagcagccggccatgccatttgctacatcaccaatacactgaaagtgcactatagattggtggcatcatatatatatattcttgtactatacagctcccaatttccaactccaactgccgtccttgcatatctagctgcaattgtctatggctttcacattctttcaatttcctcctctaaaatcacatgcaagatttctggcatcatccaagaaatatgtatacatgtatcaattaatttgtacttatatttccttcttttatatactctgttttgattctctctcacacacaaattttccaacaagtcttctgaaactcttcagagagaagaagcaaacctaattcacactatttttaaatgcatatttttggtacttgatgcaccttgagagagagagagagagagagagagatagagagattacgtatgtgttatggagatgtccctgtcttgaaagcaggtaagattagcaaagtgctttaatttattgagtattggttccactttctccttttcagcttgccaagatgaggcttatcaagttgccacagacatattagtactctgttgggttctctttctcctacgcatagacacatcgatgcctaaagtcgaaaatgtgcatgttctttttcatagctatgtgatgcttgtcattagcctgtcaggaataattgtattgttgtgtgcttgctaggcaaagataatcttctttaacattctttataacattaacagtcacatcatttggagtagagctgctcatatattacactgagtcacatcatttgggcagagctaattttctgacttggtttattttcagccgttaattaacagcagggtattcagacaaaaaacacatgagcccatcaagcataactgaacaaattgagtggttgcaaattactaatagttcctgcaaaagaaagcaagggctctctcaatcaaagctgctgtttgcatttacttcgactttggtcgattaggcaggagagtgttcatgtccaggtcagttatcgaccaagaaaatattaggcagcacatctgcttgtcaaagcagttgatccttcagtgacgactagacgatggagtgggaaaaaaaacacaaccaggactgacaaaacagtataggagttgccatagttaagataactaacgtgtcaagccaggaacagtgagtgacaataagtagcattctggaatgaatgattcttcagatcacgtggaaacggttgttttgcaggtgaagaaaaagcaggcatcgtcgcacaggcttggctcaactgtgatcttgtcactttctttctggcctttacacttgtcaaacaggactggttcatgcgtttccttccagtttcaacattctccaacctccaggctacaagaaggggctgctgccatgccaacctgaagcgttcatctctccaataaaggctgcaaaatgaccaagttgagtttccgggttttagttttcgcttcttgaagttgatcccctgaattcctcagcaagaaattctgtaggacatatgactagtcaagaaaactttaaacaagaattttctacagcatgtcattcagtgatcatttcttgctttacaaagacagtgtaaaatttattattatgcccaacagtacagcagcatttagactgactaaaagcctaaaccattacatgctaaaacggactaactcatgggactaaaattctgagacaaaggcgaattgtcgtggaacatctattaatatacaacagtgaaattttacctgacacctattaatgtacatgtccagttccctgcatcaataacaaacatcgggttcactggatataccaatcccatctcgtgtactacagtgaaagtttagaactgacattgcgtacctgcatcaccagctcactccaatgcatccattgtgcatcattcatcttgtcaagagagctcctgtttctcaatgcaaaaggaagctagagttgtatcaatagcatagcatcgtaaatccagcaggagaggcgagacctccatgtaaacatcatgagccattacacttgccggaatcctgaaattcaatgctggaacctgaaaaatgaatgaagtagataatatccatataagttgactaaagatgggtaatgaccaaagtacaatatcagtgcatcatcttaccaattgcccatcactgaatgcaaaaataggatacaccaaaacgaataaatcttaagagcccacgtttcgcacttcacagtggtgcttctttctcattagtatgccctactgatacaatctgcaaagctgtgcctccaacaagccaagctgtgagttctggttgttcctcaaggtatttcaggggagctgtatttccatctcttgtctcaacaccatagacaaatggaagtctcatggtaagaaagctctcaggtggaaggacaactcgacaaccaagactgaacgatccttgttgatcatggtcagaagcatttgaaggcaaacatgaggcctgatgccagtgagataaaacgaaacttaactcgcataatatttaagaaatgcatgtcgtaaaaaaaaattgcatcccatgatcccagtttacaagtgagaatttcatttgttcgatactaaaatatcaagaagagattcatttgcttgatactagaacattgagaagataaaacgactacatgagtagggatgattgtacttgcctcaaactgtacaactgggcagcttgccagcagaacagggaaatcaggtgtgaccttcaccaaaaagagtagccgtatcagtgaaaagacaatattaaagaacagataaatactacaaggttcaaaaggagagcagcttacaataaaaatccgttgaagttgtgacacagcagcagcaacctttgcatcttgatttcccttcctatctgagctcttgcaatgtgggcagtgcatatatatgggcagatttctgtttagaagtgaaaatgcttctccaccatcatcaagtgtaacataatgaagagaaagctctccctttctttcattctgtggatctgaaagccagtgagaaggctgcaaggtctcagcgtcaaccctgggcttaagcaattgctgctggctgtttctccctgatgaatccattggcctattgagcttccctccgctggtcacatccattgttgctgctaatctagatgcattttggggcaacttttgtgaaccatgtttgctttctgcttcattatttagattagatctttcaaactgcaaataagacgaatcaatctccttgagatgtttctctgacagtaagaaacgatgaccataggaacactcgtgctcaaatccgacatataccatgaactgctgtatagattgattaacttctttagtctcttttccgacaaccattggcactatattgctccctatctgtagaaatggctttccgccagcacttccattactcttatctctgctcactttctcagattcattgtcagctataggtccttgactaagagctggatgaccacggccattagtttggtctgctccactcacttgccgctcatctttccagttgccaggttttaatggcctcttctgttggagagcaggaaactcagaatcccttgctgtgtggccagcaacaacttcagcaaaaggcttcttcatagtaaagtttggaagacctttaccaaaattaatacttgaattgttcattgactcgacttcaggttgttttctagaattttcaagtttcatagatttaatttctgctgtgacttgggtcacggccgattttacttctccagcaacaatagggggagcctgaggatctgcattagatgccgtggagaaaggtttattggtagcatgagtgccatgtttcccttgtcctttcccaagagaaatcgtccaccttaaaagatatttttccttggagcaaaaacctgcttggagcaatccttttgttggtttgtaatatcttgctcctccaagccgcaccaaacgccaagaggatactggaaatgcaccagcattggtctctcttggaagcacaagagtaggtaacagatcttcacaattagagaagcagttaaaggtcatgttcgctgcctcaaaatcaaaagggtcatccctaagacggcgtgaccggccacaggcacatgcatggaggaaaacatatccactagaaaactgtaacgctgcatctgatggagaggatttaccgtgtctctggtgcttacatggtctgccagtaagactgacagcatcgcattgctgccttccagattcccatattgcttggcattcatcttttagcttcttggagaatacttggacagccggtcctttaaccattgagtggaaggatcgtaaagctttctgtagctgtacttcatgcatgctggttgggtaaaaggcaggcaaatctttcaaatacacctccttagcagctggaagtatcctttggcaccatgatgaagaaaatttcacattaagccccttattgccttccaagcaagataaagcagtttgaattgcgttggatcctgctgaaggaagttgatcgttctttggaaatgaacttgtatgagtaggtgatgccttcatgttttgggaactacttaacccatcttccccactaaacagtgcagacaaaatagatgaacttatagacaaccatgtatcgaaagtagggagatcaggagcactcatttgcttcccggatgctgctgatgctgcagcagcagctgctgctgctgccaccattccaacaccagaaacaggaccagcagttgtattgcttgagtgtccccctcttcctctcagcccatctgattgtcgaaatataaaatccttgatgaactgaacatcttcatgggttgctggatggcaattgttctccagcgaagaaacatccaatgatgatttggatgtcaaagagtcttcaaacagtcctgcaatgatatccaatggctcacgtttcttactaattgaccgatccaacagtgcaacgacccttgatgtatcaagtgagaacagaggtaggtggctcacattactgacacccctcgaaacaatatgccctggctctagacccacaagtgtccgacacttctttagcaagaaacgtatctgaccttctacagaggaatgcagcttcttgctgaaagtaccatcagatctgattgctggcctagcaagcataaccactgaactagaaccttttgaagtcatgttaggttttggcaagccatcagtgttagaagcttgatttgatgatgtgtcgttcgtatcatccggacttgtcggagcacctggagcatcagtgatatcatcctcaaagacaaacagaacaacagggatgcatagccctggcagcatacaaggatgtgagccagttcctgacatcaacgagattgctgagggatgacgacctccacggcgtgcaggaggagagatggatgaggccctgtgagtaggctttgttggagtattagagcgagcaacttttgatggcactgcaggagctactagtgacttcacaaacggtgcaatagcatgctttgaggattgcaacagacggaatttcttcaaaatctgtgtgtcgaaccggaagccttcttggagaaatattattacatggcaaacctggcaacgtatagaaaataaaagcaaatcaaaatcaacattaccaaacaactgaatcctaaatttccattagctaaagtttgacggtaacttctaggatcagagcaccaatcaaatgttactgacaaatttgaatcgcacgaggatttgcaagcaaggtaggaaaaccacaacaaataggttaatttaattgctacaactggataaacaaacttaaaagtgtcatcttaaatttttctccctggcaaatcaagttaggaaacaagtgcatttatcagctaaccacagattttttttttagtttattttgcattcccacggtccaggtaacagctggataaatgatgcccctatctcccacaacatcgccacttcaaaactaaccgatcgtagttgtcaaagttatccagttaggcatgagaaagattgaacccagccactaaattactgtaccaagttctgtagtttgcattggctgctacacagcgtgacaatttagaggtagatgacctaatacaaatgtagagaccgcgctatgatagcttcatatcatatcagggcaaaacaaaagctgagacctccttcacagctagaatcaccatctcatgatctacatcgaaacgattataaacactcacggagaacatgaagagcagctcccgtagatcgcccgccccctccagaggtgtcggcggcgacggagcgaggtgcaggaacaccaccctcttctccccgtcgcggtggtacctgactccgcccgcgagggtcctggcggagccaccaggggagaacacatgggcgtccaggatccggtcggcgaggcgggcagtgcccccgccgccgacgaagccgacggcgacgacgccgtcgtgggagggcggggtggcggcggggggcggcggggagggggaggaggaggcgggtggcgggggcgtgcgggagaggacgcggacggccggggaggggcccgcctgaggcggcggctccatcgccggcggcgaggtgggggtgggtggcgccgccgcagtagcagcaacctctgtctgtgtattgcgagacgccaactaattgttaaatgggcttctacctgggatttcacgagggcttagtgggctttctatctatatgggccggtaatgttaaataggcttttgttagagttgggcccgttgtatgggctgctgagctccgtttcgtcggttagttggttttctgatatctcaaatgggggaaagaaaaaaaaataaagataagaaattgtgtcggtttcggctgttccacaatgttgggttgttcaatgaaccaaacaagaagaaaaaaaatcactgtgagtaataaatgggcatgcagtgtagtgttgtccgcggttagatcagtcatgctcgctcaccgaccatcgatcctagctaattaagctagcaaatgatcatgagcgagacatatcacaaagatcacagtgtgcatatattgcacaagctttaatatatttctctgttcatcatccttaagggaaaaaagattaatgatttaggtaattaagcacacattgcataattaagccggccgagctacttagcttatttatatataggagatatgctaccacccacaaacttgcacgagctagcattatattcgccctgaacaaattaagctagcaactcctccggtttgtaagatcgatcaatggctatcattggtcggaggcagcagcagggtgtcgcggcggcggcggcgacgttggtggcgttgatggcggtggtggtggcggcggcggcggaagcgcagccgtcgccgggggtgtacccgagcaggatgttccgagcgcgggagttcgggcgcgacttccggagcctgtggggggcggagcaccagcagcaggaggcggcggcgccggagacgggggtgacggtgtggctggaccggcggtcggggagcgggttcaagtcgcggcgggcttaccggagcgggtacttcggggcgtgggtgcggctgcagcgcgggtacacggcgggggtgatcaccgccttctacctgtccaacggcgaggcgcacccggggtggcacgacgaggtggacatggagttcctcggcaccacccccgggaagccctacacgctgcagaccaacgtcttctccctcggctccggcgacccgccccggtccctcggccgcgagatcaagttccacctctggttcgaccccaccgccgacttccaccactacgccatcctctggacatccgaccacatcatgtcagttccatcatttcttaatttacagcttaatgatcaaccgttacgttaaattcaattatattatctactcactccgtttaaggtttcaagattttttaattttagtcaatattaaattgcttcaaatttaaccaaatttatagaaaaaatattaatattatcgatcaatataaatttattataacaatatatttaattattaattacataaaagtaatttagtaatgtaaatattactatatttatttataaacttgatcaaattagatacagtttgactttaactaaaattaaaacatcttatatcctaaaatagagaaagtacttaaaaacagagtaagcagtgttcatcactttcttgattgcttaattgggctaaacgaaaatgtccgatgatggatcttgatgtttccttgtcggtggctatagcctatggtagcaagaaagatttatgtcgatattatattagcgcaaattaagtaggagtaggagtatcaagcatggacaagccgtacggcaaaactgcagggtgccgtaccaacgctttaaacacttgtggcagcggcgacactgacacgtagtacgattgcagcagtacagtacagtgcttgatttggcatgtagctagcgatcatcaatatcttaggccgccgacaccgactccctgtcgtcgttcgtcccagcatctgcataaatgtagtgctagtatatgatcacatatgttcaattaatttcataaatactcactccttctctaaatatttaacgtcattgactttttaaatatatttaactgtttatcttattaaaaaaatttaagtaattattaattcttttcctatcatttaattcattgttaaatatactactactactcaagtttttgaataatattcatacaagtttttaaataagacaaacggtcaaacatgtttaaaaagccaacggcgttaaatattttgttacagagggagtataatgttaatactagcatggatgcatgaataatgtatttgtgttatgatggatcgatcagcttcttggtggacgacgtgccgatccggcggtacgggcggcggagcgcggggggcgcggcggggttcccggcgaggccgatgtgggtatacggctccatctgggacgcgtcgtcgtgggcgacggaggacggcaggtacagggcggactacagttaccagccgttcgtcgcgcgcttctcggccttcctcctccggggatgctcgccgcacgcgccccgcacctgcgccgcccccgtcgccggcgacctcaccgccgcccagctcgccgccatgcgctgggcgcagcgcttccacatggtctacaactactgctacgaccccaagcgggatcattccctcaccccggaatgccgcacccacctgcacccatcgtcctcatcctccaactcctcctcgtcgtcgtaccacggctagctaactactgcttaattatctaatacgccgccatgtatactccatctaatacgctcctccgatcctcaattaagctatctttgtcgtctaattaattatattgtgcccctgtttgtcaattaatcgtttgtttatatatatactactgcaatggatgaatgggcatgctgtttaattaatgttgaatgggcatgctgtttaattaatgttatgttttctcaacatgattaattaccgtttcgagaaacacccattagttttccggttagctccataggatggtgggctagccttaccccttctaattgatactagctctaatatttatgtttttattaattgccattttcttctacactacttcctccgttttataatgtaagactttttagcattgtctatatttatttagattcattaacatctatatatatatgtgggtaatggtagaaagtcttacattatgaaatagagggagtacctccaaatcgtgtcaagacagtgcatactctggctgatatgataaccggtcgctgctgctgttgcgttgttggttggtgtctcaccaataagtacggacgtgcatattcatgcatgcatgcatcaaaaaataaagaagagatgaagcatcgattcgatgcgatcaccgacgaggcgacgacacagtagcagcgccaacacgcgctttcctgtctgccgcacgtccattaatgggccgcgccttcatagcaatacagttcggcacgataacaaacaggcccatgacatggctgtcgcaacacccttccggcccatttatagttgggccgttggtcgctcaactcaatccccttccggcccaaagcattgcccccgtcccctcggagagatttgcacttgcttccttccttccttcctccaaatctccaattccccattcgcgattcagaagaagagttctcctagttccagcttccaagtcaagggcaaggcgagcagccagccatcccgcgaaggcgactcgatccggcgacatggtgcgtattccccgtgttctaatccagcaacttttgctctgatctgattattattatgtctgctcccccctcttgtactgattactgatgaaacatcgtgattcgatttgtgctccatgtacaggtttgcctcgcgtgcttgcttcccctcttcttgatccccgtcgtcaacgccctccccttgctcttccacctcatcctcgtaacgccccaatccctttcccctctctctctctctctctctctctctctctctctctctctctctctctctctctctctttttgttcaatcagatcttctcacgaatggttatttcatggttgtttctttactagcgagcgtataattcaaccatcttaggttagcctgatctgttagcttgattgactagcaacaaacaggaaggaactatctataactgcacattttggtttaaccacggttatcgaatactgcaagtaattggcaactatagtcctcgcttgccagtctgtgccttatccactaggattcctaaaggaatcttgataattgttgtgtgctttccccaaaaaggagacgattatttgccgttctttgtaaccatgttcccatagttatgctcattggacagctgaaatatcatacttcctccgtttcacaatgtaagactttctagtattgcctacattcatttagatgttgatgaatctagacatatgtatgtgtttagatccattaacatctatatgtatgtgagcaatgctagaaagtcttacattgtgaaacggagggactataatagttacactcctcgtagagccgaaagatatagcataaatagtaactgaaaggcaaaaggctacataaggttccccttcttgacttgacaataaataatgctgaaagatgttttgctattcatattactctggataacaaataactaaggccctgtttctctcagctttggattattataatctagattattgagtcagattactataagctagattgttataatatgtagtagaataagcggttagttgtttctttcctaaattattagagcctagattattgggtttgcaagtctaaagagagagtggggtggcatggtgggtaatttttcaccaaataatctggaaaaagctcacctaaatgagcttatcagattataataagctgggctccagattataataagctacttaaataagttgtctgtttctttccgcttactctcaataatctggattataataatcccaagctgaaagaaataaaataatgttctgtagctgctgagtgttttctatttgagggcagcaaaggcgtcaaatgttggaacaaatgaagaattttgtccatgtttcaaacatgccctgaactatgccaatctcttttcttaatgaaaacttgatgtacgcggtctagtttagcgctgcctgaagtagccttattggtgttttagcacgcaatgtgcatatgtttctaggttctcctgttatctgtattctgaaaattgattcatgttctgaatgacattccagagcaagatttatcgactatttggatgggaatacaggaggcctgaaagagccccgcctgcttgcccgtttaagcctgcggcaaagaacaatgaagtaagcttccatgctagtatttgctatacttatttctgccttaagtcgaccatttcattatgcaagatattaacacttagcatgcccccactgataatttacaaactctatagagacagctagcttttatgcatggtactgcatcatactagagccagtagggaattttgcagcaactcatctgtcacagnggccattctgatgtgattggtttactccttttgctgtacagggtgcaagtgaatcaaaacctctagttgaaccccaaagcgctagtactactactaccacagcagaagataagaaagaggattaatgttgtcgagcagcggcgaacgtttcaaacaacagtgttaatgtttgtgaccgtagctattaagaaataattgttatatgaatgaatatactccccacatatgtttgggcagtgattgttgattcccccttccatcatgtaccaaaacgttggtggtagtgggcacactgctaactgcatgctagcaatcgtaaactgctacacctttccattactctgatgctgtgaatgctcaaaagaacatggtctgattgcacaattgaaatactgcttatttgacagtgtcacgagaccaaaaagaaaaggaaggaaacgtggttgttgatttcagcagcaaattgatgcagcatgaatgaatgactactacttggtgtactcgaggacagcgtagaaagggtcgaggtagatggcccggaaggaggcgaagccggcggcgaggccgaggtggcggaactcctcctcggatcgctccctgccctgagtccggtaggtggccatgacgaagatgtcgttctccagcagcgccctcgtcctcgtgctgccgtccgtcgtgtccggcaccaccggctcgcaggcgatcaccttcccgccgcccggcagcgccttgtggcagttgctcaggatcgccgtgcactcctcgttcgtccatgtcgtcagaacccactgcatacgtatgccgtataaaaatgaactagcagggttgttttaattcatgtacatacgtaattcgatgcaaaaaaaaaaacaaaatgggaattaatgagccattcactgcatgtttgaattcttggacagaatctgatgcagaaagaaaaattggggggggggggggggggtatactattacttaccttcatgaagatggcatcaccggaggggatggacttgaacatgtccccgccaacatgcctcactcctgaattttaatggtcactaattagagcatgtacaatagcgaactataagctaactataaacacattttgagaaaataaaagataagagcggatataagagcaagtttaatagtatagcccactactagctccaattcattcttagctaatctaatagtcaattcatacaatagttgtttattatactattaatatatgatcatatatgtcatacacacattgtgtattgaagtccgcactgcagctggctacaaatctgtagcccactgcttttctctcttatgttttatcttattaaaatatgtttgcaggtggttaatagtctgctattgtacctgctctaatagcagactataagctagctatgaacatattttaaggagataaaaaagaagagcaacggactacagatttgtagccagctgtagcatggactccaagacataatgtgtgtatgacacgtggaaccaggtattaatagtgtggtaagcaactattatatgaattggctattaaattggctatagatgatttggagatatagttggctatcctattaaacttgctctaagagagaagagtagtgggctacagatttgtagtcggctgcagtacggacttcaagatatatgtgtatatgacaggtggaaccagatattaattatgtaatatatgtttataggtaaatattgtataaattagctattaaattgactatatatgatttagagttagtagttggctatactattaaacttgctcttagcatcaggaacacaacaaaatgaccctgagccccatgcatattttagcgaaaaacaaatagtcccctacattgatcgacgtgtacaactcgtgcttcacttgcatgatgtacggtagtatacttgtattattgtgtggcgtctcgtgatccgttatgtcaaacatcacacgtgaagtagctgcaaaccaacgtactactcctgtattattattaggcgtacgtatcgtttcccaggcgcttcttgtttgtagtttgtaaccactgtttcatctctaacaacacaaatactctctccgtttcaaaatatttaataccgttgactttttagcatatgtttgaccgttcgtcttattaaaaaatttatgaaatatgtaaaaccatatgtgtatatgaaagtatatttaacaatgaatcaaatgatatgaaaagaataaataattatttaaattttttgaataagatgaatggtcaaacattttaaaattttgaaaccgagggagtacttcactatcgtttgtttcctgaaactcgtggtaggtagtgatgaaggaaacgatcgagtccttgtggatgaatcgacgtcacgtgaagcaagccaaccagccatggagagacaaacgtgagccacagtggatatgctgggatgacgtcactcatactcaccgggaatgggcggcgccgccgcgacgacgtcgggcaggtcgaagttgacgccgtcccggatggtgcggacccgccgcatgatcatctccaggcacgcgccggagctgcctcccacgtccaccagcgtgctcaccccctcgaacccgccgtcgccgtagccctccagcagcgcctccatgaacggctccgacacccccgtcatcgcccggagcatcacctcgttcgcctccctgcaattgcaagtccgaatccgatggagattagattggagaggaagcagctagcagattataattaattggttgatctaattctaatctacctgtccttgccgtagtaggcgtaggcggggacgccggcgttggcgcgggcgaagggctcggggccggaggggtcgaggacggcctcgtggaggaggggccaggcgcggacgagcgcatcctggtggtgctgcagaacgtagtcggcgtaggacgcgccggagccggaggggctaccgccgccgccggggacgagggtgcggccgacggcggtgagcgagaagcggcgcggggagggggaggatgatccggtgtgctcggagaagacgccgcgggaggcgaggaggcggaggaggcgctcgaggacggaggggtccgggtggcccgcggggaggaggtcggcggcggcgagcggggcgttggcgcctcccgcccagagcttggcggggacgccgaggcggatgacggcggtgagcgccatggggacggagatcatgttggcgagctccatcatcgccagcctggcctccgccggggacagttcgccgtctcctccgccgcccattttccaaactcttactcactcagatgtgatgaatctcaagtcaacactactcaactcaactgacgagacgagacaactgctgcggttgagttgtttccttcttctatctatctatatactgtatatgtactcgctgacatgtgggcccagattctatcgttggccaagatcgaatgccacatgggctctagcgataattggtcaacaattcaaatctttgtttaaatttcttttcaatgcgatgggttctttttgggtcctgatggttagataagctcgattaccgtgtataaccagcagcaaggagaaccggcaaatctcctctctcctctggttggttccagcttgcttaaaaaatagtagcgcgagatcggatggtgcatgctaccggggactaatgcgtaattagctgaaagcgcgaggaatgctttgcaaaacgtcgctgacgccacggggtttagagaggttaatacgacgttacattcttttactactccctcactctctaaatatttatcatcgttgacttttttttaaatatatttgaccgtttattttatttacaacctagactagggataagttcatgttttcacttaacaccatatatgttgacaagctttttcactttggactggagtgaagggtttgagctgccaccgtggctctgtccatggcatgcaatgcaagcaggaggtggtggactccactcgtctccacctccgttctgcattgccatcttccctgggatcgatctagtaaatcgacagttctaattaattaaaaagtctacagtaaaaataatgtcaagcaactctgtggtcaacattagtcactagggcggcggtagacaggtcatcgaaaccctcaccggcttcatcaggcagtgtgactttgtcagtttcatcaatggagaacatctcgcatgatgctaggattgaaaagaggacggagtcacgggtactttatttatggtttcttagggagattgttaattttgggttaaacttgattgattttgtgcaaatttagctactgctccgttgcgattgctgcgttagttattggtataagtgaagtaatttatgtgcacttggagaagcaacatagcagtctaaaccattgacctggtgcaaaatgcaaaagcttgcaaatatatatggtgttaagtgaaaacatagttatatctctagtccatgttgcaattattttcctatcatttgatttattgttaaatatacttttatgtatacatatagttttatatattttataaaagtgtttaaataagacgaacgatcacatgtgctaaaaagtaaacggcatcaaatatttaaagaaaaagggagtacattttagttacttttagctaaaaaataattttttgactagttatttattagggaaaagcgtgataccacaaatatagtaaatatagctgctcccattggttttgacatgcacgcacattacacgtgtgcaggcaccgcgcaatgccaatgcaccacgcgtgtcaaaccaagcaacaccccagccgacaatctgcatcacctcctttttagataataataacccgaataacctaatctattctatactggctacacacaccactatcgtcagcatcagaacacggctgacccgcaaccgcaaggcatgggcttcttggaagaagaaagatcatgataataatgcaatagttcagtcaaaagaggtgggattagattaataatctatatgagtaactgccagtgtctcttctgttcagttcagttcaggacataaatacagggaaagaacttacaatgggcagccgctctctttttactccagtcctacccatcgcaaactctttccaacaatcaattaacacgccctttgctgctcgcgctgcggccaacagcaaggcaacaaatatgtaaacctgtagtagatcgatagatacacaagaagaagacgagagaggacagacaaaaatggaagaagaaaaagaatgaagaagaagcagcagcagagctcttgtttcccctttttcctgaacaaagcttcgtgcagcaaaacttcgctttttccatcagttttattcccttccctactgtatttccacaactttacattactgaatatgcccgaaccacctccgcgatcggcgctcggcatagtgggcatttgccaccactgcgaattagctcgtttgcacattttgagcaagtacacatgtgcccgcatctgtcaccatcaccaaatgggttttacaagtacatcagacaaaaaaggttagagattagtaacatcaaagtatcagacatgtttagctgtgaagctgacctgtataatagagaatcaatttgcgcatcgcagcatacgcagcaggttcccttcctcacttgatcccattttgatccatcgtcagatagatccgtcggataccctgaaaaataaaagggacaggttgtttcagtgatttctgtacatacagagtttcagcgaaattactgtatgacaaaaataagaaacacgcaactaactgacaacatgcacaatgtctattaatagcataattaccggaaataaaacttaaactacgtaaagtgcataacaacataataaggaaattcaggtattgtccctatcagctgtagttaggtgtgccgtgtcctctgtgttagcaaagacagttatatgatgcacagatatctcagtatgcaacaaggagcaatggagtacaaccttcaggtcctgcaaagcgattcaaggccgccgacacttcttgtctcactgagcgttggagttcaagttgcatgtccatgcacgcctccagcatcctctgtatgctgctcatcccttgttgaagtctacccatgtcagctttcaaatcattaatagcatcccattcctgcaaggatgcaaagctgaataaatcctccaagatgaaactctaaatgagcatacagggcacaacttaattcaagcaaaaggaactaattaaaagtcacttataaatttcacggttctgacatctcatgggtcatggacccatggcagctggcacatttaggaaaaaggagtatgaaggaaaaacaaattctaaagacgctacagatcatgaatcattgcatgatattaacaatgtgtgtacagaaaacagatttgcaaagcatggtattgaaatagcacagataaagaaacaactattatgcaatagctccaaaaatttaatgaagagataatgcacgggatctctgtgatgtaccctgtgtctagtgctgcagttgttatgacgcaatttttttgggccttagtggctgtcggggtggcaaaggtgggggagggataacaagcgcaggtctgttaacaggagcttggaattgccgagtttcagcattcctctcttgttcctgattttcgtttggtgaattcacagatggaatagctgcatcgagattccaattgaggggtccacgaccacgtctttgaacatatgaccttattaatcgctccaaactttcaccaaaaccattactaagaagattggatacacttcgcctgaaagtacaaacgtggtcattgatcagaataagaacagatttaatatcaataaaagaatatgtttggaagaaattctagtactgaaggtcaatatacctgctaagcaattctctcagttccatgctgtacacattgtcatcatctggcgggatgaatctattttcagttctaggaatggggcccatgtcaagtggagaatcttggaaatcatcttgccagttctcagtaccatgagactcgtcatcatgccattcatcatgctcatcttgaagatgatcatgctccctggcatcatcctccatagtttcactgtgtagttcctctgcattatcttcccaatttctttcagcatcctctgcagtttcattgggccacctatcaagtgagtcgtccagagatggctgccaaaatcttgcatcccgtcctgcctcatcttgcagcctattgtcaacttgagtttcatgcatctcaaccatgttatccaaagctacacttggtgactctatggcagcattttctgcatctgcctcctgtaaacccacatcctcaagcataatttgggtcgtattctcagtaccagtgagggccctgacctcagccccttgttgaggttcgtcactacctagtactccaacactttcagccacagaagaatcaaaccggctaacatcttcactacttacagcactctctgatctgaaataagcatgttgagccatttgtcattagctggatgcaatatcataaaccctatagatattccttacgtgcaaagaactcaaaaaagacaatggcaagaggcatgcattctttggcagtttgctgtcatcagtttatctgatgctgcattaagcctaaccggcagtgcacaagaacatacttcccatttttcatgttgcatggcattgtgaatttttcacagcatcaggtgcaactctgaccattgatggacagtgttatgttagccaaataatacataactatacttcagtagaagcaattctggttctaatatttcaaaaagtgagtggacttgcacttcacgtattagtagaaagaattaaagttgcatggtatggcaaccaagaataaatgtgtccttcattgtgcttaacttatgtaccacatgcaccatgagtgcatgacacagtttgaagtttggcatttgaaactttagattttactctcgttccatctactatggtatgaccatactaattactggtcatgagaagttctaaaaatcaccacaatatacacatcaaatgaaagtgctgatgttgctccttttacaaactactctaaatcataaaagatgtaatcattcaatgcagcagtaaaaaattccatggctagtataccgttaaagataatggttatatcatattgaaatgttgtcagtaacatgaataaaaggagcacttaagcaacaggagatcactaaaacagcaccactgatgaaacctactaagcagttggggtaccagctaatagatggtaccaccatctactaggacggctcttagaagaagatatagagaggccggattcaattcaggggccctaacttccatagtgtgctactagtcaacatcatcaatatatttcatagtaccatttaggacaaattggttggtgaacagtccctaacgtgtagagcaagactgacaagttaaggtagggaccagtataattagtagaactggaacctgaaaccttgcctgtatacttgctgtgatgaaaatactcatttgatgctctagttttaaaagtagtttcagtccttcagattacagtgcttctgtaggaattaagtataaaagaagttttagcttgacgatagtacaaaatcctgcataaatcataaaaaaaaaacaatgtcctgctaaaccatatcttgcacagagcttctcctcaatgtactgaaatggtctgatcatctacttgaacaggattcataattcagatggaagtttccttctaaacaacttctaccacaactatggtttacaacttacaagtacctgcttctaactgtttagcattgggacacccattccatactaaacgtaacggtcacatatgtgactgatactcatctgccaggcaggattggcagtagaaactaaaagaaccaacagatgcacccaactctaaagccctcaatccaagaatgcacaatcaccttaacgcttcttctgaaataataatccttccaacaaaggaaacctatatattctaggcattcacaggtaattaccaatagaaattacttgacaattgacacaactagggatcaacatgtagataatatcagaaagataatatcagaaagtttccctttttaaaatttagaaaaaaaaaatcccaaattaggtcaattatgttattaatcacaatggaagtggaaggtggaattttatgctcatatgccccaaacagacaattgtacatcaccacagctcaatagaaggaagagcaatggattaaacgagtaatgtggcagtgggctcataatgtaccacacaaaaacaccatacaatactaaggggaccacaaaaacaaatgaggctgtgcaagtggggtcgtaagctacataagagagtagcaagtagcaagcgagtctaccaattatccaagaaccagacgatttgtcagaatagtataaataatgcagcgctttctacgccaacattctttgatagatgttagtggaaaagatacaaccagaaaaatccatttgcactgaaaggatacaacgaaaatcccggaaatgctcgcattcatgtaagagatataccaatcaatatatagctacaattacaagagaaagttggaactggaatgcctgctaacctcaaagtggacacacgatggctctgcctcaactgcccgagctccctcgccgccacggatggtggtcgttcctcctcctcaactggaagaaccacgttcctcaagaacctccccctaagcaatccctgtaaagcaacacatatctcagagcaccgtcgtcggcattacagatgaccgattcctgcaatgcaatgcaaagaccaacctggatgcggttgcggctgcggtgagggaactcggacacaatgtgataccctgatatcccctggagctcgcgttggcgctctcgggccatccgagtgatgacatcgagacgcgcttgtcggccacggaggcgaggaggctcccctcgcctctccctctcgccagcggctgtgtcgtccctgcgcgaggcgacgcgggagtcgcgaggctggctggccatctgcacccactccctgacgagcctgaccctctgcctctccgtctcgccgagccactccccggtggtggcggcagcggcggcggcggtggggacgtcggtgttggcggtgaggcggcgggcgatctggcgcacgcgctcgcggtcggcggtgtcgggggagggctcgcggtcgaagggctggtcggcgtcggatcggcggtgctcgagctcgcgccacatctggaggagggaagggggcgcggtcggggagggtgcctgggggcgcggcggcggcgcggtgggcgaggagaggaggaaggaggaggggtcgagggtggagacggggtggaggcgtgcgagcgcgaggagctcggcctcccggttgcgtcgctcgacctcgcgctccatggaggagagcacctcctcggcctggcgcgcgacccaccggctgaggaggcgcgactcccgcctccgcctccgcgcggcagacgactcgggctcctcgtcgggctggtgccccgcggcgacccctccccccgccgcggagcacgacgacgaggacgacgtcggggagaagcatcccccgaggtggtcgcagacgaggtcctcgaggtcccggcggaaatcggcggcggcgcccatgcggtggtggtactcgtccatgggattgggattaggattaggattaggattaggattaatgcggggggattggattgggattggggattagggcaggattgcgattgcgaatgcgaggaagaagcatttggggaagaagagaagagaagagagaggaaggggattaattgttggatagaaagattggatggcgcgagaggaatgggagacgcaagtcacggagaaaaagaaccaaagcagcaattacaataggaggccggaggaagacgaagaggagcaacaaggaagatgaagaagaagaagcggcgatttatggatttcccccctctttttttctccctttttcttcctagcttgttttagttgagggagagagaaagaagaacggatagccaagggcaggtggtggcgtcgctctctctttttttttcttctttttttctgttacggccacacaacgcagcggccaattcaattgtactacgtagtataattatcattaacaaattatactaagatttaaaagaaactctatgaaactactacttctagtttgtaatttgttcacagcatttcaaaaatcgtatggtagttttcttatgatggcgtgtattcccaagaaatacaagccccggggcccacttccagtggctccagataattcggccaaacgtggcgctgtgctttcgttttgctttccgcggcagatatggccaacggcggggctcacaacgacacgtggatttgtcttttcctctcctcatatcatactcccgtgccaatttacaacactacttatttccttccaaacatattatttttattattacaatattttatataaggaggaccatatttctttttgtttttttgtctccccagaaaattctagagttctttccacttctacttactttgtttttcccttaggaaacagcatgatgtaatggtacttaaaaaaagagagagagtaggagcggatccaacatgggtacaaggaggacttagagttttctctcacccaccgaacctatggataccccctgagtcccccctttcattttttcgtcatggttgataagatagaatgtactaaagatctcctaatagcattttagcatagtttaacaccgagattatgtgtttatgtcggtgtactcggtatattgagtcccccaattttttttcctgatccgccccctaagagagagagagagtgagtggttattctaaataccaaaatggttaagttctaagatcgaaggttgtctacaagaggaagataaaggctgttctttcactcctactcaaaagactttatggatgagttgaaatggccattttcagctcttggtgcagcctcttgcatttatttttttctatactgatttcagacttcttaaaaagtttttcttcagctgcaaaatcttttatttcttcatttttaatcgaggaagcatgtgctacgtactctctagcatttaatccatgttcttttcaacataatggaaaggattcctaaaaaataataaaaatatattacacataatgtgtcggattttagcaggtatatactggtacaataattcagctcatatcgatgtcatttattctgttccttctgttcgtgagtatttttcatggccagaaagataatcctatttatgcacacatgagcagcagatgaacaggactaagttttctcaaattgcagattacaatttgtaaaaaaaatgtgataacagtggagccatatatgattcagaagctataattcatttaccagatcatcagagatttgcccttttgcgaaaaaataaataaaatgtgatgcactgttgttatcagaaaagcggtgtcatttatgatatctgtcacacttgaacagcagttttcgtcctaattattgagagagtatatatcaaactatattatgcaacagtgatgacgatgtgcttcctccaattgcatagtgcatact

SEQ ID NO: 9162 - DNA, 25878 bp, Oryza sativa
ctgatgagtagtgaattttttttcatttttaaatttttttcttttaatatttacgaaaataatctatcggcacaaaaaattacaaaaatagaccctgccgccctaatggaggggcaagctgacgtggcagacgatgtcgaaatttgcatttagccccttgccgagcggcaaggggctaaatgcatttttcgcagccctaaagagcatttggctcgtacttttttttcatctgagtcccttgccaccctactagagagcggcaagggacccaaatgcaaaaagtaccagccaaaaagtactaggcctgggctggcttttttgcatggaggccccttgccgccctaacaaaaaaaaccctccctctcccgtctgtcatcaccgcccgtccctcccccgtttaccacgtcagcttgccgctctagtggagggcgggagggtctatttttgtaattttttttttttgccgatggattatttctgtaaatattaaaagaaaaaaatttaaaaatgaaaaaaattcgatgagtagtagggcttctctctgggcttctttcgggcctgaacgcttaaagcccgaaaccaatagtgggcctttttaactctcgcggagttggccagtaacctgttgatgggctggaccttggcgctgacgagaatggcccatactgtcttcggcctagcccatagcactttcagaccaaaaaaaggaagactaggggcaaatccaaatgcccccttaattcactggtgtttctatattttcccttaccactcaaattcatgcacaaaactcaatccaggtcaatttctcttctagctttcccctgatatcccgttttcatatattttccctagttatttcagtttctagtgtcccatagacctccatcttttcgagttgaaaactggatatggcagaagtttgaagaaaatttgactcatatgagtaggggaagtagaaatgcaagtgatttctaaggggtatttggattaggtccacctgagaagcagagtagagctgaaattttgattgcccatttgttgatcagccacgatcaattcttcaattctgaaattaaattttagggttcatttcgattatattctatcgtgatcgatctatcacttttaatttttaaactaccaatagcacatgtataagagttttatccatatgttttttttatcaaacctatccaatctaaggctccatttgaacacttgtttagcttttgcagctcctcatttactgtgagtatgtttcctaatctgttaaacgacatgttctttgcaaaagctttttatatattttttaatttataatagttaatacctgatcgatcatatagtaattaatattatttctcgtttcgcatgcggaaaaaaaacaaaaactaaacgtggtttcaaacagagagcaagcagccaagcatgcacgtagcttggtggttgatcgatctgaaattgtgaatggggtacagtaataaacctgatgataaatgtggtgtgtgcttgtatctgaaaaaagtgaagaaggcccggtgacatgaaaaatgatgggacagacagaactaagatgcatgatcgatggaaatgtgaaactgatccattattattccagccgagatctatcgcatgcaattgtagaccactttatcaaattattaccgacagttagctcttcacagtcttcatgtgcatgcattgctgttcattatctaaaacaaaaatgtgcatgtcgcgttgagttgatcgatcacagtacaatatgcatgcattacgcatgcttaatttgcctgccttatgcatgcatgcgctgtttaacttttttatgatcttctttttctctgatccgtgtgctaatcgatacagtgtatgacatttgtcgtttgtaaaacgcacgtggtttatctttgtactgatctgttgggtttttatcgttttgaagagaaataaaacatagccgaatgtactcgctccgtccaactaagaggcaaaaaaaaattgaattctagtaaaaggtcccccccaaaaaaaaaagaaaagaaaagaaaaaacggtacgatgttatattatattactaccacaaagatgcaatatacagtaccggctggagtagtagtaagaaactatgggttgaactcttagtgactagtgagtcaaattttaaactctagaattgtaaatctttttcaaatggagaaagtatatgagaatgtttagataagattctaacatgttgagttgtgatccaaattcatttgcacttaataaaggccagcttctgccgtagtggagcggaggcccgtcgccgggaggcttgggcccatcccttttggggttccaccatatatatacctcttgtaagccgccgtgcggcgatgtaacctcacctcagatatagtaaagatattttactggctggcgcccgtggttttttctctcctgttttgggagggttttccacgttaaatctcgtgtcttctatgattgatctattgttttttatcgtttgttcgcttatcgtttcctaacataacatatgtatagctgctccaaataattcaacttatcgtttcgattcaaagaagttaattgtagagttttaaaaaataaagtaaaagttaaaagctaattttctattaaatgcttatcaaaatataattaaagttttcccgaactgaccgtatattagccacggacaacatggcagccgacaaactattattaatgtgatcattgcatatatatatatatatatatatatatatatatatatatatatatatatttcaaaataattaatctcaatgttatattaaaagaaaagtaaagggaaagggaaaggggcaatataatagaggcggtcaagctaattaaggtcggtagggaggaccaagttaagtgatgatcaccacgtgtcaacgctgaccgcgtccatgtcaaaatcatccgctcaccactagtagaaccactagtagtggatcgatcgcttcattcagatagccagccgcccaggccaagttccactttaatttcatccgtttttagtcatgcatggccatggaaaatatatagcttgcgtactccctttaatttgttacgtggaatatatatatatacctactagagaaatatgacacatcacaatttaaacatgttagtacacacatcacagtactataaatttaaacattgtagtacgagatatgatatatcctaataatataaatctaaacatacatcttgaatatgtatttctaagatgtatcacatatcatacgtattaggtttatttttatgggatagagggagtatacatattagaatacgtacgtggattatattatatgatggggaagattgattttttttttaacttttgtgttggacgttttaaaaaagaagagtagttttattgggatcatcagccacgtttgttttaaatactgactcaaaacaatatctttctgaaggcctgtttagttccccaaaattttttctcaaaaacatcacatcaaatctttggatacatgcatgaagcattaaatatagataaaaagaaaaactaactgcacagttatggggaaaatcgcgagacgaatcttttaagcctaattagtccgtgattagccataagtgctacagtaacccacatatgctaatgacggcttaattagtctcaaaagattcgtctcgcggtttccaggcgagtactaaaattagttttttcactcgtatccgaaaaccccttccaacatccggtcaaacatccgatgtgacacccaaacattttcatttcctcacctaaacacaccctgattatacctcctgaggaggaccatatatgcggccatagaataatttatatagagtacttccaagcactttgtcattttgctactagctaactaaaatatactatactcccatattttgggcacgcgacccatatgcatgcacacgagtgcatacaattctgtgttttatttaacttttggtcaactagccgcaactccataaattcggtctgaaatagtagcgcgtatatatgatcgtcttcaacatacaatatataattaccccaaaaagattgatctataccaaaagattgaaaaaaaaaacactagaagctgatatctgtgacgagcgcaagcatggccgttagggtgacacgagtgatcgatcgatcgagtcatcgagagactgagcatgcacgcatgggaaatgtttaatttaaactgtatagtaggcagctcaaaaaatccataaaaattaaaaaaaatacagaaaaaaatacatatgcaggctattcgtactaggattgttggacttgagttgccggccaagttttggaggcgccgcaaatctcagaagtatgaattgaaagctgctgcctaccaggctacacagttcttgcgctgcctctttcacatgagctatcttaattaattattcgtcgctacagtctctgcctccaatttcatctagaagtacgttgctgtcctaattaacatatactgtacgtatataattatatgtgcaatactactccgtccacgattgactagtactgattgacatcatgaaaaagatcatttgtgtcatatgttaatatgcatcatgcccccttcaattcaacaccatatcatcttaatgactttctcggatttaatgcatgacactccattcttccacacaagattggctacatgggcatcgagaaatgtaaatattaatgaatcgcttatttacgaggaatgactattagtatgtttaaatagttgataagtagaattacttatccttggtctgtgtgccaagataaaatatgactatcaaaaatagatggaaggagtatatatcataatgatgagaaatctcgatcggtacaaaacggggaacacatgcatggagatatatctagaccaacaagtacgtacagaaataaacttctgtcgaggatgtacttgaacatgaatgtttgcttgatattgttatttagctatattttagaatactttacaaatggagggatgaattgcaagtacaccctctaatttaaattagattaaattaaacacatggtgaaataggaatagttaggaagctaggcagccgtaaattaacctaaaatgtacatattgatagaagcaaggcatagtcatttatgcgtaaaggtaggcaccgacgactacagtagacgaaattttgggggtggacggagagttaattatttttccgttatatatttggtacatatataggtaattaattatgtggcggtttatataaataaataaataaataaagggagatgcatgcagtatgaaataggcaaagggaggcgaggagaaatacggcatgcatgttgaccggaaggcatacacatacatatgcagaaaaaggaaggacggaaaagaaaagatgcatggcggaaagggaaaggcccgacgaatgggaggaatcatatattccatcgattagagcaagtttaatagtaagttcaatatcaactatcgaatcaacatatataagtacagtagttgtaaggttatttttaatttttcttctcctctctttttctctcactaatgtatttatattagagcagctaataattaattgttgttgcatgagagccaacacgtacgttttcttttatatattttttcttttacataataagtttatagtgtgcttatactacctcattgtattatgtttgctcttaattaaggcattaattaaggtggacggagaatcggaatggattgatgcgatgcctccactgggggaacctccctcttctctggatgcttttgctgtgccggcgccgcgtggttcttcgtttcgtttgtctcgccatctcttaattccttacgttgaccattatttaagcctcaaaatcatctgtagcttagcttgttcaaggaggccgcgtcccgcgtgcgtgcgtctgtcgcggtcgcggtcgatgccatgctatgctagcatcacctgtcaagcacgcacgcatgcagttgatccagtcaaaccccacaatctcctcaggcctcagctctccatccatctatatatacattaacaccacaacaccccttcccgctcataccatccatccaaccatcgatcgatcacttccaacttattttctttaagagaaacaacaagcttaagctagctagttagtcatcttgttaattttggcctcaaataggtctagaattcatcaagaacacgagctagctagctgcactgtctcgctatatatatatatacactgctcatatggagctagtggtgcaggctttggcggccgcagctgccctcctcgccgtcttcttcctctccaccttatacctctcgccggcggccaccgcgcgccgcctccgcaacgccggcttccgcggcccgaccccttccttcccgcttgggaacctccgcgagatcgcctcctcgctcgcctccaacaacgacaccgacgaatccaacaccaagggcggcgacatccacgccgccgtgttcccctacttcgcgcggtggcggcgggcgttcggcaaggtgttcgtctactggctcggcacggagccgttcctgtacgtcgccgaccctgagttcctcaaggccgccaccgccggcgccctcggcaagctctggggcaagcccgacgtgttccgccgcgaccgcatgcccatgttcgggaggggcctcgtcatggcggagggcgacgagtgggctcgccaccgccacatcatcgccccggccttctccgccaccaacctcaacgacatgatcggcgtgatggaggagacgacggcgaagatgctgggcgagtggggcgacatggtggcgtcggggcggagctgcgtcgacgtcgagaagggcgtggtccggaacgccgccgagatcatcgccagggccagcttcggcatctccgccgacgacgacgacgccaccggcgccagggtgttccacaagctgcaggccatgcaggcgattctgttccgctccacccgcctcgtcggcgtgccgctcgccggcctcctccacatccgcgccacctacgaggcgtggaagctggggcgggagatcgacgcgctcctgctcgacatcatcgagtcgcggcggcgccgagaaggcggcggcggcgggaagaagaagaagaagacgacgtcgaacgacctgctgtcgctgctgctggccgggagcgaggcgagcgcgggggcggagaggaagctgacgacgcgggagctggtggacgagtgcaagacgttcttcttcggcgggcacgagacgacggcgctggcgctgtcgtggacgctgctgatgctggcggcgcacccggagtggcaggcggcggtgcgggaggaggtggtggaggtggccggccggtctggccccctcgacgcggcggcgctggggaaactcaccaagatggggtgcgtgctgagcgaggtgctccggctgtacccgccgtcgccgaacgtgcagaggcaggcgctgcaggacgtcgtggtggtcgccggcgacggcgagaagaaggtggtgatcccgaaggggacgaacatgtggatcgacgtggtggcgatgcaccgggacggcgagctgtggggggaggaggcgagcgagttcaggccggagaggttcatgagggagggggtgcagggagggtgccggcaccggatggggtacgtgccgttcggtttcggggggaggatctgcgtggggcgaaacctgacggcgatggagctccgggtggtgctggccatggtgctccgccgcttcgccgtcgaggtggcgccggagtaccgccacgcgcccaggatcatgctctccctccgtccatcccatggcatccaactccgcctcacccccctatgctagctaattaatcatattattcatagttaatcactcaattatgttttgtttgtgcatgcatgcatgcaaaggcaaagcaatgcatctgcatgcgtgcgtgcgtacgtacgtatactggtgaccagtatacatgtagtcgtatatacactaataccatgcatgaattaatactagctaaagcttgatgctttaagctttaagctgagctgtgtcatatgaatgaataattgaattgaatcgatctgccggatggttattaacttattactgctctctctgtttcatatttgacttttttttctaaattcaaattgaactaagtttatccaaaaacaaagtaattaatgttttgaatgccgaacaaatatattatcaaaatatatttattgttaaatttaatgaaattaatttaatgttataagagttgttatattttttctataaactcagttaaacacttacagaagtttgattttttttaaaaaaaatcagagtatcttacgatataaaagggatggagtactatgtccatgtttaaatatatttacgacgctgctaattttatatatgtggtttctatgtgcagctttgacaataattttctctaataaattactaaagtatcaactgtggatcggaagtaattataaaagaagaatcacctatatgatttttatgtttcaaatttgaatatatattttaagaactattgatagtcaaaatttaaagagtttgattaaataaaaattatcattgtgtgcataatacgtaataggtgcaaaaatgcatgtgtgtacgcagaacggccgatgatacatatctcaatcgatatggcacatggtcatatatatgtatacatggccacgacgacattcataaattaatatatacacgtgtggttatagtaactaattaacttggtgcttagcagctagcacgcactataactagctattagctagctgatgtacgtacatctcgatccataaactatgcgtgtttgcattttggtattacgtgttaatttggcggtgttggtgcgttagtaaccaccacaaatttgaccatgaacaggctgcccaaaaacggaaagaaaattcgatccgtactacgtacggtccaaacgaaacgggacttatatattgtgaatgctagctggctacctgggcgatcgatgacttcatcagtaatgaagtactagtactactcctacatactaatacattactaaccacttcttctgatttttaatgttttgactttagttgaatttaattcagacatatgtttgtcatatcacaacaaaataaaaatgttcaaatgcatattaaaaaaaacaacggagtcaaaccggagaaaagataaatatatagtctaatgtatattcaaaaatcaacggagttgagcatcagtacaactggatggagtatcttaagctagtggtgtttagttttcttcattgttttcttatgccgctgcttcctagtaacttcaaaaatcaactaatctgttccacgcgtgcctatgcatgccatctcaagaattagctaatgtcaaattagtctttgatcaagcagagagatgcatgactggctgagtgagcaagcatgctggttggacgtacgcatgttgttgcctagacttctggaaatgattcttggatgcatgataattaagagaaactttaagttgaaaaggtacttttattattccaaaaaaaaggtacttttaagtagaagaggttaactttcatagcaacttgcagctgcgtgtggtgtggatgccgggtcaaatgtacgttcatctaactagctacatacccggcttgcttccgtgttagaaaagaaaacggatggatgtccacccgggagattagaatctatcttcaacgaataatgtagaaatgtcatccaaacaaaaaaaattccacctcatctgttcttgttgagaatggttatatgtactgtgctggagttttaaaactgttagatcatctgaactttcattccatctctattttgtttctggaggaaaaatggtggcttgaaaaaaaatgaaacggaatttttgaaatatgttatcatcatctcaattagatgaggtaaaaaaaatgggatgaggtggagggaaaaaaatgtataaatagagtgaaacaaaattaaaaaaagagaagagaaaaacaaatgtaaaaatagattgagataagaaaattgaaaaatagatgaggtaaaaatgtaaaaaatatattgaaataaaaaaatttagattgaaacaaaattaaaaaaagggaagggcccatccgggttcgaaccggagacctattgatctgcagtcaattgctctaccactgagctatggacccttgtatggtcagttgttggatagtaactacatatttaaggaaaaatggggccagccacatcagacacaagtgtggtggttggtgtggacgcctcgccgccgttgtgcaagagagtacggccgccgcatcttttccttccatctttctggtgttctccacacagctagtgtcatattatcattttatttcgcatgcagctgctcattttagtactagagccgagtttagatcaaactttcaaacttccaacttttctatcacattaaaattttcctgcacatacaaacttctaacttttccgtcatatcgtttcaattttaactaaactttcaattttgacgttaactaaacacaccctaggaaacgactctcaccatcctatccccttctgccagctgaaaagagagaaggaagaacacaaactaagctaactacccaatccatcctaagacgtaaacatttaaaatatgtgacattgtatagcgagaggttataattgattaagaagagaaaatagatagaaaaatcaaataggggatagttgtgagttgtaactagttcagatgaaagggataggttaagaaataccttacattttagagaaaaaaaagtttcaaaaataactatattttggaatggaaagaatagtttacaccatgcaccaatcatgcatctgctaaaggaacttgcggcctcatcttttcacttatacttatgcttatcagtcaaaatttgaaatttcaatcttaaattttaagttgattttaaggttttttcatcgaagtttatttttcagcctttgcttttacatagataagagtacgtatataaaatttttgttcactttttttttttgtaaatataccgtttcgcgatgggtctgatgatatatccaaagtatgtatagcctatatccaatccaacacgaggtcggtcggtcggtcggtccggtggtcacatagtgcggcaccggcagcagcattacaatctctctcgtgtctcgtgcatccagttgacaaacgcaagaacaggccagccaaactaattgactctttatcacctctatctttcactgtttacttgtaatagaatgtacttgaacttgacattgccgtcctcccttgtgtttagttagtacagaggaggcatagatagatagcattggcttgacagactgcgattgatgtgtgtccattattcttcatttcttctaccttgacaactgcttgacagttgacaaaacattgctccttgctccttgcttccatttgtcggatgatcagatcactgcatcccatggttttcaacccaaccaccgtgttcctttctttcggagcccacaggaacaagcaacctccctgcttctcttcagatgcattccttttgtcttctaaccaacacgagctccagtacctaagatatactccgtcccaaaaaaaaaaaaaaagtcaaaccctaggtatgaatctggacatgatatccagggtttgccttttttttggaacggaggaagtagtatataactagtactctctcgattttgcttgcaatgtttgactattcgtcttatttaaattttttttacaaatatacaaaacaaaaagttgttcttaaaatactttggataataaagtaaaccacaaagaaaataaataataattctaaaattttttgaataagacgaatggtcaaacagtgcaaccaaaaactcaaaatcccaggagtacatagtacaatgttttccatgataaagatgcatcatggctaaacaagtccataaacgccactgcaataccatgggctattcacctttcttttattttcttgagttgatgagctcactcaagtctgaactgatactacttttatagcatcttaaaaagctaaacttaagcagtgtagtagtgcaaattaaatggacgatcttcaggtaccaactcaataataaatccccaggttcttttttcttcctctatataatataatagggtacgatccggatccttcattctcatacaacaccgcagatgcagatgcagcagattcacagtacaccaccataacattcatattctaatacttagtatgtagaggagttcctaacatagcactgacatatacctcagcatccagcaacatcatttctcaaacaactctcttcctcttacacctacagcaagttagcgcatcgcgttgcattgcatgctaccaagcgcactcacggggattcggggaattccgtcagtcagagatagatatataggtggtgctccttccttccagcaataatacacattactcgcgaatagagttgatgtcgatgtttggagttcttgagtccatctgcctcatcaacccagccgaccatccacccatcgtatgatgcggcatgttgtgatctggcagtgccattgtgggggtctcctcctcaccgccaattggctcttcgttattctccgtctcttgctcagctttcgctttatttttctttgtcccaccatacatgaagctccccactatcacctatttcaaccaaaaaaaatataaaacaaaatgcgtaagaaccaaaccaaacagatatacacagaaaacagtgcataacctactcataactggttggttactttgatgggcaaaaaagctgatacagggtaacagacaagataagctgccatgtaccccttttattcagttcagataacagccaaaccatatgacaccaaaagaccgagattggttggataacatagcatatacaaacatgactacctgaacagttccagctgctgtcaggactccacctacactcccaccaataaccctgtggtcagggccacacagagctatgcagaggcctccactccgggttcgcgaaccaccttcctctatcaccaaatatgatccagacaggcacaggatttcaaatcgaccctgccaaaccaatggtaaacataagggcctataaagaattaagctaggcacaacaagacctacattgtaaactatgacctacattgcaagtttgaccatggatatggcaatctttgactgctaaaagaagttctctacaaagataactatggagcaaaagttcatctaaaagcagcatcaaagccttttactcaattgaggaactatggaaaatccaaaatgaatggagacaagttgattaccatttctaatgcagctcagcacatgcaataagtatgggtcaaaaagagggataagaggtttagtttaccattctgagtcaaaagcaggataaaggatcttttgctatacccaagagtgaaacatgaggacaaaagcatgaatatggaagtcccggctacaataatactaagaatcaaacaggcctacaagcagcgtacctcatatgtaaccacaccaccagagtttgaatcctgatgaagggttgctgtggatacagctcctgtcgctgagatgatgcacactgcccttgggccctgttgtgagaaggacattatcctggcagcaacatcctgcatgggataggaaagctatactcacagaacaacaaggcatatataacaacatgaaaaactgtttttcatttccagagactaacaaaaaagatcagatccactgtagttttggatcttaattagtttttttttttagaactcatgttaattagttggcatccatcagttatcaggcaaagaattgtagttcttgcataggactactatgagttaagaccactgactccaaaagatgaatcatcaacagctaaaaagtacacctttgtaggtttgcacaacacacagatgctagtgcagcctgagactaccaaatgatacttaactgtatatcccaactaccagttgtatactgatgggggaagccactacatgccaatgatagtgaagtgatttttttaatcaatagacaagagtttggtacatgtagcaggttaatgaagcatcatttattcaacaacgtcatcagtattagttattacaactgaaattattggaaatgtgttgcactcgcaatccaaaaaatagttttgacgacaatttgaggtactacattcaagctatcacgactcacataatcagaaaatcgttgcgttgaataataacagaaagttcaacaaaggttacaacagcatgattcttagctattagtatcctttgtataacttaacttacctctcctggtgaaataataatcacatgaggagtaaaacctgttccaacagaaccaagaaaccattttcctgaagaacacattacagcattttattagatagcaggaacacaaaaaaacccatttcacgcataaaagaaaagaagaggaacaaaagctagccatgcatagtcaatagaagtttctgatgttgattcaagtagtaaatcagattttaggagtacatatactagtattatcagtacacataccccaccaagttcccaacaacaccataatgagcgggcattgtgtttgcatgataacagccgtggcctccaaagacaatagtaggtaaaaaacaaccaactaagctggacaggataccattttcacatctgatccagatacccaatagcatatctaagcttaagttcatgatataagcaaggaaatacgtaacataaaaaggtggtcagaatgtttgcagatctaacaagcaatactatcgtgcaaaatgtaaggtagcatggaatcaagaagttgacaaaattcattcaacaatcggaaatcatctaccactagtttcttagtgcatttctgttaccatattaaactacccttgcattcgatcaatcattaccatataaacatacaacatgatcatgaaatttgctaggttgcaggatctcaccaagagaagccaactgctgcatctttccagacccaggtggccgccctcggccacgcttctctgtaagggcaccagaccccgaaccccccgatcctgcccccgacccaaaccctgagcctggtgtggtcaccattgtacccatcgccgaggtcgacgagtgaggcgtcgacgaagacggcgagagccccagcgtgaccgccccatcaggcttatacttcctcggcctcccccgcttcttcttcaccggctcatcctggccagcaccactcccctgatcccctttagcatccgcgctcatttcgacacccatgccaatgtccataccaccaccaccgccaccactgccgtgctgcgcgacaggggctgaggcatcaacatggtggtaaccctgcccaatgtgggaacccccaatgtgagggggctggaaagggtaccccgcagagactgcatcaagatgctgccgatatccaccgggcggcgggccgtggagcccggccgggtgcccggagcctcccggcacgccaatgccccggtgctgcacatagaaggaggagaagttggagcctgacgccactgtggactccctcccatccattcatggaatgggaagctgcgccacagaggaggaaggaggaggaactcacgcggccacccacaaccacaagcacaaccaaggtggcaactttccttcactattcgagattagattcctccgaaagctatcggaggcgaagcaaatggacgcaagaatatcaatctcggagagagatctcttctccaccgactcccgaacacaaaaaccgcagtttgtttgttttgttttttttctctcctcgagaaacgaggcgagatcagatcgagcagcgacgggagatctcgactctgaacaaggcggtgaaatctccaggcagcaaaagattggaaccaaacgcgagaaagagacgggcagaaaaaaaaacccgatctttcgcagggaaagaaggggcgaaaaggatgggatttgcgcgaggtcgagaagggatggatacacagagagatagagtctgcggcggcggaggcggcgacggcgggcggcggcgggatccgagaggcggtggaggggggagaggagtgatccaatcgaaatggcgatggatgggggaaatgggagatagctaaaaccctagcggagggggatcacaggagagaggagcccaagagaagagaagagaagagaggagaggagggagagagagagagagcaagcatgtatggtgaatgtctctatgtgttggaggagagagagtgttgtgtgtttgtgtgtgagggattctttgtggagccaatatggcagatctcatcaatgcaagtgatatgctgccttgtcctaggagtgtcctgaaatgatttgttgagtatcgtagtttggtcgaagagggctacgttagatatatgtatgtatattggatatggtgttcattaaattaggtggaatcggacaaaagttttattggccaagaaaatagtggatatcgtatttgtcggtttatgttattacgttgttttgtcctatcgtacggttagttcgaatcaatgtcaaaataaataatcacttgttcggtctccgttttttatgcaacgttaaggtagcgacaaaaacatcattaaaaccttccaagttgagattctctaagactcggagattgatgcctattgatttggtaagacagaggcaatgatatagtgattctttctattaagagcatcggctacaacattagctttatcagagcgatactggatacccaaattttagtctttgatgagccgttactttttttggcttggttttatgtttggttggttgataaaatatttcaaactttttatggctgatatggacttcacacttgttacgatcaaaagtgttagagcatgaactatggttgtcagctccaagtcatatgttggataattggctttatgtgatcgtaattgatgtgaagtataagcaaccgctttgctatcttacatcaacccacatacaatctcatggcgagatgcataaactcaaaattcatatattaacgggtatttcaagtgttacgagactttgtttttttaaaaaatgtcttataggatcaccaatggtagaatctcgtcaagttgccatctagaaatggaaagtgaaacaatatttgagtcgcaacaatcctctagcaagcttagttttagagtaccattaataccgattttatcaattttctcagatttaatgtaatgtctatgctcatattgcattatattccattgaaagtggttaaaatgaaatatgagaaagaaaaaaggtatcagtgcaaaattgtttctcactttttttagtacagtggatccgtggatgtgacggtctatgcaagagtagtgtgacgaaatatctgccacaaaggatcatggccttgaccgggtaaggagaaagagaccgagctctgctgacgcgtcagctaagtcgataataattgggtcgataaccccggtgtataggtgagcaatgccattatcatcgagagagtatttgcttacatttgttcaacaacacctgttcaatccagattttgatttgggacagtgaaaaatgctcaaactaaggaccgaaaatacaatcaaagatctttttctttttctgaaaaaagtggctacaattaaacagacagagcggtcggatatgatgaaatcgtcaatttctaagtatttggatttttctctgttttcttgggacggatccaaaagttttatttctcccaagaactgatcacgtcaccataacgttctcttgtgtacttgagagttcacaggggcaccaataattccaatggagtacagcttgatgctgtacatgtgccagggcagtttggacatcttgtcactacttccaagatttattttgtactagacaaatagcaacaagacgaagcactatatgttagtataatgctggagtaccaaacaagtctagcaaagtttttatctgtcctaattatacaaaggactgtctattccaacctgaaaacattcaataacatctaaaaaaactggtgaaaagttcttgtgtagagcaccatttgtcaacgatgatttgctggtcagacaagttgcataattgtcgagcaacaccaacaaaaggattcacacatgtgccaagtttgctgcagatgtagttgtttcatccaaatagcatgaaatagcaaaaaatctacttccaaatgcaacgatctcactttaatattttaaaagtgttcgagatgttaattccaggctctgccactacaaaggtactctacaaaccaacgtatagaaaagagtaacaagctccaactgagtagactgccaaggctagatggaatatggtcacttgaccagagcaaatgcactcatctgagcatagaacttgttctcttccatcaaaactatatcaacactggagcacagtttagcaatggaacacagattgtaggaagtaaaactccccagttacttgtcgacctccattgcttgcgcagctttggcttttgttaaggctgaaagttttgtcttcacctttttcttgccaaccttaaatttgccacccttccttttcacatcaccatctatctgaataaaaatgaaaagaaagcattaagaaggatgctgcaaacttttcttaaccacaaaaaaaaagaagaatgtagcagtttgctatgttcatatttatattcaagtaaaaacacaagaccaatcaacaggaagtgaaatttgaggagccagattgatcaaattattttttgagaaagcagtagggaatgtaatctcaaacaaggcctatataactgactgacccaaagtaaattatgagcagattaaacaagctctcgaagacaagcatatcctcatctaagattgtcatgtagttcaagcactatttctctagagtacttaaactggtgtgagcaaccaggtcacagcatatcagatggcaaatatatatattgtataccgaagatcatcaggaggtttaacgaataaaagagtcaacacctggtgcaaaaacaaaaggaacttgacaacacatgtttggaattgctaataggtaaacttcagaatatacgagtagatcgatgggaaataaaacccaagaagtacaaacagatcatataattggatagaactcatgagcaatcagcttgctcaaatacactctcaaacacaccacctacatttcactagcactaataactgtttgtgatagtaaaaaccagcggcttggaagcaattgagggtttgaagccataaaacagtaaaagactgaagctagtccataacctaaacagctgcatttaatttcagaaactgcctaatgagtaaaccagtgaggcataacaggactcctggaactgcttgggatctgtgagctcttgagatgtcttggaaaagaaagtggcacatgggaaatgaaatcgctcccagagcctcatgagaacgaactacactaaccatttcacatgcctcctgttatgtttctaaagggaagcaagcagggttacaccggtgttgagatttttggatacctgtgcctaacatccaattttgtggattcactgtaaactgacatatccttttctgtcacccctacaaaacaggctgatgacagcactgaacaaattgaaaagtatatgtggactaaagattcctgtaggtgctgtacaaacctcagtgggacagaagacagaaaaatcagacccagtctgtaataaatctttcaactagactcttattcagaattcaaatttcaaagtcctagcttacatcttccctaactctctgataattagcgaatgctggtcctggctatgcaatacagtggttagtttccacaagagcggtcaataggtcgtgtgaattatagcagagatacaactccaacaagcttatagccaccaacaataaggtaaaactagtttttggaaactaaactgcatgacatagcatactcaaacacgcatgctaatttaacagatgaagaccatccagtgttaccaatcaggagctgatcatactaactcagcaagagaggaactacacaacaaatgattcatccatagacagaaaaggagatgtagaagaggttgatagtaccttcatcttggatttcttggcctgcagcttcttggccagtttctccttcgcctccttttcccctgcacacacacacatacaagacagccaccataatcccaaatcagatgcctggttggtgaaatctacaaggagatgagaggaaaatcgacaagggagcagccggatgtatgatctatcggtggtactttggaggtcgaactcgtgctgcttcttccgcttggcgaggttgttcttcttcgacatcttcctcgccgccaaccgccgacgaagcacagcacagcacgcagcaacgaacaaaccctagccgcggcagagcctccatggagatgggagtccttttaactgggctggaattgggcctccactaattcggtcaaggcccaaactgtcgtaaagcaaagcccatcaaaggcccagttaaacagtcattagacctaacccggtgattagtggtcaaagctgtccgtcattacgagacggagacagtgacgtgaggggacacgtggctcgggccgaccactccgatcaatcatgccggacacgtggcgcgtggccaggtgccagcgtgtcattgcgcggccgcatcatttcgtttttaaatatatgttttggaacgaaatcattcgatttttaagcaccacctcacctcattacccgcgctttccgcccggcaattacaccaagaaaaggagcaaaaggaaaaaaaaagtctctttatcggaggcgtaacatctacttctgctgctgctggtaaatacactcttctctgagcttcctcaagcttctgaaaacagcaagagattaaattatcgtaattttaagcatccaaggtgtttggtgccagtgctcgaggactggagatggagacccaggaggcgaagagagcagatgtggcggcggcgccggcgacggcgaccggcggtgaggccgtcaaaccggccgccggcgatgctggcgcagtaaccaagacgagtaagattagtttcttcagcttagctttctctctttttttgctccaagtttcagtcctgcagcaactgtgacccattttgtagtgtttcagactgaagaaaatcttgtttagagttcattggtctgagaaaattgccatcagagttagtagttggaattagagtagttacttgctgcctttggtgctaatccttatagatgcagcagatggaccttcagcaccagcaggcaaagctgcaactccaacgggttcggttgacagaggtactacgtgcataattattcttcaagtttcagtcaagaaattgcaatctatggagtaaatggcagcaacaaatgaaattaacttgcagacgccatactcgcaaacgtggagctggagaggaaactgtcaatgatcaaggcgtgggaggagagcgagaagagcaaagcggagaacaagtaagataagatagcctgaactcaatcaagcactgtaataaattgcattcttgtcaatcctgtaaattatcatcgtgtcacatactcataaaaaatggcatgtttatcagggctcagaagaagatgtcatccatactctcatgggagaacacgaggaaggcagctatagaagcaaaactgcgaacacaagaggtctgaatcttcatatatctcttcttgtcaaagagatagtagttcatagttgcagcaatggctgtggcttcctgaactgactgactgactgacaatgtattccatgaattgcaggagaagctggagaggaagaaggcggagtacgcggagaagatgaggaaccaggtagcggcgatccacaaggcggcggaggagaagagggcgacggtggaggcgacgcggcacgaggagataatcaagtatgaggagatggccgccaagcacaggtccaaggggactacacccaccaaattcctctcttgtttcggctcctagaaccacaaaaaacgctcctgcagtgcagtctcctgtcctgtgtgctgatgcttctgtgtgttgatatggtgatcagtttgcagttttgggcttgtttctcttctttaatcttctgtgttgaagttccggatttcatggctctgtcatgctgctgctgtgttttccttttcgctgaagatgtgatcatcatgtttggtgagtgtaagcatactcaaaacacttgtaaacagtcagtcacatgtaaacataccaccttttttgtgaattttgcgcttccagagattaagaaaaaaagcgtgccaatttgttttgttggtgctttgtatcatgtatgtgcatatttgtattccatgacatgcaagcaacatgacaacatgtacttgttgaactcaagtacgggtaagtaacagttaggcacttgacagcagcagcaagtgtttgctgatgtgggaagcaaacatggaaggaccaaccaattactaatagtgaatgatttggaataagcactgcaatttgcaggtacaactgtaacaacaagtgcattcttgagttttcaacaagatgagcaatggaaatgaaagaaaaacaagcaacatcagaagcgctgcacaacagcgagttgttcttcatgcagttcattactgaagcagaatctcttatatacagctgagcaaaatttcctagaaccaaccaactactgatcatcaaaattcaagtagcacattcaccactcttgcacctgattctatatatgtactatgtatctactgagaataaacactagcacggcattaagccactaactatataaaaaggcatgtaatgtaaatatgtaagagctggactagttgttgatgcatgatgttaaatcttgttggcttgcagcactaatcactttccaggtaggtagctaactacatcaaccaacagtgaagtaaatcatccctatactgatcggtgaagtgatggtagtgaaggattttggtttgcaagtgcagcgaatcggcgagcgacggctgctcaggtagggggcagcgcgtcgtagaggtcgttgccgcggcgggagacgagggcgacggcgagcacgacgtcgatggcgaacacggtggcgaccgtcgcggcgaggatccagacgcgcaccttcccccagaaggcggcgcggcgcaggcggagggtggcggcattggggcggagctcggcggcggcggcctcgacgagcgcggcaacgaggcgcttggagcgggggctgaggccgcggccgccgcgcagctcggcgagcgcgaggctgatctggtccgggaggggctcctcctcctcctcatcgaccatagccgtagcctcggcgggcgctgtgacctgcacgatataatcacagctgtcgaattgtaaaatccaaattcgtagacgcactcgaatcgagcaaattctggaacagaaacatcatttccagttggaaacgacaagtggattcagaatcgaagcaaactgaacataaagggaaacacaaatgaatctgaaatgattggggagcagagaaactgtaatcacactggaatcaaatcgaagttaaaaaaaaaacgcccgatgccataaacccaaaccaaaacccagagcgtgagcatttcaaaatccaccacctcggtgagagcggagtcggcggaagcggtgatggcgtcatccgggtccggggcggcggagatgagggcggcggtggtggtggtggaggaggaggagtcggcggggtcggggaggtcgagcagcggcgcgaggtcgtcggggaaggtgaagtcgccgtcgtggaaggccaggcacttggcgaccccctggtggttggttgatcgaaagggagaggacaaggtttagcggtgggcgatcgaggaggaggtgaagggcggggaggtttggttaccttggagttggcggcggcggggatcggcggcctgggggtggaggaggagccgacggatggccgggcggaggcggaggaggagcggatggaggcggggcgcggggtgtgcacggcggcgggagacggcttcgccatggctcctctcctctccgttgctgcgcttctctctctttgtggctccttccctcatgaagaggagagaggagagggaggaggaaggcaacttgaattgggccgcttccatcatttgggcctcgcgagcgaacccaattcccagcccagcccaccttagagagaggagacagagacggagacaaatcggtggatggggcccaaaaccgtctcttcctcctccttcgccttcttctcccttggtttttccctcgtgacatcacggacaccagcggcgatccatcggcgatccaccgcgcgcgcttcgatcggcgaccgcctcaggtgagctccgcgctcctccctagctccacccccatggtattcccctcccttggccatgcctcgagagtcgagacgatccaagcggattcatccacgcgagtctcagattcagatggcctaatcgatccaccatcgcatcgcatcgcaatttcttctctcatctaactcttcttcttcttcttctctcctttgccagttagttagttaagtttccatggcggggaggcccagcatcccgaccaacagctccgctctcatcgccatcatcgccgacgaggtacgccaccccaacattagcttcatgtttgcgccccaatcataccacaactcctgaatagccccaatcataccatacctcctgaattgccgaatgcccactcttgtcttgtcatgtctgctagcgatccatttacttgcacttgcagggatgggatgcctcaatccattcctccaactaactagctaatcactgcacttctgttgcatgtatgtatgtatgtatgttataagggaaactgtttttcaataccagatgtgtgcataatctccagtccttctctagttgctcaacttgttgccttattactacttgtccaatcacccgagtttagtaattttgtcacgcattttgctagctatggaattggaatactacggttacaggaaagaaataaagtataatgcatagtgttttgttctataataacatgccgatggtcaatatgaggaatgaaagctggctgttgcttaagcaaaattgtctcaaggacacttgatacttccattctcacttgcttcacatgtactcctgaattcctgatcggttaattcacagtagcaacccatagtttccaatcagcatcgttcaatgagaaccagaggagtaaactgaagctcttaataaagaactgacacaaaaccgcatcctacctttgttaatagaaaaatatgcaacactcttttgttggtcttgacataagctgctctaagagtagccaggttccccagtgtttaatcatgattatagtcatctgaaaggaatattctgtttcctcccctgtgtttgcaggacacggtcactgggtttttgttggctggagttggcaatgttgatctgaggaaaaagacaaattaccttattgttgataacagtaataacctcaactttctaacgtgcaaagctgtttaatttttccatcaatgtcaggctgcttttattctgactatatataaggggaacatcgcgtgacactctattgatcatctcatgtgcaaaaaacatattatcattacccaattgcatgtaccattttaatcaatgtaaatctatctttccattgttagtag

SEQ ID NO: 9163 - DNA, 14085 bp, Oryza sativa
cctgacgaaagcgctcacgtgagtgtgccccccctcttcccgctcgccaattctcccaattctggtggggatttccggtgccgcctcgccggcgccatggcccatgtgctatggagattattgattcatctgcttgattgttgggtgggtgcagggcgctgttcgggtatgctatgccggcgttggagtgcttcaaggcgatcgagcagcggcctggtcggacggaccatctccggttttggtgccaatattggtactgactactgactcagaaaccccttagcttggagtaattagttcatttggtgtgttcaatttgatctctgggtgataggctgatgcttagaattcgtcgtaattgagtgaattgggtaaaccatacggggattaatttctgctatctgggtacagttagctggattagagcattagaattggtgctaatatgttactgcattgctgtggaattcagtaccaaatcctcactttcacctttctgaagtgctttgaatattggggatctgaaacaccgtatctactgtttggagatctgaaacaccttgcaagagttgaccaatttcagcaaatcttgcaggatcatactagtaatcctcgtcatattcgatgatatcgctggtgtcctcacctccaagtaagtaataatcacacaaccacaactcatcagctgttcctgtaatctgctccctgtaacctggcaatccccttcattgaatgacaggataccaatgtactctgaactcagactcgccttcctcgtctacctgtggtacccccagacaagggtatgtaatgctatgtctgcaacgcttggtccagcaacaaagctgcagctaactgcatgtcctgatcattgtctgaactaaacaagatttgccacaaaactgcagctgcacataactgcatctcctaatcatatctgaaattctgaactaaaaacgagatttaatctaatttgcaacactgagtccagcaacaaatctgcagctgcacaaaaagtgcatctcctgaccacgtctgaattaaataagattttgctttgtcactctgaaccagggaactgacatcgtgtacgacaccttcctgcggccgctggtgatgcagtaccagcccaacatcgaggagcggctgcgctacctgcgtgccaatgccggcgacattctcatcttctacctcaagaacttcaccgataggggctacgatctcttcctccgggggatggagtacatccggtcccagacgtcacgaggctcaagaacgagggtatgttaccagttactctctgtcccatatcgtaaggtgttttagttttgttctaagttaaaattctctaactttgatcaaatctataagaaaatatattaacatctactctaccaaagaacactatcaagacatatttcatagtgtattttaatgaaactaatatgatattgtagatgttagcactttttcttttacaatcttggtaaagttagaaaagtttacctagcacaaaagtaaaacaccttacaatatgaaaacagaggaagtagtagtacacatgttgggaaccatggtcatcacaggattccggaaatgtaacagtgcagtcaaagaattcaggatatgtaacagtgcaggtgtgtaactatgttggcaatggtttgtttctgctgtgcagcggtggttctcgttcggaggcgaccgggcagagaggtcgagctacgttgatgattatgtcgccggcggtggcgatcggaggagcacggcgaggcaccggcgaccccgcgacgattactaacgggctggaccggcgccatagggattcagtagagagaggtgcacaggattggaaactagttgattaggagtgacaaaatttaaaaggcccaaagcaaaacttctcaaaaacatgatgtgtatatatatatagacaggtgatcactgatccatactctggtatatatagctcctcacaatttggcgttgcaggttggctagtttgttggttttcctgttgtgatttgtgcacccgtcttcgatagactacatgattcattttttgaaacctaaggcgaaactttgttccacttttatatttagaagaagagaattaacccagtttataaggaaaaccgggcccaaaaaccacacaattgcacggttaattataggaaaaccggctgaaacccaccgctacacaactgacaacgacggcggagcccaaaagcaggatgtcaccgccaagctaaacacaaaagcgatataacagctcccacatcgcagaagaggtgttatcgttgccgagctagccgcccaagcgacccaacagcgccgacttcacaactgcagcgacactgaagacacgaaagtcgccaaagcgaaaagcagctccgacatccaacaatagacatcagccaagccatcgagaagccacttccttcacgcggccagcaccccaccagaaggaacgaagtggacccaagaagacaaaggcctcaccgagcacaaggtatgaaagcttttgaaccgaaaaagaccatcaacggtcgtcgatgcattggaacttctccgaagcgacgcccccaaggaggacacgacgtgtaacgccgccgtcgctcgtctgaaagccggaacaaggttttcatctggagattgtgggggatatgaaagaatgccatgacaatgcctccaagaagggaaatgacgcccacgagcgccgccgtcgtcgaaccggccaaaggcacggcaaggctttcgccagcatcttcacatcacccacacaagcacccccacattgacggccacagaatagtccatgacgtctcacaagcacccatacctcaaccgtaaccaacggcaaagacggacccttggccaccaactcctacagcaagccgaagcctccgccctccccctagcgttccccacgaccagaacaaggtccggccaaagaagggagggaaacccaaatgagggagaagactcggtcggcaacgaggaagtcgccaccgcggacgtcaagcccaattcctgcttcacgccagcataagccatcgtcccgccaactccacatccgcacatcgccgcccatccgacgcggaggggacggatccagccgcggacggccagatccagctaggacagcgcaagccggctcgacgtaagcgccgccgcagcaccgttgtcgttgcgaccaccacgccgccacagcctctgcctgcgcagcgctagcgccgtggccccgcgcggacgacgccgaggccaacgccgcgacaggcgcgagcgagccgccgctgcccgcccaccgcgacgccgcccctgcctgtcgccatctcgagccccgtcgccgacttctccctgccgccagccgccacctcaccagtgttgtcctccgctgctcctcgttgcgctgcaccgctctccgccgtcgccggctgcccctcgcgcgcgagccagcctccgccgtcgccggccacacctccgggaacgcggcctcccccgctgccagccgtgcctccgcgagcgctggcctccaccgccgcggccgcgcctttgcgagcgccggcgtccacagccgccggccgcccctccgcgctccttgcgcgcgccgcatccgctcctctcccctccgactgccgtctccggccggatccggcgggggcagcgccggatccgccgcctccacgccgggatgagtcgccgccgccgcgtcctagccgaagacgacgcgccgccccatcgccaccgtcgccaccacctccctcccgcggccatcctccaccgccgcttatgcatcgccgcgtcccctcgccggatccgcttccaggggcgtcggatccgccgcgcccttgccgtcgccggccgccggagccccccaccgtcgcgcgccgctccgtcctcccgcgctgaggaagagctttgccagttctcttggccccgccgccgccttcccgactggccgcacggctttccggcggcgagctccggtggcggcgaggtggttagggtgggcgggggtggcggcgcgggcggctagggttttgcccccgagccgcacgcgcgagagcgacgcggaggaccccactaacaaactagactacatgattcatgcgatgcaacccccactaacaaaccttttgatcattgtgatgaatacataatggaaacaaaccaaagaatattatactgttgatgatggataaaaaaatcaataccatacttgacgatggataaaaaaaggggatttttttttcatgagactccacacaagtggcaagccatccaataagactctccacgagtgacaggtcatacaactagttggagcaaccagctgctatttatagatttcgcatgcaaatctattcatcaagaatacgcatgcaaatctatttgaaagaattatgggaataatagatttcgcatgcaaatctattcaagaattatgagaatcagtaactaactagtgctatttatagatttcgcatgcgaatctatgcaagaactcataggaatatttgactaactaattaataagttaacgctggatattcctcctcgacctgatcaacctgtttcacgccgatgatgccggccacgaaccctaggcaagggcagacgtacctcttgacgaagcggtataccgcgccgccgcgccgggtcccgagcggccccggcgatcgccggcggtggagcgcggggtggggcctcgcgtacagccgcgacgtcgcgcgcaggagcgggtcgctgatgccggccttcggcggccggcgggagctctcctcgaactcctgcgagccgatcacgtcctcgaagctcacgtagccgggcgtcgtgtggcaccgcttgaagtaggcgtcgtgcgcggcggcggcggcggcgtgcaccaggtcgtcgtaggagtgcagccgccgcgagatgggcggcaaccgcgcctccgcccccgccggcgcggccccggaggaggagaagttgtcgctgccattgctgtcgctggtggcggcggcgctggtggagtggtgggagaggaggggctgcgagtaggatgcgcgcatggagaaaactggggcgacgtacgagacttacgagtagccgatcgagggagagattataagaaagaaagtggttaaaagatggagggcggtattagggtttgattatgagagagcatcacacccaactcgtattcggtgaagggggcgtagaaacgtattcggtaaaggggccgtagaaatagtgtatacagttatacgcacccggtttgccgcgcgccgtccagagaagattgaaactcaaaatcgattgaactcactcaactcaacccaaaagatgattgtaaatagatgtcaaatcgaaatagctaggtttcaccaatcatccgcggacggtttgaggaagcatcgatctccatcgaggactcgtgcggagctcgccgccgtcgagccgtccaggtgctcagtttgctgctgccgcggttgacgaggtcgcgctaggattgggagtttgagaggctggctggagagcccggatggccggatctaactaatgaattgttatgggctttggggctgagagatacatgggctgcaggccgaaccaacctgtgggctgagcagctagcggaggcgcttccgcttcggttcgtttgcggcctggaaaccgcgccgaacaggctactgggcgaagtggccaacacctaaaactggatttaaaagaaaaataaagccaagcataacaatactagtatttagattcggtgtaatggatcaatttacggtgaattttggatttttactctgttcggtagaaactggtagtaatataccttaggatttaatttgtcaaatacttttacttatgttatggtgggtttacactcgtcccttgctaatatcttccatagttggcttggtggtttacaacgtagaataaatgttaactttttataggtgccgtagctttgtgttggacggtaagactttgtagtaatgatataatcttcaatggcttaagtactaactcccctctttgtaggtaattttcaggtgaacccactgcgctagtggtcattgttgcttaacgaggagaatagcgatgtggttaaacacatgcacaagttaccggaggctagagtttgggatttcttttccagatttgcgtggaacttgagtaagcggttggagacctagtatccacttttgtcatcttttgttagttggcttctattcacgagacgacttcgttgtgaggtgttgtagtctaagtacccttgttttatttggtcggtggtgttgttcttatgcaaggtgtgatgctaagtactattgacaatgtatgtttggctatgtacgtatagtttggatgtagaggataggtttttaatcatttttttaaaaataaattgacattttctccctctacatgtttatctatgttttgttagtattgttgtattgctctcactaagcctagatgctcgctagatataatgtatttttgcttacttgtactcccctccgtacgttcaaattttttttatgagatagaacacaacctatatacaataggatgtgttccatccaatcgaacaattatattttgaaacggagaaattgtaagaattacaagttgtcctagcatatctgcactcttccatccatcccaaaataaataaaagaaaacttttgcaaaaccataaacagagtaaaacggaccgagacgagaataagccagcggagcacacgcgcaacaagacaatttttttgtttggcattcctatcaaaatattcccaacatagcatagcttctagtggaaactgtgaaccactgaaccaccaccatagacgatagcgtttgtagcttgcttgcaacggacaaaccaattaaataccccctccgtaaccgcgagattctaagttttcaacgaaggctgtatttagttccatgtcaaaattaaaagtttgaaaaaattagaacgatgtgacagaaaagttggaagtttgtgtgtagaaaagttcgatgtgacgaaaaagttaaaaattcgaagaaaaaagttagaatctaaatagggccaaagcgagaaagcttccttgcaaatcctggctgtgtgcatatgtatcagtacttccttcgtctcagtaagttaatttttttttattttttttatttattccaaaataaatttattttaaaagtaataattgtatcaaaattgatgaaagtagaaaataattatattgaaaatagataaatgagaaatagttgcattgacattgataaaacaaaggtattttagttttttattgatgatatgtgaaagaagatactttctccgttaaaaaaataaatctaaaacgggatgtgacacattctgtacaataaatatgaacaaagatatatatttagatttatactagcacactgcacacgacacacacaccagcaacgggggcacacgacacacacacaccagcaacggggattagaagttgacacgactgtctatctggaatcctagctgtgctgcggtagcaactgtcctcagatgctgatactccctgatagccatagccacgacgcgatggggtccccatccatcctcccctcctgctcggttgttttcgcttcaggttcagtgcagtcacgagcgcggacgcccccaaaaaactcgccacgctgtgtgcgcgcgcgcccaccgcgatccccctgatcccattaacgtttcacccgcgcgcgcccacctgccgctgcaatatatttcgccgcgccccgcgccacgccacgccacgccaccttgcgcgcgcgcgcgcacacacaccccagcagcagagatgagggggatgggcgacgacgggatggggccgatggcgatggcgccgccgcgttccggccacgccacggcggcggcaccgccgccgccgcagcacaagatggcgatgatgatgcacatgaccttcttctggagcgaccgcgcggtggtcctgatccggggctggcccggggagcgcggcgccgggatgtacgccctctgcctcctcttcgtgctcgcgctcgccgcgctcaccgaggggctctccgtgctctcgcgccgcctcgcccgccgcggcggcggcgccgcctcctcggatggcggccgcccggcgccggcgccggcgtcgtccgcggcgctgctgaccgcggtgcacgcggccaggatggggatggcgtacctggtgatgctggccgtcatgtcgttcaacgtcggggtgctcctcgccgctgtcgccggccacgccctcgggttcctcctcgcgcggagcagggtgcggccggccgcccgtgacggcggcggcggcgtggcctgtgagcacggtggcctccctcccgcggatggatccaagacttagtccccatcgattccgttaaacgagtatgtccaagcgccttagccagtagacactatgcactgtatcggatccaatgtgaaaatttaccttggatatctcgctaaaataattgtattttgtcgacttgcttgatatctgttcccgtgcagtcttctctagtcgtttttcgtttgtactcctatgtttcaagatggaatgatactactactagctagtattgatgtgagttctctactatgctaactttagatgaaccaatgatttgttagtactctccttccaaaaatatcctttttttaaatggaatccttccaaaaatattagatttatttcatattttgaattagctacatttgtagttttcatgtatttaaaacttaaatgaatagataaattaaatgattaatcggaacccgatgagtcatcttaatattcattggctgcgtacatgcatacactaattgatctttgttacaccttatctccacttaaattattattatttaaatccttcacccttaagatttctaattgtattgggtgcatatattgtatttattagagtgataaagatgataataattgtttttgttctttcgattaaatgtagctgtgtcttatattcgtttcatatgttgatgaaaccaaccctctagtatatgtttcatgctcatggtaacatatactagggtattctttttaaattcctattttgtgatagtgttgtcatcaatcaccaaaaagggggagattgaaagatctatgcactagaattgccttgtaaggggagattggaatatctatgatcctaagagcgcggtgattgttttggtgattaatgacaacccattgttggaactaactatttccatgagttggtgagattaggttaagtttcagcatcaagttaaaagattgaagctagaagatggacattataccttgatgaggagcaagtgaaggcattgatgatgcggggtatgaaatggctatctatggcaaaccggtgaagagaaagcaaggctcggctagaagatggacattataccttgatgaggagcaagtgaagacattgatgatgcggggtatgaagtggctatttatggcaaaacggtgaagggcaagcaaggctcggctacaatggaccatgtggggggtgaagggcaagcaagaggcttggcgccgatggactgaatccggtggtgaagggcgagtgaaggctttgtcatgatggtcatgatggaccgtatgaggccatttgaagctatgagtaatccgtatcaattataagaagaccgcaagatggaatgccgaggatcaagaggatgtggttcttcgatgaacatcaagtcaaaatccaaagtgggcattgatcaaggcaaaggtataattgatttgggactaatatgcttaatgagtgtaggtgagaatagtcccaatagtgaaatggtgttgacatagacaaccctcaaggtgaagcaagaagatgttcctagtggtgtattagtcccaggttgcttaggagtgggctaggatgcttggagatcccccaaaacatcaaaatcaaagtggcgagaagactcggagccgagttagactagtttactttttcgctttgagtttaggaaaaaccgtactattaaaaggggttccaagtatggttctaagataacacaagtgttcttagtggtgtccaagtgttgaaatatttttaggagctgtttttgaaaatgactctactcgggacagagagtcccacccggaggttctgtccggaacttcctggcgccgaggtgaggttgaaaattttcttaagtgttgcccggaagttcctggcacccaggtccggaacctcctggcaaccctccagttcaaatatgtgagtaacggctagatgacgtcacctaaccgttatatatagccaactcgaccccagctcattctttggccattccactttagttcttgtgttccctagcttgttctagcctctcccaatgtgattttgcttcctccacccaaatcttgtgcacttattgagtgagagagtgaatttgagggtggtggtgaggattggaaaaggttttgaaggctaggatgacttgagcacttggtgtatctcgttgggctatcacttgaagcttgttactcttggagggtgacctcctagacggttaggtgtcgcccgcaagtttccaacaaggttgtggattgacccgggcaagtttgtgagagcgttattccacctccgaaagaaaacagaggtgaggtttaggaggtcgtcttggtagagcaagcctcacttgtggtgttcttttggtgtttaagttggggatcttagtggtcacttgaaaccaaagagaagtacctaggggtgttggcttgaagaccggagacctcttcctaggccttttcttggcgaggcaaggtgttaatcaagacccggctctttggagctcctcaacggagacataggattctcggtggagaatccgaacttcgggaaacaaatcatttgtctcctctcactctctttatctttgtgattgtgatgcttatctccttatttgcctagttgtgctatcatgtctcccattgtatgatcacttgtgatatcttgtgtattttcatgtgtattactcttgtttgagacatgttgtacctctctatagtttaggcttccttgtgatttaatttacttgttgtgaggtgtttgaaatagcaatttacaactgcccggaagttccttggaagaaccccggaagttccgggcagctttctctgcttgtgagaaaaagctgccaggaagttccggaccttttgccaagaagttctgggccctgattttaaccgctacgatttgaagtaaattttaggtgcgcctattcacctcccctctaggcgacatcaaggccctttcggtaagcaactattgtatgattggctattagagcaaggttaatagtatagccaactactagctcaaattcatctatagccaatctaatagctaatttatacaatagttgcttactatactattagtatatggtcctacttgtcatacacacattgcgtcttggagtccgtgctgcagctggctacatctctctcatcttttatctcattaaaatatgtttgtagctggctaatagtttgttattgtacctgctcttatattgactatatatgatttggagttagtagtgtgctatactattaaacttgctcaaattgtttttcgggtcagaaaagaagcttcggatcattaatctttcatgtaaaaatcatgtaaagaaataccgctaaggtctattcaaccgggcatcaaccatgtggaggtctgaaaatatgaaaacgaccttgcagggtggcaccgtggcatgtgtggaggtagcactgtggcagcggcaactacctgtgctgtgcatctctctgactctgtgtggtggcgaagatttggaaaggcagcaggaagaatcttgcaagatcattgggtcccgttcttttctctaagcaaaagttgaaaagattttcgtggcacgctttttatatgaaagttaaaccgtatacttcgtacaaaaattttatatatgaaagttgttttaaaatatcatataaatctagttttcaagtttgtaataattaaaactcaatcatacgttaataccaccttattttgcatataaaacttaatttttatttttatttttatcttcagaagaaaaaaaacaccatctaaaaatcgagcgtccagaacctcttattaaaaaaaggggacgaaacagagggttaaaaaaaaaagcttatcaggcctattagcagtggcagcagggatgaaaaagggatgcttacaagaaacagtagcatctttcatctcttctgaaacgacggattgtcaggaccatatttatcaatttagctatttagtaaaaatagcaatatgatgttaaatagaaaattaaaaatttataaataggtagaaccagaaacggtaaaaaataataccactcatatggaaatggtgctcggtcgacccggaatttccgtgactgttttcatccccagtggcaaaaagggaacaagaaaaaaaattaatttgatttttttcatatagtttgtagattagcaattgaaaaaaaaaatactacagttttagttgaactgagcagattattggctatgtattggtcgcaaacttgcttctcatttaccattcttaagagccccaccgaccgctcccttctccatctctgatgagtatgtcgctattgatgcatcttctccaattgtctccaagtacgacacaatcccccttctccttcgtctccgatggttcatgccattgccgcctgcttcctaacaacatgaccttctttgtttccgcggttgatcctatgcactactctcgttcatccctaagcctctggtgctaacgcttctgtctttccctcaccggcccaccgtctctgccactcattgctattcctccatccctctaaacctgctctcatcgaagtcctcgccatctccctcattgacgcctccacctcttggcaggccatggattttgatccaatgacatccattagtggattcagaatagcaaagcataaaattaaaaccgtttatcatgttgtctattcgtaaacttatgcgtgaagattgatgaactgaaccaaatgtgaaaaccccatatacaagactacaaattacagcactattttttttttttgaaaatccctgatatgactatgcctatagaaaatcctatgacgtaaatatgagggggctttgcagtattgagactctgaacagaacctctctcaaagaaagaactaaaatacgtacttcaagaaaactcgattgaatcatggcccaaggcccaaagcccagtcgacgcacataaaatccaatctctcccggttgacggaccgatccccagtggaaaaagtctttgactgtttccactatcgcccgagtatgatttatttcctccaaccacaaaaccggtatatcgacttctctaactattaaaaccggtgcaaacaatatccctcggtagttttggaggtgggtttggctgatgtggtggtattgactaagtctttctcctacgtggcgcttacgtggcattaaaattaaaaccaaaataaaaaatatgtgggatccatatgtcattaaaaaacaattataggacccactgatatgtgggacccacctgtcatcctccctcttcttccctcttcctgcccctctctcccttgtctctctctcctccccggcctttctctcctcgggaagacgacggtgtggagaggcggtggggagcggcggcgaacgagggcggcgcgggagaggaggtggacgaggaggtagtaggcgcggagggagtgggggatcgacgacgacggcgacgaggaggcggcccagtagaagaaggtgagcgcattcctagcaacgagctccggggaggaggaggagtggcggtgcttggcaagggagaggaggacgacgtcaacttggtcggcagtggggaaggcggtggagagcgcctcccatgtcgctctcggatggtgcgcgaggtaatgggagatgcgctgaggcgtcttggcggcggcaacaaccatagcgcacgggggaggaactcaccagccgtccacgcgcgggggagtggctcaccggccggtcgcgcgca

SEQ ID NO: 9164 - DNA, 3646 bp, Oryza sativa
  unsure (1)..(3646): unsure at all n locations
cccccccccccccccccccaaggcccaaacccccgcccgcctcgacctcgacaagccacggccatggcgtgcgccttctccgtctcctctgccgcggcgcctctcgcctccccgaaggtgcccgtctccgcgccgtcgcagccgtccctgccgttcccccgctcccttctccgccgggaagtccctgcgcctctccgccgccgccgcctcgagatcggctagggcccgcagcttcgtcgcccgggccggaggcgaggttcggcgcgatttgatgtttgatttttttggggtggtattggtgcctctgtgagagttgggattgacgcgcgcccgcgtgtgtgcgtgcgcagggggacctgccgttggtcgggaacaaggcgccggacttcgaggcggaggccatgttcgaccaggggttcatcaaggtatggcggtaatccggtaaccacatgcacagctacattgcgccacgcacgcacgcgcggcagtgttattcgacataggggattaattggcccaggaaaaaatggggcctatttgattggcagtgtaattcaccgtgagatttgataatttaacactcttttcaatgggtttcgataaattgacatcctagcccactttcattcactcatatggtcccacatgtcatcctcacaaatgtcaattaaagtaattgggcaacgaaaaaagtgtgaaattatcaaattttttttacattcatcataggggattaattggcttgggccaggccaaaagaaaaaaaaagtggtctattcgattggtagtctagattagatgttaagtccatatccacggctgtttaatgtagaagctgtatggttgatcgtgcttccaattgatatcttcgttggtcgtgtccttcactccttctgtatatgcaggtcaggtcaagctgtctgagtatattggggaaaaaatatgtggttctgttcttctaccccctggacttcacgttcgtctgtccaacagatgcgttgaccttgtcgtgctctgtcatggaaatgccttttttttcagttttttttcattcctaaagtctaaatgcatgtttgtaagctctgcagagatcactgctttcagcgacagatatgaggagtttgagaagataaatactgaagttctcggtgtttcgattgacagtgtggtatgctaacttttacccgcatgactttagatgttgttacggtgtcgttacctggtctgttgctctattgagaatttcgtatttccattccatctggacatgtagcttttctcttgacaatatttgtggtttcttgaatgccttaaggttgtgatcaatattttagctttcctctttatgtgatcaatattctatttgttcttaacgtctgaatatagagcattagatgaacccttgcattaggccataagttttaacataagattgccacgtgttgaactttcattctgtattataatgaaatgtgtggtgtttgttatgccttatggaaatattgaatggaagtaaaaaccgatgctctctaatatttagacaatagcgttataaacattcaattcagttattttgaaacaactttgagaaatgagactgatgtaacgtcttaatactctggtttgcttctgccaagangattcattgcatactcaaatatntatcncaaattatatccagtaaaagtattgattttgctactattacagtgagtagtttgtagccagtagtggtactgtaatttattttttactatcctctctttctgcttctgcataaagcatttcattttttttatcttataggtatcattcactgttactctgtcgactataaatatttaataagtggccccaccctatgcttcataagtgtcgcatactaatttggctttgaaatatcttttgtttgcagttttcccatcttgcatggattcagacagataggaaatccggtggtcttggtgatctaaataccaactgatttccgatgtcaccaaatcaactagcatagtggcccgcgcagattgcgcggctagcatcattatatttttttctcttataatagcatatatgttttctcaatgtattattaaaatatattaaaataacaacataattttgtgtgtgttcatgagagcgaacttccaatattcctttgaattttagttatttgtaaattgtatttctatatgtactctaaattctactttaattttattagttttattctgaattttaaattcttatatggattctatactcttcttctaatattccttattttaattcctaatttatattatttggaaattttatttctatatatggattctaaacttatctttcaatattttttaattctgaattttaattatttttaaattatatttctatatggactctatattcttcatccaatatatatttttttatttcgaatttttttatttctaaattgtatttctagatggactctaacctctatatttaatttttcttattttttaattccgaatttccattagttctattgtataccgacatggactctagtcttaccttcctatattccttatttttaattccgaatttcagctattattaaaattgtatttctatatggactctgttttttctttttcttagattaatgtgagaatttctagaccatgagagcgaacgtggaggcttctttttctattcctttaataatataatagatttcaaagtcttttggtgtactaatccctgatcaggtatacttcagttatgactgcctgttggctatatatacaatatatgtctttcttctggatatttacttgtttgtattcaaagtcttttgtcatgtattccttgttcttaatctcataagagctcatactttctgctgtcaggggattgctctgagaggattattcatcattgacaaggagggtgtgattcagcattctaccattaacaaccttgctattggccgtagcgtggatgagacgcttaggacccttcaggtagaatagcaagataataaaattgcatctgcaaacatgcatttcttttcaatatacatggcatcttggcagttttttcgtcttgaatttaccatagtctagtgtctataacatcaaaaattgctcaactagttataactgtgagtgacaaagtcagataggaaaattttttgcaaatatgcaagttcgtaatttgttttcctatggtgacaggccctacagtatgtccaagaaaacccggatgaggtttgcccagctggatggaaacctggggagaagtcaatgaagcctgaccccaaggacagcaaggagtactttgcttctatttagacattttatttacattcatggtcaagttttgccatagcctttgttgggtcacacattgctcttatgatcgaaattgcagttatgtggacacattgactttctgcaaataaagttttgttgtgtttcattttggatttgttctgctcccatttaaaaaggaaaattcaaccattgaaaaataatcttatttgattctagtcaccttttttaagaaatgctagttaaggttttatgcaagaagttacttaaaagctgtgtaatgtttaataaaatgttattggctcttttgtacctggaagcgt

SEQ ID NO: 9165 - DNA, 8981 bp, Oryza sativa
ataggtgggtcccaccattttttaattaaaaaacgttgactgggatgccacgtgtatgtcacgtagactaaaaccaccgcggattaggtcgatggggtaattcgtccagtttgcatagttgggggtgaagaatatccggttttatggctcagggagtaattcggacgaccgcgatagtttagggggtaattcgtactttttcctcaacaatatggtattatttctgagtctggttgctatgatgcacgacgcatacgtgcagtcgtgcagcatatcgatggaccgaaacctcctgggcctccatggcactccgcgcgatcgagcggcttgccgcggggcggggccagtgcggaacgatggggctgaggcctgcagcctcggacaccgcacggcccgcgcatgcagacaccccctcccgtcgcccgcttccgcggcccggtccacctcccagctaggccagcagccggcgaggcccaatgggaccctgactctatttgggccgttagctgcaccgacaatacacgcgtaacgagcaataagtcgtcctttttctgattttagttctgggaaaacgtcgtgctcgtctgcagaaaagggacagaagtgtataaaccgcgggacaagcacgttctttctccagtctaatctcttacacagaattcagggcgaattctcgaacggttagccccaacacgtggcacttccggattcctggatttggtttcccaccagccaatgcgcagatcgtacgagttgcctccgcgcgttcgtgcttgtgcccgcaaggcagctgggcgcctggtccctgggccatgctgcagctgcacattgactagggaggtgatggcccaagctgatgtccgaaaacgggtggaaaccttccaaagaaatacaaatacaagttaggcttgtcttcggcagcccctcttcccaacccatctccctctttttccactgttaaacggtgtgttttttgtaaaaagtttctatacgaaaattgcttagaaaatcaaattaatccattttttttaaaaaatagcaaatacttaattaatcacccgctaatcgctgctccgttttccatgcggtcactttgggttggaaaggggttccgaatacacctttcctaacatgtagtagtagataattgtatcagaagatggaaattagaccatcttaaaatgaaaatgtacagattagcaaaccaaggaaccatttctgaagaaaaaaagcaaaaacagatttaggcacctgtcggtgacatggggccgggggtatcgtgactagaggcttgggtagccgcggtcacccacgtggcccgaccccctcgggggggtcgggcccgagggtgacgtggccacccctccttctgtctccccgagggatcgggccgctcccgtttcggccccgagggctggggcgccccgaccccctgtggttttggcgccacgtgtgtgggttaggtgagcacagcgggctcacctaaccgcatttatagcaggttggatgagcgcgccacgccgcatttaatgcggcgcagcgcacgcttatccggtccgtgaccagtcgcggtgtgtgaccggtcacagaccggtcagatcgcgggttaggtggcaacaggcggcctgtcacacgcctcgccccgtcccgtcggaatgatgagagcttcctggctctcgtccctagccggagccggcgtgctaactcctggagttggtatgtcagtcccggtcagatccattccaggcttcagcgcaagtatggcgaggaagtcgctggccattaaatgaaggttgaaatgggcgtccaccggaaaagcgggcgagcggggcaggaggcgtgtgctttgcttgtcagaggtcacttccggctgtagactagccctcattgtaaaaagcatgtttcccttctcaggcagcaggaggcccatgtggtgacccctgaccagataaaaaggaggcccaggcctaggaagaaaaaggggggagaaagaggaaggagggttgggactctggcgaatgggttctagagcctgaactctctctcgctctccggctctctgtattccttcacgcacagatccaccagaacacaggagtagggtgttacgcttctcagcggcccgaacctgtctacgtcgcccgtgtcttgtgcacttcctctctcgctgacgttcctcagatcgagggcgaagaacctcacttagcgcccccggccgaacctgcaaaggggggcctgcgcggtctcccggtgaggagccccacgctccgtcagcaccatatatagattccatatgcctccatactatactagattacgtcacaaatcccaccgtaaaattttggcatcaaagaaaacatcacgtgacttttatttccttcaaaattttatcattacaatagggtaggtaattgaaccaacggaaaatatttattggtgaaaaaaatgctactactcaaccaagaaaaaaatacaaatcaaatgaccatactaaagaaatttcacaaatcagtagagatactttctttttaccatttagacaaatgatgatgtgctcaatgagctttggcattatcaaatattggcggcagataattgaaccaactgaaaagatttatccatacaaaactgctactagaataaataatgaaaacaataaatcaaatgacagtaaaaacaaattttaatcagaaattaatattgaaatcaaaatagaaagacagtcttttacaatttatacagatggttgtgtgctctatgagctgagttgcatgttctcaaaattctgtcatgccctaaacaatgttgaaaaaaaatggatttataattatctactaggggttaaaaatatttaattttcttcacttacacaaatgggctaactacaaggtgtgccaaatggcgcaccatttttctagttagaggtaattaaggcaatattttttaaaccaaagaatggcatttggaccagaaaaatgtctaacgatagtacccacttttgcggctccgaaagtcggaaagcacgcaaaatcgtcgtcggcctaaaatttaaaaccgtgatcagccgaccgatctagcaaacgagtattataatatcaaaccgttgaacggtcaactagagcttcaatgattggtgctaagcttcatatttataattaaccacctctcatacatataacaaataccatagcctagctactaacgagtttgtatatacaagatcgatcatccagtagaccagtacagtgtacatttctgttcaatcggtttcactttcagcagctgccttggatacttcgtatgctagctactaattttttttacttgtattgtttgaccactcatcttatttaaaaaaattgtgcaaatataaaaaacaaaaagttatgcttaaagtgctttggataatgaagtaagtcataaataaaataaagaataatttcaaaagtttttttaataagacgaatgatcaaacagtaagaaaaagtcaaaatccattatataattatgggacggagggagtacttggaatcttggatacgatcatgaagcccacattggcctgcatccatgccaaaagctcccagtctaccggccaactaatctgaacatactgaatttcacacatgcatgggcctgcaggggcacgatcgagacctggtcaccctcgaccagcggcgcacacatgcaacaagtgacaagtctcatcgccttccaaccaatcaacctgctcccgtactattttatgcgccaagtttcttcggctccggattatactattgacctagtagtatatgtaatatgtggctccatattggacacatgtgaattgcaatataaatgctttgcaagcgctcgattattttccggttggattctcccctaattaaaccatgggcaagatatgtttattcatgtgtgtacctccactgcaaattgaaagacttgaacactcgcgatctttaaagatggtcatacttgccaattgatgatctcctaccatctaacttttttcttcgcagaactatcgatcgaaattttgaagcggattcatcattctaaagtatgcaattgattatgagattattggcactcagctgataatttttaacagatcaacgttgaagatcagattttgcagccattggacagaaattaatggatgcctcttcatgttcctcctctccattgccatctctggtgcttccacggtcgaccatttcccccagcctttcctattctaattcccttctcccatataacacataccgcctttcattttgcttagataatgtataaaattcgacctctatatatacaagtggatatacacataccatgcacagtctagctccatggcccaatcggtatatcgcttttggccttcttctaagagcaagtttaatagtatagtcaactattagctctaaaccatatagagccaatgtaaatagctaatctatacaatagttgcttactatactattaatacccgatcccacatgtcatacactcgttatgtcttggagtccgtgctacagctggctacagatctgtagcccgctgctcttctcttttcctttatctctttaaaatatatttatagctagcttatagcctgctattgtacctgctctaaacctaaagatccccttgttcccccttccacctcacgcttatcctactctagccatttcattgtagacgattagttcctccgaattgaagcaaagggaatctccatggccaaactaaggttagaaaattgattatactgaaaaaatggtaaaatttagcaatggataaaaaatggatcatcatacaaactgttgacaagttgaagatcatactactcacttttaggagttgggatcctttcaggtatcaaatctttcagtgagggcaaatgatcttatttcttttcagaatcatcatccaaactaatgttgttttccaaattgtacacttgcttttgcaagcctctattgattttgttctctccaataatttcagagaacgagctactagtcgttatacacgtcaaaacccttcggccgattgtaacaaataatagtcttaatttacatccaaaaatcgtaggagaagacctaaggaataaaaggttaattgaaccttaaactcactgtatatcaaatcatgaagaagccaagatcgaagagaaattaatctcttgcatgtgatgaagatctcagcgagggtaggaagcattcaagtgcgaggccaagcatggcgagtccctccacaccctggcgtgcatcttgagcatctccctcgccctcgccctcgtccgctcgccggaggcgccgacctgcaccaggaagagcagcctcgccaccacgccgacggccagcatctcctgcagcaccgccgacgtcgccgagtgcctcgccacggcgtgcagcgcgcgcacggcgctctcggcgcccgccgcggcgggcagccgcgtcgccgcgcacgccaccgccgcgagccccgccgggtgcgccaccagagccaggcgcccctccgcgcagccgcagatgtggtcgatcgccacggcggcgagctcgcacgcgcgccggtcgccgccgccgccgccgcagccctcgtcgaggaggaggcgcacgagcgccgacacggcgccggcgtcgaccgccttgacgcggttccggccccacgggcagagccggcagagcacgtggagcgccaccttgaccgccttcgccgacggcctgtccgccaccacccccaccacgccgtcgaccagcgcggctctcgccgacgtcagccgcgcgggggccatcgccgggagcgccgatttcagcaggtggattccctgcatccgcgagaggtagctcggtcgccgcagcacgcacgccatggtttccaagaaatcctcaccgccgctgccctccaagaccctcttgaagctctcctcggagagcttgagcgaatgcaggatgctcagggccgcctcctccggcgagctcgccttcgccggatcatgcacgccgccgcacgtcgtctcttccggcttggccgacgtcgcgtcgtccacgcccgccacggaggcgcgctccttgacgacggacaggaggaactccacggcgccggaggcgccctggacgcaccgccggttgcggtcgctctcggcaacgatgtcggcgagctccctcagcgaagccatcagctcctcccgctgacgacgccggcgcagcagcggccgcgcggcgtccacgatggcggcgacgcgggcggcgtcgacgggggggcgcggggtggggaagcgctcgacggcgtggacggcgcaccacccctgtatgaggcggcggagcgtgtggttgggcgtgggctcccggtccgccggcgccagccgctgcttggtcaccgggcactcgccgtggccgtcggtgaacacccaccgctcgatgctctcccggtcgtaggtgatccccgtcgacagcgtcaccgggtcccgcatgatctccagcgagatcgggcacacgaagtaggacagcacctccaccgccggcgccgccgccggcgacgactcctcacccatgcaagcctagtagcctagcctagctggcctaggagaagcaagaaatgcactagtggtcgatcgaaacaggaaagcttgtggagctagcttatataagggacagaagagagagacgatgacacctgaagtccacgccaagatggatagttccagcgagtaaggcgcaagtcttcgtttgtttttttttatgcgactgtatcaaccgaaaaaagccatatacatgcttgtctagtactccctccgtttaatgttacaagatattttgatttttagttaaaatcaatttatttcatatctaactatatttatagataaatatagtaatatttataatactaaattagttttatcaaataattaattgaatgcattttcataataaatttgttctggattgaaaatgttaatattttttttacaaacttaatgcactttaactttgaccaaagtcagaatgtcttgtaacctgaaacggagggagtaggcttctaaattgaaccctgagggttatgtttaaagtggagttatggaatagcttgggtcatgctccatctcttccaagttttattttgtgacagtactttagtctactccaatcattttttatacgtgaagctgaaactattcggttgagcaggagaggtgaagctagagttctaccaaatagggatgaaaacggctcgaaaacggatggaaaccatctctattgtattctttttcatatttttttagaatcgaaaatcttggatatgcaaacggaatcaaatattatcgaatacgaaaataaaacgcatcggatccaatacaaaatgaatagttatcggaatataaaaatctctcaaactgaacttctcaaatcaacggaaagatgtagctcgttatattacctaaaatagtaaatcgacatttataattttaccagtttcaataataatacaactaatagtatgctttacttttcacgagaacgagatctatattcacataatgtaattagtatggctcagcctaataaaaaaataattagaccaaagaaaaccttaaaagaaacatcttcatctaactaaacacctcaataatcataagcaatctgaacattttagagtggagaagattgaaaccacttgtatatgaagagtttccgaattcgtttttgaccgattccggtttccaatggatggtagccttaccatattcggttccgttatttatataacaattctaaatttgtttcaaaaattctccaaaaaaaaactaatcggcactttccgtttccaaaaacacatctggaaactgtaaattttttgaactgaaccattatcatccctactactctatccgttctattttaagtacaggagtactctaaatacagttgtgggtctctgtatccaatgtttgataatcctttttatttgaaaattttatgataaaattttctaaaaataaatcactcataagtaatatttatgttctatcatctaacaacaataaaaataataatcataaaagaatttcgaataagatgaacgatgaagcgttggacacacaaacccacgattacacttaaaatgggacgtagaaagcatcaaatagacctaatcccatatagtttcgaaaagtcggcgcgctgatcaatttaatatgaggatgaattgaagttagttgtttctcaaaaaattgaagttggttggtgtggaagggagctgcgtgaggcgggcggtggaattataatatgcatgggaggagagggctttgatcgaacgctaattcgctatggcgcgcacggccgatcgttgggtcggtcggtggatggatcgatcgggtcgtgtttgtcggacgggcgcgcgggggcggccaccgcgcgcgccctcatgaccacggaaacgttctgcttccagctttgacctcgcgcggggtgggggttttttcttaatcaatttttcaacggttactgtgccgttcctcgcgtctactcttctcgcgcgtcgtttctcaggtttgctcgctctcgtttggctttgaaaattcgtgatttcagctcgatcgagtgtagaattttcaagccgcaattaattttctgccgttgtttttctaccccaaatcaacgttttattactgtgaggacgtacgtatgttgtcccttccgatcgatcagcagccagcagctgatcgagcttatatactccccacttaccataatataagggattttaagtttttacttataatgtttgaccactcatcttattcaaaaattttgtgcaaatataaaaaacaaaaagttatgtttaaagtactttggataataaagtaagtaaaaaaataaataataattctattttttttaataagacgagtagtcaaacagtgcaaacaaaaactcaaaatttcttactctctccgtttcgaaatgttt

SEQ ID NO: 9166 - DNA, 13977 bp, Oryza sativa
  unsure (1)..(13977): unsure at all n locations
tccccccccccccccccccccaaggcccaaacccccgcccgcctcgacctcgacaagccacggccatggcgtgcgccttctccgtctcctctgccgcggcgcctctcgcctccccgaaggtgcccgtctccgcgccgtcgcagccgtccctgccgttcccccgctcccttctccgccgggaagtccctgcgcctctccgccgccgccgcctcgagatcggctagggcccgcagcttcgtcgcccgggccggaggcgaggttcggcgcgatttgatgtttgatttttttggggtggtattggtgcctctgtgagagttgggattgacgcgcggccgcgtgtgtgcgtgcgcagggggacctgccgttggtcgggaacaaggcgccggacttcgaggcggaggccatgttcgaccaggggttcatcaaggtatggcggtaatccggtaaccacatgcacagctacattgcgccacgcacgcacgcgcggcagtgttattcgacataggggattaattggcccaggaaaaaatggggcctatttgattggcagtgtaattcaccgtgagatttgataatttaacactcttttcaatgggtttcgataaattgacatcctagcccactttcattcactcatatggtcccacatgtcatcctcacaaatgtcaattaaagtaattgggcaacgaaaaaagtgtgaaattatcaaattttttttacattcatcataggggattaattggcttgggccaggccaaaagaaaaaaaaagtggtctattcgattggtagtctagattagatgttaagtccatatccacggctgtttaatgtagaagctgtatggttgatcgtgcttccaattgatatcttcgttggtcgtgtccttcactccttctgtatatgcaggtcaggtcaagctgtctgagtatattggggaaaaaatatgtggttctgttcttctaccccctggacttcacgttcgtctgtccaacagatgcgttgaccttgtcgtgctctgtcatggaaatgccttttttttcagttttttttcattcctaaagtctaaatgcatgtttgtaagctctgcagagatcactgctttcagcgacagatatgaggagtttgagaagataaatactgaagttctcggtgtttcgattgacagtgtggtatgctaacttttacccgcatgactttagatgttgttacggtgtcgttacctggtctgttgctctattgagaatttcgtatttccattccatctggacatgtagcttttctcttgacaatatttgtggtttcttgaatgccttaaggttgtgatcaatattttagctttcctctttatgtgatcaatattctatttgttcttaacgtctgaatatagagcattagatgaacccttgcattaggccataagttttaacataagattgccacgtgttgaactttcattctgtattataatgaaatgtgtggtgtttgttatgccttatggaaatattgaatggaagtaaaaaccgatgctctctaatatttagacaatagcgttataaacattcaattcagttattttgaaacaactttgagaaatgagactgatgtaacgtcttaatactctggtttgcttctgccaaggagattcattgcatactcaaataattatcacaaattatatccagtaaaagtattgattttgctactattacagtgagtagtttgtaggcagtagtggtactgtaatttattttttactatcctctctttctgcttctgcattaagcatttcattttttttatcttataggtatcattcactgttactctgtcgactataaatatttaataagtggccacaacctatgcttcataagtgtcgcatactaatttggctttgaaatatcttttgtttgcagttttcccatcttgcatggattcagacagataggaaatccggtggtcttggtgatctaaataccaactgatttccgatgtcaccaaatcaactagcatagtggcccgcgcagattgcgcggctagcatcattatatttttttctcttataatagcatatatgttttctcaatgtattattaaaatatattaaaataacaacataattttgtgtgtgttcatgagagcgaacttccaatattcctttgaattttagttatttgtaaattgtatttctatatgtactctaaattctactttaattttattagttttattctgaattttaaattcttatatggattctatactcttcttctaatattccttattttaattcctaatttatattatttgtaaattttatttctatatatggattctaaacttatctttcaatattttttaattcttaattttaattatttttaaattatatttctatatggactctatattcttcatccaatatatttttttaatttcgaattttttatttctaaattgtatttctagatggactctaacctctatatttaatttttcttattttttaattccgaattttcattagttctattgcccctaatttctattatttctaaattgtatttctatatatggattctaaacttatctttcaatattttttaattctgaattttaattatttttaaattatatttctatatggactctatattcttcatccaatatatatttttttatttcgaatttttttatttctaaattgtatttctagatggactctaacctctatatttaatttttcttattttttaattccgaatttccattagttctattgtataccgacatggactctagtcttaccttcctatattccttatttttaattccgaatttcagctattattaaaattgtatttctatatggactctgttttttctttttcttagattaatgtgagaatttctagaccatgagagcgaacgtggaggcttctttttctattcctttaataatataatagatttcaaagtcttttggtgtactaatccctgatcaggtatacttcagttatgactgcctgttggctatatatacaatatatgtctttcttctggatatttacttgtttgtattcaaagtcttttgtcatgtattccttgttcttaatctcataagagctcatactttctgctgtcaggggattgctctgagaggattattcatcattgacaaggagggtgtgattcagcattctaccattaacaaccttgctattggccgtagcgtggatgagacgcttaggacccttcaggtagaatagcaagataataaaattgcatctgcaaacatgcatttcttttcaatatacatggcatcttggcagttttttcgtcttgaatttaccatagtctagtgtctataacatcaaaaattgctcaactagttataactgtgagtgacaaagtcagataggaaaattttttgcaaatatgcaagttcgtaatttgttttcctatggtgacaggccctacagtatgtccaagaaaacccggatgaggtttgcccagctggatggaaacctggggagaagtcaatgaagcctgaccccaaggacagcaaggagtactttgcttctatttagacattttatttacattcatggtcaagttttgccatagcctttgttgggtcacacattgctcttatgatcgaaattgcagttatgtggacacattgactttctgcaaataaagttttgttgtgtttcattttggatttgttctgctcccatttaaaaaggaaaattcaaccattgaaaaataatcttatttgattctagtcaccttttttaagaaatgctagttaaggttttatgcaagaagttacttgaagctgtgtaatgtttaataaaatgttattggctcttttgtacctggaagcgtttcaatctaaatggcaagcacattgcttataaagtggaacaagaagtcctccattttgcgctcttgaggacggcccagtatgccagcctaggaaggcatgaacaccctggcccatatgtgtcttaactcttactgtaagtatcacctacttttttttcccttcccactgttattgtatcttttgcatgttgaatacatatgtctgatctatgttctaacttttcaaaataaacttttgctcatgcgcaattgcttctttttagcaggaagtcatgagaaaacaaagttaggtaaattaacaaaatggaaccccagcacagagtggacagcacagggctggaagcaatcatcttcaccggatttctgccgctccaaaccatctgaatatggtttaagagtactcctttcccctaactttatgaatgacttctttttttttcttaataataaacatgatattcctcctgttcttatctcaataagctgatcaatggcactgtggcacatatttaatctcatataaaaagaataaatcaagataatagtagcactagtactgcatatcctaagccacgcttataattacactggcagaaccacaagcactttttcttcaccttggaggcccctggagtggtagtgtagtgctcctgccgcagcttctgtgctgcacccattaccagtgcgccagggatattaaaattgggaagcttttctgcagataatgccactcatgcactttttagcatcccctcttgctccactttaaaaagctgcttgcagcaacacaatgcttagggttagtttaattcctgggcataccacaactcctttgccatgtacagatctaatacagcagcctaactgccttatgtaactagagaaagaaaaagaaaaggaaagaaaggatcaaaagaagagtatgcagtgattacggtttcttttctgctttcctctttgtgttttcttttgcggtattttgctcctctctgttccggggtcgatcctcaaactgtgtatatactttcctccttgaagcgctccttttggggcaatggctttgtgatgattagggcttggccttttcctccccttttgggccatatgtgaccaaagctttatttgactgaccacttaccactgcctcggattagtttgaacagaccatgctttgcatatgtagcgtgtaacacattgataccagaatcctataaagaaggtgaaagtttatctgtgcagaaactatataagagtttcgaagtagtcagtaatcactactagtcgctatatattggttttgtgaaaactcaacgacatcaatgcgaggcccagttctgattgttgtgaagaggcacatacaccattgcacttcactagctcgtacaagatgattgagaaatgaatggggatctgttgggaaggcttgagggggaagtcatttttgatactttgtttttgctggctgtttaatcgaccccttttccctgttcgtatccccataaagaactatgttcttgcacgacttttgatgcaaatgcacgcagtaatgaccggtcaatgatgctgtaaacgtgcttttaactacatactttggcttttgcctgacagttaattctgcttgtagtaacactgcagtacaacagaatatttgagcggcgcttatatatgtcaataatcatgcaattaataatgatgcaaatatattcatgttgatcttgatcagtgctatctttgccatatattagtagtaaacatttgttctgttcactcgtagattcggcacattggcactgaaccttcagcagttgcctaaacttaattagtgaatgtttcaatttttgtgtctagtaatgtagtctgctttttagggaacaagaatgctgaaaagccccggctttgctgaacagcatgtggctgttttatgcattactgctcctagtaattgtgagcgattctaatctttccatgcatacacacatacagtctacagagagcatatgggcaataaggggacgctttattccatatactttgagtctagagagaaagaggccgtacacagttcccgattcttttagggcacaaagatctctctctctcagaaaagaaaaccaatttaaatgggccctcttaaaagatgagaggtcactgcaggccacatcagatcgtatcgatcacataaagcatcatatgttgtatcgtcatcattgcaacatcagccccatttccctgttagtaatgtgatcaatcgtatcagtatacgacgagcagtgaacaggtataaaagtatgtatgtacttccttcatgatgaatatattgattgccctctcttaaaacaaaggctatgcggacgtactatacctgtgctacattatatgcatcttttcaatttgatgtattttcagctagtggctgtttagttagatgcatgggtcctagacagacgtgcttctatatatgtacatgtgtgatagaacaaaactgtacatatgtactcaattcattatgttgcttggggtaaatttagttctcatctagatacctacgccaataattcggtttaccaacaattatcccataccattgtttctttcattctcatcattttctcatgaatttcttgtgcatgtatccttatcattttatcatgaataccacttgtcacatatgtccaatcggggaataatgaagttgtggtatgaagtataaatttagatattatactgatgggtaagggaagagaatacactgagataggtaacctgtcccacctgaacaatgtatgagaaaaggagaaataacctgcaaaagataagtggcaaaagctgttacttgtagttttgctatggatcgttcctttcgttttgttttatttttgcactaataggtttggtgggagatgtattggtgtttacatatggtgacatgcatggagccatggagaggtagggaaggcataaattctatcaggtaagagttgcagcaaaggtttgtctcttattactaaatatagtatcccaaagtatatatggattcttcaatttgccattttactatctagttgcataaagattagaaaggaagattccacaactatatattatagtgacaactcaccaaacatggttgtgagttaattgtgctgcatgtcatgatatttttccctgagaaaatggagaccctctgaaataatgaaaaaaatttcaggggttatgacattatgtttaccttatattcacactttactgcgcttactttgttacatggaacaattattcttgaaaaatatcattactaaggcaccttgtctgctccaatgaccaatgcacacttgtcatttcaccaaatccttctagatcaggttctaaattttatggtcgcccggctttgcgcactttgatgcaggaacgcatagaatttagctcaggtcattctttagaggcagctgatcatatacagaagactagtcacaaagatactgtgcacaatccatatgatctcctagctagctaccctctgcatgagaatgtgagaacgccttgcttgaaacttgagacttgagagagatagaggggaaagctggggggcctttgtatctgctttgtcagcacatgcattctacctagccaactttttctttcccaccacaaaatccactttggaccctaaaaattatagcccaaagagaaagaaaaaacaactatgcagccctccctaacaagaaaagcacaaatccacacaccataatctcctccttccttcaacctctgtaccttctcaccccccctctagctactcaaaagatgaacattcaccaacatataaagcagcactgcatcctcccaccacttgcaggttgcagctgaagcagcagtgacctccgtcccccttctatatctgcacatctcattccttctcctttttcttctcctcacacactaccgttgccacatcaaatcgatagattactagattagctaggttcttgtagtatacgtagctagctaggtggtgtggtgtacgtgtgagagatgagggccggggggtgcacggtgcagcaggcgctgacggcggaggcggccgccgtggtgaagcaggcggtgacccttgcgcggcggaggggcaacgcgcaggtgacgccgctgcacgtggcgagcgcgatgctggcgccgccgggggggctcctccgcgcggcgtgcctccggtcgcactcccacccgctgcagtgcaaggccctggagctctgcttcaacgtggcgctcaaccgcctcccggcctccgccgccgtcgcctcgtcgccgctgctcggcggccacgggcacggccaccacggccactactacccgccgtcgctctccaacgcgctcgtcgcggcgttcaagcgggcgcaggcgcaccagcggcgcgggtccgtggagacccagcagcagccggtgctcgccgtgaagatcgagctggagcagctcgtcgtctccatcctcgacgaccccagcgtcagccgcgtcatgcgggaggccggcttctccagcacccaggtcaaggccaacgtggagcaggcgtgcagcaccaccacggccaccagcgcgccaccgaaccaaaaccctaaccctagctgcaccggcgccgcagccaccgccaccgccaccaccagcccggctcatcctccggagatcaaagccaaactgccactgctcgacatgctggcgcgcgacgaggacatcgccgcggtgctcgactgccttgccccggcagcggctggcggccggggcggcggcggcagcaggaggagggtcgtcgtcgtcgccgagagcacggccgccgcggaggccacggcgcgcgccgccgtggacagggtcaggagaggggaggcgaagcagcacgacgcgctgcgtggcgcgcaggtggtcagcctccgcgtgtcgtcgttccgcgacatgccgagggaggaggcggagcggcggctcgccgagctccggtgcctcgtgaagagccgcggcgcgcgggtgctcctcgtcgtcgaggacctcaagtgggcggccgacttctgggccgccgcgcacgccggcgccaggagggtcggcagcggcggcggcggcggctactactgctctgtcgagcacgtcgtcaccgaggtgcgcgccctggcgtcgtgcgacggcggcatctggctcgtcgggttcgggacgtaccagacgtacatgaagtgcagggcggggcatccgtcgctggagagcatgtgggggctccagacgctcgccgtccccgccggcagcctcgcgctgagcctcacctgcgccttcgacgacaggtaaaaaatcatccgatcgatctaaaaaaagtttgttaagttctcgcggcgcagcgtgtcacgtcaggtgaacgaatcatgcacccgcgccggccttgcagaaacgaaatgcctctggtctctgtgatctgaccccttcgttactgagcaatcagtaagcatcagtagttcagtaccatgcgggtgaaagcttttgcatcttttgcgtgctttctgggcaaaagctttaggtcaatctatagctcctcatcagcttcacattctctttttctaatatcgcattatttgaacattcacgagagcatgatatatcgacaatacaatttcagaggtacagcggctgacaaagatgatcagtttagctgatcttgtggagacatgtcgatcggtgaggtgacagtgtgtgcaggaatctaatttccgttttgttattctttctgcagcgcgctgggcgcagtcaatcagtccatgaaagcgagccctcacaccaccgatgggaaccgcccggcgccgtcttgcgggccgcttttgggcggcagccacctcctctccagatgctgcggcggcgactgctccgccgcgacgacgacgcacgagcacgacaccaaggcgtcgttgccccgctccttcgtgtcgtcgtcgagcctcccttcttggctccagcattgccgcgaccagcagctgcaggtgccactcgatcgaatgctaatctttttatcttaattaatcggtcaatcattgctgattttttttttgtcttctcgtgataggagtcgacacatttcgcggatcttggcaagacatggggatccatctgcggcaagccgtctcagcggatgacgctgcatttctcggcgccggtgtcgccggcgtcctccatctcctcctacgagcacggccacggccaccagcagcagcagcaccagcctcaccactcgtggcttctcgccgacctcgacgccaagcacccatggaagcccaagcgcgaggacgacgacgacgagaaggccaagtcgcacgacgactgctccggcgcctccaatggctcggtggaggtggagtgccgttccaggttcaaggagctcaacgccgagaacctgaagctcctgtgcgccgcgctggagaaggaggtgccgtggcagaaggagatcgtcccggaggtggcgagcgccgtcctccagtgcaggtccgggatcgccaagcggcgggacaggtcgaggtcgacggaggcgaaggaggagacgtggctcttcttcctcggaggcgacgggcacggcaaggagagggtggcgagggagctcgccggcctcgtcttcgggtcacgcaagagcttcctctccgtcaagctcggcgcctcctcctcctcgccgtccgcgtcgggctccaccgaggatcaccaccggagcaagcggccgcggacgacgacgacgtcgtcggcgagcgaggcctacctcgagcggctctacgacgccgtctcggagaacccgcaccgcgtcatcctcatcgaggacgtcgagcagggcgaccatcgctggcaggtgggcgtcaaggaggccatcgacagaggggttctccggagccaggccggcgacgaggtcggcgtgggcgacgccatcatcatcctgagctgcgagagcttcgaggcgaggtctagagctggctcgccgctgatgaacaagaagatgaaggtggagaaagaggaagccaacacaagtgatcatgatcacaaattagaaatcgaatcaggcgccccctcttcttgcttcgatttgaaccttgacatggagagcgatcaagcagcagatgagctcagctccggtgatgtctgtctgctcacggcggtcgaccgggtgctgctcttcagaaggcaggatgaaatgtaacactagtgtacatgaaggatccatgtttatcagctagggtagctagctcattgctcgtctaattagattttcctttcatttgttttgatggttttttttgtttctagtattaactttggctttagaggatcatggcattggtgcggttggacaatggcatattatgagcttcgttaagatggagctctgttatatatttgtggtggtggtgatcaaatatattttcatctacacagcggtttggataatgggtataactatattttgaacatgtgtgctgaattcactgtttgaggcgacaaaggttctgagaagcatatccaactgaaaaggcttgtgaatattcaactagtgagaattaatatgaagacgctagaagttatatatcgaacttggagctttcatattttggattttgcagctgctgagttgggaaactattttcatcccccgaggggatatcccctcgttgtttgcatatcacccaaatagttatgaaaaaaatcgaaaaaatttgagaagatgtattaaatgtgatatatcactctacaaacatacaagtttaaattcaactattacaccccgcaacgaaaaaaacaaatttgactgtgaatatatgttaactagttgtagtttaatttgtttttttcgttacgagatgtagaagttgaacttgaacttacatatttgtggagtgatatatcacatgttaagagattttgcaaaagagggaagaagnagttcagaannagnngggngacangcanncnnngaggggatatcccctcgagggatgaaaatccactcccctgctgagtttcacaatcaagtgtgaatttgaactcttcggggccattggagattttgaagtagctacagctactaaaagcacctcaagcggtggctagctagggtactgatgatttcctgtgaattaatacatcagattgtttacatgtgaaccttttttcataatagaaaaataatttggacccaacatttcatatcgtccaatcatctccacaggtttgtgctacccaataggatcgttgggcccacatgtattgtcacaaaggcatgccatttctgcaaacttttttaacctacttggagtataacatactccctccgtcctaaaaaaagacaaaccctggtttccgtgtccaacgtttgaccgtccgtcttatttgaaaaaattataaaaaaattaaaaagacaagtcacgcgtaaaatattaaccatgttttatcatctaaccacaatgaaaatacgaattataaaaaaatttcatataagacggacagtcaaagttggacacggaaacccagggcttgccttttatttggatggagggagtagaagctagaggaaaaacacaaacacgcaaaaaagggttttgtgatcgatcattatacttgccaattgggagttttttttttaacgaactgaagagggaagaactgcatgtcttccaacacaaagtgatattgtgtctaaactacatcacttaacggtgtctataccaagccatgtcacatagacattactctcaaaactacttccccaatatattatttatggaaataggtatataacattctattttttttggaagaaaacttttaaatataactaattagtttcgttgtaacttgattgtatctacaatgtaatttatttttaaattacgtacgtaaatatgtcagaaaaactgtgctagcgcagcagcaaacctacagattgtgggttccaacctctcccccgcgctcataagcaatttttttcccagccagcacaaatctcacggtccaaaaatcacaaattcctaccatggttccttttgcgatatagaaataatatagaagaacaatgtgccgtttcaatgaaatagtttatgtattctaacatcattatgttattagcatagtaccttacgggtattgcgtctagtatccttccagtatcaaatctagtatataagataatgtattaacgtcggcgtggtatctatatatgtacgaaaccctttttttatgagtatcgtatctgagatatccttagtattagatctgatacctaaggcactacgcttatgtcagcataacttcatcacataaagtgttccattggaccacacaccatcatctagtgatccgcttagcgataacatgcaagctccaccactgttctcactaaaagcaagattaattataaagggcaactccccgttaattttagtatatccgaccaatttcctccgctattgttcccatgtgatctagatttcggtctagaacttatttgacggaactattttttttgaaaaacaactacccagtttctttttaaaatatactttctccatttcacaacgtaagactttctagcattgcccacattcatatagattttgatgaatctagatatatatgtgtgtctagatttattaacatttatatgtgtgtggacaatgctagaaaatcttacattattatattatggaacggagggagtaatatgtaatatttgaaatgaagtagctaccgatgatggtatccagtccagatttgacatggaccatccttgatgttgatcaactaataattataataaggaaaaagtccaaatactctcctaaatttagatagaaatccatctagcaccttaaactttaaaaccggacatctaatcccctgaactttgccataccatctatattaccccctaattaaggtggtttcagatgatggttttgcatattttgaaagcttaaatgaacaattccgaataactaatataacatatttgcatatcatcagttataaatcatcaatttattcctatacaatgatatcatactattactatgttggtacttatttgtaagtgagag

SEQ ID NO: 9167 - DNA, 18412 bp, Oryza sativa
ccgctcccttcctctgtccccaccgccaccgccgccactccccaccgccgctccggccggggtgaagagaaacgctgggggagagagggaaggagggaggaggaagaagggaagccgggaaggagctagagggaggatgacatgtgggtctcacatatcaatggatcccacaatataattttttgtgtgagtgacatgtaggtcctaccttttttttatttttattctaatgccacataagcgccacgtagaacaaagacttggtcaataccgccacgtaggcgccacgtcagctaaaatcaccgagggatataatttgcaccggttttgatagttggaggagtcaatttacctggttttgtggttaaaggatatgaatcatactcggagctatagttgagggagtcaaagtatatttttccatcccaattgtcccacccacctgatactaccatcacgcgacgcgacgccccacggccggcggcggcgcgaatcgcctaccgcccgctgcacaggggcactagacacacatgggctgatgggcacatgacttagcccagcattctcgcttacatatcttatgttgttttttttattaagacgtggattttaccaaggattttattagtatgttttctaaaccgctaaacaatatgtttttcaaaaaattatataaaaataattttaaaatatcaaataaatttatttttaagtttgtaacaattaaaacttaattaatcatgtgactttttcattttacgtatgctaacttaatctatatccaactctattttaattatatgttaatggcttttttattttaggtagactatcttaatcttcgtccaactctattttttaatttttaagtttgtaataatactgcccaacacggccaggatgaagcgtcgatctgaatttctttttcaattttgagggcactctccttctagagacactcccttatgaacggagcatcgaatttgggattgtggcaaatggcaatgcaccgttgctgtgcacaggtgccggccgggcgcgcttacacggctacacctaacacgcctacactcttttttctcatcagtcatcagaatacttacacgtttacatttgtgcttttgacaatcctagtaggttataattagtactaagtgcttagccgatgaacgaaatgatgaccaacaccaccgacacaccaccaaaactcttgtatggatgtttttctgttgtttgcatatcatttaaatagttacaaataaattaataaaaactagaagatatattaatatgtgatatatcacttcataaacacgtaacttaacatttaatttctacttgtaagtttaatttattttttgttgtcatatacagaagttaaattttaagttgtatgtttgtagagtgatatatcacatgttaatatattttttaaaagctttttataactatttgagtagtatgcaagtaaggagtggaagtaaggagtggacgttcaaaactagtactcgctaaactagtcgagatctctttttctctaccgctgcgcaacaacatttgattgaaccatcttacgatgctttttctcaggctcatgcagccatgcttggatgcttgcgttgttgagacttgagagcacggcacgtatgcgaacttgatcaggtaggtcgtcacaaacgcggcgcgcgtcgacgagaggccgagacaaccacccacccactagcgcgcgcaccgagcgagctatctctccgctcggtctcggtcgatcgccgcgcgcgcgcgtggccgagcttgcacggcgccattggccgacgcgagccggtgaggcgatagtgctcgctccaccactctccccgaccatcatgggggtgtcacctcacctgctacgcctgtatatatataaagcaccagcagccatgaagcccatcaacgaaaaactacgtgacagcgtgacacagggggtagttaattactagttattcgcagtgcgtgcgtgtgtgtgtgtgagcgatcgattgatcgagatcgacatggcggtgatcaggggtgtcgtggtggtggtgctcgcgctggtggtggtggcggcggcggcggcggacggtgcaggggagtgcggggcgacgccgccggacaagatggcgctgaagctggcgccgtgcgcgtcggcggccaaggaccccaagtcgacgccgtcgagcgggtgctgcacggcggtgcacaccatcgggaagcagagccccaagtgcctctgcgccgtcatgctgtccagcacgaccaggaacgccgggatcaagcccgaggtcgccatcaccatccccaagcgctgcaacatcgccgaccgccccgtcggctacaagtgcggaggtaagctgagatcgggagcagcaaagaaaacggtgttagtcattaacgcatggtaattaagtattaattaaaaaaacttaaaaaatagtaacagtttttataaaaaatcacatcatttaataatttgaaaaggaggaatagagttgaaaaaaaaaagggaagaagacagcctaatcaacatgtcaaactgtcaactcttgccacgaacaatctatgattatttcatcattttcagttggttggcgctaacaatctaacatgatcgattccttctcaattctctttcacagattacactctgccatgagcaacaaagagtactgcatgcagtgccggtgccgtgtctgtcatccgcttaatttatcgagtttatgtcgtgttacttactaaagctgtatgctgttgtgcgttcgtgcagtttagtgtcagtgtcaaacaccaaataaaagggttccatcttccgtgggacttcgtgatttcagtccgtagagttgtttctccaagtccaggatagtgtgtacttgatcatattatctcggagggatgcagagacgctcccctgaattctctgaataatagtacaacttggtttgttcatcgattcacacttttagttcaaaaaacttgctatacatttttacatcttgtatgctcgcttatgccttatgcccgcagaggagaaacagaggaaacatgcaactagtaacagtgaagaaattcagaggttgtgtgctctgcttaaacgaaaccaaatcctctcacattagtgtacagcgcgcacatggtcactgatatatgagactcatcatttatggacccatatatcagccaccatgcctctctgatttaacgtcagaagatctctccatagacccacatgtaagaggcgcactctcacatgtaagaggcgcacttctctctctgactatattagaggagcatcatcgacggttgtgcatgctgctcgcctgcaggctgatactagtgcttgcaagcttagcaaggggcgcagccacggtactagcctactaggtacgttcacacgtgtgatccttgttatgagccaacgatcgctccaattgacaacgtcggatgtgcgccacatgcacaatgagccaatgattttacccgaatcacaatattgaacatacacaacatcggatgtgcgttagacgcatccatgtgagccaacgattttcactctattagagcacgagaaattgagtgtttcttatcaaaaatcgtttttttttcaaaggtttttatcggagccgagagtgcctacctccgagccgagagtgcccgccctttctgtcaagtaggctactttttccggaacgcacacttttttttaggtttcataaaagcatatttaggtccacacgtgaaagaacctcatgaatatcgaagactgctactgagttgacaccattccaagaattgaattcattccgcaaaccaggacctatatcattaccaactccagacagtcttgcagaaactattaggggatttcaactaatcctcacaatatcggttgtgccccacgcgcccatatgatatcgatataggagatcgttttaaatctaatcggagccacaacttaataagattgactagtcttttaggtaagttatattctactttctccgtttttaatagatgacaccgttaaattttgaacatgaccactcgttttattcaaaaatttatacaaatatataagatatatatcatacttaaaatactttgagtgataaaacaactcacaacaaaataaagtataattacgtaatttttttaataagatgaacgatcaaacgtgtgataaaaaattaacaatgttatctattaaaaaaacagatataatatttttaagttgtgctctccataataagacatcttttgcttgatgtattacaatgacgatgttgctacacgtggacactggtgcaccatcttctagtagatgtatcgttcatcgcagagggcacaaatttctctatcacatataggaggtgcagagcaaaatgatggatccaccaggccccgcgtttgctgcttccgctgaaaaacaccgtgaaaacaaactaaaatggggcgcattgttcacaaaatttcgctgctttggcttcaaacgaaatatagggcgatactcctacaaaatcgcaaacttgttgtgtggtgtacgtataccactcttagaccttgttcggtttagagaggtttaaagaggattggagggggaataatttcaaatcccctcaaattctttcctcatagggattaaccgaataggccttatgattattcttttccccaattccggaggccattttgtactaacattgctaactaatatctccgtaccttatatgtggttaaattatgagaacgttcgactcgcatgcaacaaagtatcatgtgcattagccatttggcctgcaggtcatcacataaggcatacttgttagggtgcacagtacacacgctactaattaagcgaaggtgtgtcacaccctcacacgttccttgtgttaaacatagcacacgccacgacctgccacacttattttgtgcacataaatggcttgtcctaattttaagtcaaattaatgttgtgtttactgttaaactctcgagtattagggactgaactaaaaaacgtgtgattagacgaattgtgaaagctaaaacacaaaatataataaagtttgatttttgaagttcacaaatcctagtgacaaaaaaatagacagtagataatatgtgggaggataaatgacacaatcactaacaagtcggataggagtgctatgactttagagaatatggagactagagtagggagcccctaaatttagggatcttagataggagtttcttgaaacagtgttttagtaactttacatagtgggatagcgagacaattcgtgtaaccattctatccactaaaccaaacatgttataatcgtaagcacatctgacactatgcagagagtatcatctattgtcaggttgagtttgcagaatgacttctgagataatatatttacacatcgttttaagaatcatctctatacatgtatcgtcctgatatttctgcacgtacgtagtgctactttgctagcctattccattaattgaccgggattgccaagtgtccccggtatccatatatgttcatctcgtttttgtgtcataaccgtcataacgtttccgctcctgatcgatcggcttcacgcacgcccagcactatataaccagctcccaagcgagccgggagtagtagccaacgagcttatagaacacaagtacaagaagctatcagaaatcagaaacgctagctagcagtaggaacaaacaatgaggtcgtccccgatcatcttcctgctcctggccgccgccgccgccatcgccgctccgtggcaggttgcgcacgccgcgggcaagtgcggcaagacgccggcggagaaggtggcgctgaagctggcgccgtgcgcgaaggcggcgcaggaccccggggcccggccgccggccgcgtgctgcgcggccgtgcgcgacatcggcacgcaccagagccacgcgtgcctgtgcgccgtgctgctgtccagcaccgtgaggcgctccggcgtcaagccggaggtggccatcaccatccccaagcgctgcaaactcgccaaccgccccgtcggctacaagtgcggcggtacgtacgtattgcgtgcgaagagctttggttagcttcatattataccgtttcatattacaagtcagactttttaaaagtttgattaaatttatagaaagattacaattatatcattaaattagttttattaaatctaatattgaatatgttttgataatttattcattttatattaaaaatattactatattttttataaactcgatcgaagctaaataaatttgatttttaaaaaaatcaaagtgataacagatgtagtatataatatctctgtcgtagaatataaacatttttgcgtatttttcgaaacatatttggacatctatatatccggatacagttcaagaaacacatagaaatgattatattttaaaaccaagtatatgacaagtgtgatggttctctgccttttgtagcttacacgctgcccagcctgcagggctgatgacgacgtacgacggccttgtttaggctctggcgccactaaaagctacctacagatcgcttacagcatactactcctataatactgttgcttaagtgtgctagctataccctgcactgctgatgaataagtatgatcgagctagcaaagcaactctacatggttgggacgtcaacactggttaatctcgtgcgctgcaaatggtctgctagtgtaatcctgtccgcatatgctgcttgaggttgtaatgagaatggacaaagtttactatccgcccgactgatacgtataccgaacatttacgtagcaatgagcgtatgcagatacgccacacaaaactatagactggcatggcatggcatgttgtctgtgttgttgtcacactgttgcgtgtgtcagatgcaggaaaatacatagtgaaaacctaaaaattactaattgaaaactaaaagtccaagatttattacgtcaccatagagtgaaattttctctcaataaaagttttactcatgagtaaatctacgagtgaaattcttactcgtgatgatgtgtacgaatctcaaacattcatttttcaattcaacggtagttctctagtttctgccgtatattttcccatcagacgccggtgctccctgctccgtggcgccgcaacgggctacttgtcacgtgctcccgcctcacgtttgccacctcatgggctgggcttcctcccgcaaccaagcccagaaactcaccaacgccgtggcaaacgctcaatctcagccgtccatcacgagcatatcgcccgtgaataccaccaccaccagcaaaccaggcggctcgatctccctatcccctgattcccctccagcctctgcgtccccattcacctctcctcctcctcttcttctacctcgcgctcgctcgcttccctcgtaaaccatccgcgcgcgtggtccttccatggcggccggggctctcctcctcgccaaccccgccgcgcccacggcgaggcaccagcaccggttgctgcagcagcggaggcagccgcggctcctcgcctcctctcggcctccccggtggcggctctccgccgtgcaggagaccaaggagggggaggcccagacggccgaggagatcaccgagaagtacggcctcgagttcggcctctggaaagtaagcacgcggcgcaggcagctatatttgtcgagttggagagcaaatcgatcgtgagcgcaatcgaatttgccgcaggtgttcagctccaaggaaggggaggaggaggaggggaagacgaggaagtcgaggacggagcaggcgaaggagctcctggccaagtacggcggcgcgtacctggcgacctcgatcacgctctcgctcatctccttcacgctctgctacctcctcgtcagcgccggcgtcgacgtgcaggacctcctcggcaaggtgagctgtcttcctgctctgctcgcacgggctgcggcggctcaccggccggcggcggtggctcacgtggctcccctgctttttgccgcaggttgggatcgcgacgggggagacgggagggaaggtggggacgttcgcgctggcctacgcggcgcacaaggcggcgtcgccgatcaggttcccgccgacggtggcgctgacgccggtggtggccagctggattgggaggatcaagaaggggggcgactgatccatcaagtatactttgatctttgaatgcgtgaattcgttttgatcttggctcgttcgtactgaatcatgacaagtatatatactagtggtatgtgaatcatgtatgtaagcttagatgttcaagtagagggctacccagtaaatctgctgctacttttgtacaaacacatgctaaaacagtataatgatctagtgtatcccgaattaaactactactagcagaaatgggtgttgtgcagattcaaacactcattaagttattaatcataggtacacagccagaacattcagaagcctttttttaaaacattttctgcatgaaacttgcatagaacaatggttgctcatatgctgtacaccctagtcgaactatttacagactgaccctaccaagtagcttaagctgggagaaagaacctgagtgagctataaaaataacacaacgaagcaacgcctctatgtacaatcatatcgatcaccattggaacaggagggtaatcaaatcataagtggagtgataagcaaatatgttttcagatccataccgccaatccagaaaaaaatggctatctgactatctcagtatgtacatcttcacgctgcgcctgcacttcctgttctctgggaaaggatgcagactcccatggaaaccaccggaggaattaagtcataccgaataacctcaatcgacaccagtagatctggtctagcagtaaaccttactggttatccatggttgaagcccacgcctgtaggttcactggctgcagcagacggctggttgagtgcacatggggtgtcacttatttcttcagctaagaagtcgttggtgtcaatctgatcccactgcatttctgctggttatcatgttaaagtacttcaaagttcaatgcacagtgcaacttgtaagctcttatagtatatgagaaaaaaaaaacccaatgactatatttcatcaaggatacatgctgttgtccacatatgagtaatgctgatatcatcatcggtgagaagccagtaatcagcatcagtctgcaaaggtgtagaaggatatcatgggttagagtctaccacataagtaatttgtctattattgagtgctatagcagtgtaagataactgaactataagaatgagcttgtaattttttgttattggttccagaaatttagctgtttattattttaaacaagaattatgtcaagcacatgatcagcaatttaagatatttttgcacttctgctatactaaatcgtccatatgtgaagttctgtaacattgagctttcaactaaagctgctgactaaaaatcaagatactaggggagttcaaaattatgcagctagtgcagcatcaaaattttcaaatgtgtgaattgggatgctgtttttagctcaatgacatgatcatgagttctgccaccctgcacaggaatttatttttataaaacgcaaaatccatataattctaatttaaattgcataaaaatgttttagaacataacttacatcaacatctgaaggagtaatcttcttcatccttccaaaagcacgtgaagcattaagctccggagtttcctggatatcctgctgaacattcaacggcatggtctgcttgctgctatgtccagcttctgttgctatggagggaggctctacaacacttgcatgccttggaggtgttgcagtttcacctagctcctccattttcttatattgactgataatatagtaagggtgttcatcagataatttcttttgaggcaaaagcttcaagagaagaatgaagtgttacctaaccaagtaaatatctattgggcccattgtactccttaataatattctatatctccgttggagataatcaccagcctgcttatggaaagaaaaaaaatgaaataattaatactccctccatttcatattataagtcactttgagtttatcctaacttacgcaaacttgaaaatgtttgacttaggacaaacccaaagtgacttacaatatgaaatggagggagtagcagttgatcatcaagtattgtttatatggagaagtcatttagtgtttattacctcgtcaggatctggaacttcaactgtagtaccacgaggtccttttattgcgattaatgcttcattctgcagaatgagaaaagccaaataagttacatcaaaattttaattcagcacagcccccataattttatgttaaacaaaattagatcaataacaatattgccttccttaataacatagacaaacctgaaagcagggcagtcccttgatgtcatcttcagtaacaaatagccacctaaaaacaggaacaaaaaatatagctcagtacatgattgcacagtataagcatattacaatttgcaacaggtaaattgtcacgagtttaactttccaccaggctttgccaatacttccattttgcaccggttctagagaagatatgttgcagaaaacaccagctttgacgctgcagtcttgacgaatggtggaaatttgtgcatgataagtctatgatgtcagatggttgactggtggttgatctagatcaagtagaagcaagcagggaggatgatggttgtaaggtgtaatgggatatggtgaaaggattcacaaaacccagtgcaaagtgaaacttgggtcaattcactcggtgcaaagtgaaaattattaaaaaaaaatggcatgctagcatgcccaacaaacaggaacatcactacctatggttgctttcgtcttcagttaactcctccatcttttcccgtatttcactgcaacaaataatcaggaacataagaaattactgtcgataattttcagattttggaacctccaaaagctaccaaccttatacttctatctaaagcttgctcctggatgtaaaggttttcaacttcggtctgcaagaacactgaaggcagcttagactcagaacttcttttacaaacattcagataaatttgccatgagtatatagattttaacatgattgcgtaaatgagaaaagtagaccggcaggtaccttgagacatgaaatatcactatcaaggttagttcctgagtcatccgaacccctgtgatgccatgaggttagcatctcacaccataaatacaagcatacaagggaaacagaagataaagattacctccaacggattctgttcttaagcttcttttctatcaaacctgttccttccagtacatttgttatgtcatatatgcgccgtttccgaacctgtttttgttggaaaccatatataaacctgtagcaaaactaacgaaaagaaatgactgttaaaatgagagagagggggggggggtttacccatacatctaatatctttgcagcatcattcaaatctagaatgccatcttgagtctgcttgagcaaattaatgaattttctggtcaatagtcctgaacaaacatcacatgaatagctgtcagttaaaaagagagtaaactgtatcaaatgagatgatgtgactacatttataaagcaccaaaaattcataatggtacatttaacatttagatttccacaattgaaagttctaggtgagggactgctatgatcacctaatgaattgtcatagcgagaactggcaggagtggatggatttccaggtgaacctgcagatacaaatgtgtgtgcattgcattagtcacaggaaacaagtataaagaaaacagaacaaagctgtgataaacaaatactgttaacttaattaatgtcactgatgaggaagtttctacttgccagcattggatataggcgtctgaggtccagctttattgaatttagccattgatttggttgtcctagaagtttttccagaaactggggtcataagtgggctgccaactccttcagtaaacccagggctagtcatcatacgttcacttgactcagcagcctcactttctccacatggagtttttcttttcagctatgcacataaagggggatcatgcattcgtaaaatgggcaatagtattatgtagtggtcaactcaagcgaattgaaaacttaacaagttaacacatgaatcataataagctagataaaaataaatagcaacacctacattacaatctcatgatccaagaaaacacttgcaagggtacaagcaatggcaggcataggtgtataactgctttggtgaaatgattggtggtcattgaatttggaagataactatcagcaatatccatttcataatcctgtgaaatgatatgtgtttctgcaccagcacacctgtttgccgctacaaccgccttgtgcatttccacatggaggagagtatttccccaatgtgatccatgaggacccccaataactaacatactctcaatcacgagtaaataaaactgcttcctagcaaatgcactgaagatgactagatgaacacaacttctagcagaatacgcatttcagacgtcattcagatacattgtcctccaatttagaatcatgacagaagcatctttccgaattgctgacattatcttccaagctgctagcgactaaggtaaaacagcagtggacacatctacatgtcctagaaagtaccaaatcctattatagtaccatcatactatccaagccgacggaatgcaattttcaagtttcaagtgggtggcttggataagtgaagagctattacccagtaacccaaaacaaaaatataccagaagacagacatttcacaaagccttccactttggcgtcaataccacatgactgaatagatagattcatagacagtagtaattctaatcttcccccaaagtatttggcgactgtaacaagccgcccacgaattcacccaaatccacatgttaatctacaccaacacccccaaataaaataactggaaatgccgtttaattgaaccgccatgtcaccttgtaccgccaaatagctgccgcacaaaacctcagaaacccgcacagaaaccatccccgagaaggaaaaaaaacaaaaactagccaatcaattggtgcacacagtaaaaaaacctcttcggtaataagctcaaaaacggcaactcacgggtgtcctcctgatgacaatcccctcctcgatctcgccgccccgggacgccgccgcgaagcggtggtaatcgccgggggccgccgcgaagggcgcccgcgccagcggcggcggcagcggcacgaaccgctgccgcaccgaccgcacgatgtgctgcgccgccggcggacggcctcctcccgacgacatgcctccgatccgcgagaagcgcccaatcgggcgggcgcgccgcgatcaccacccccggacgcgtccgacggagctagggtcccggcaaggcgggcggcgacgaggcggggaggtggggggagtggggcggcggggttaaggcgaaaagcgcgaggttgtgcgagcgagaatgcgaggaggaaacgagggtggggggaagggagggaaatttttagccgcgttcgcgagtcgagtcgcggacgtgtaggggggaagatgtggatggatgtggatgtggactggaagaccggaactggaagggaaggcagcggggaggggcgcgggtttgagacacggcttcttcatggaggggctgcgtgcaaaatatcgcgggcgtggtagttggtgttatcctacgcccgcggctttgttgttggcggtctaggctgcgttaggaggaaatttcaccatcccccatgtaaaataaaacgattccgtataaacatacacacgcacatctaagtgctgttttgggagcttaaacatgtactccatctgtttcactaagtcattctagtattcccataaaaaaattcattaacatcaatataaatatgaaaaatactaaaatgacttgcattatgaaacggaggaaatatttggttctagaattagatgtatttggttctaaaactagatgggatgggatgatttttcacacgtatgtttggttcataggataggatcattctttgtttggttgaaaagatgagggagtgatgggatggacgctatttgtggctaccgtcaacccacgtccgatcccaataggcgcggcctagcaactcggcgagcgagcaagcggagtagggacggcgcggccgacgactcgacaagcgaacgagcgagcaggcagaaggaggagcagcggcgaccaacaggcggacagacgagcgagaaggcggcggaggcgaggcggcagccgcttctcgcggagcagaggtggtggcggatcgcggaggacgccagccgctcgtggaggagaggcggtgggtcgcagaggggtggtcgccgcacgtggaggagaccgatgaggcacagctgcggccgctgctcgcgaaggagatggagaagccgaggctgcggtcgccgctcacggaggagaggcagctgctgctcacagaggagaggcgacggaggcgaggttgcggctgtcgctcgcagaggagaggcggtagccgctcgcgtaggagacggaggagcggcaacgggtcgtggaggtggcggcgtctggtcatggcggagtgccggcggtcgcggaggtggcagcaggtgtgaacaacgatggcggatgcagaggcaagttgacgccgtgtgctacatccaagtgggatgagttcgtccggccgattttgccggatggcttggtcccaaatttgagaggaatattcatctatatggatcaacccaacccactcgaacctcaaccaaacactcctaaaaagtgggttcatcacatcccgtccttgcaaccaaacaccatcgattataagaagcggctggtatgtagtcagcttttgagaatctgaaaaagtcaggcttcccagcttctggcctctagtttattttggattctacaactacatcttctcagaatttgtaccaaaagttgtattgtttagggggcttctgattttgggagaaactgcaacagctagaagcttccccaaataggtccttagtatctttggaaaaattggccaggtatattttgagattagtgaagtcattagaaaactagaccgacatatcttgaaattgatgaagtcatcacaagcatctcgctatcgacggatacgtatatacctatcatataagcactcgtataaaatctataatttgaacccgtgtgaattatttcaaccacaagaaacctaactaattgagctacgttcacttcgccacaaaaataattattttgtgtatatattagtgtcacagcaaattattgtacaatttcaataattataaaaaaggtgactgcaaatatcaaatttatgtgcaattctgcataatagtgcaaacaaaagatgatctctataggttcatcattttatcatgcatgatgccgatcacgcatccacagttccacactacacaccactgttcactaagctgtaagtgggttccaacgtctcgtagatggcaccttgaattcctaaattagattcatccaggattgatttctgtttagacttgtagtattaggccatttccaacccaatgactaggatgatgtccatagcattaaataagctgtcacataggatgaaaaatgatgtggtaagtaaataaatgaggaaagagaaggaaactatgtcttgcatgagacatggtttttacacaaacatccaagacattatgtgagataagtagcattaaatttaagtatgaaatagtggtgtttgcattggaagagtagtgtctagtactaatttcttaatgatgtggagtttatgaaaactacgtctagtattttgggttgagaatagccttaatatatatcatataccgttgtagatttgtttttttacgtgacaatgagtaccggacagacatgcgacaattagttgatacaatcgatctggtcaaacaacagaatcgagcatcccgtagagtccccaacagaggttggggggggggggggggtttaaacaccgcctccggtttataggacaccagtgcgccaccgcccgtaggtgacgtgcataggacgctccgaccgctgcctccaattaaacttgtttcaccgactcatcgctgcccccgctaggttcagcattcagagaacacccatcttcgtcttcgtcgagggcacctaggagtctaggaccaggcgaagcaaagatatcgatggcgccgccaccggcgttagagagagcaatccggattccggccgacggcgagcgtcaagtcctgcccgaaccaattcaccgactccatcggccgtacatgcaaggaggacttgaatgggccgcatttacgccgcagcacagctccggctgacatcaatcaaatgaggaataagttcactatcgtccctcaactttacattgagtgtgtatgatgtctctaatctccaataccagaaatgtctaacccctcatctgttcaaaatcatactaagtaagtctctcgacagtatggatgtctggttttgttgacgcggcatcctagtcagaaaaaaagtttaaaaataagtgggggccacatgtcagccctatcatccttattctcttttttttctagcctgggagagaggggaaggcagcccgacgccggtgggggaagaggcggccggcgtgggaatgggagggggcggcgggagcggccgacgggagaggggggagaggcggccggcctcgtcagtgggagcagccaccgtcccaccggccatggccatcaccggcggcgggagggttgctgctcggcttgcggtgctcgttagaggagtcggcaagatatgcggtagtattgagtcaaggcgacaccgcaatgacaagcgcccgccgcgatagggagatgctaccgttggtcgcgcacgccgtctcggtcaatcagtccttgtaggtggggcgccgtggcggcttttggtcgcctatttcactttcttttgcctctcccccctctccccccagtcatgttggccacctcttctcccgccggcgttgggctacctccccctatctcctaggttggggaaaaaaagagaagaaggatgatggggctgacatgtaggcctaacgtatttcttttaatttttgttgctaaataggatgccacgtcaactaaatcaggcattcgtactgtcgagggatttactttgcatggtattgaacagttgaggggttaacatatctagtattggggattggggatgtagcctcgatgtaaagttgagggatgacaagtgaacttattcctatcatttatcctcacgtcctataaaatgcaacctaggttgagcttctgttggggccaagaagtagtaggatccaaacctctcgaatccatggatcgtcaaagcatcagaatccccaacaaaaaaaagccgagctggaccgaaccacccaatccacgtggcactggctgtggccactgagagggcggcacgtcacccgtttaaacatcttcctccatttcgcaaacgttaccagatcctctgacgtagaatggttctacgtcagaggaaagtctgagactagattcccgttcgtcttgcatcctaaggcagcatctgttccagccttcgttgtttgatctggaggtgatgtctaacccgctccattcggcccattagtataccaaggagaaaaacaacaccgcaatagctaatcgactctgtcgtcggcgatgcgagaatgaacaaaaagagcagaggtcagaaaaaagcatgaggaactgcagtggaggaggggacggaatcaataacgttcagatggatatccaacctacgctacggttccacccgctcccgccatcccgcgcctggggagatgacgagagcggcgtgcggtcaggtcgatggccatggccgacgagcgacagcgtttctcttccaccttcactcgagtagctagttcccaactccctccaccctgatttccacacgcacgcttcctaaactgttaaacggtgtgtttttttcacaaggtttatatacaaaagctacttaaattagtaaatattaaattaatcataagaaaatgtttcactctatttttcgtgcggagggaacataatgcctcgctctattttccgtgcggagaaaatatgttccgtactcaagagaacaaacgcagtcttctgcaaatgggctgaaaggagcagtctggacctcgtctctaggccgaacgacgagggctgaaacagattgcggcaccaaatcagcgcccgcccgcgcccaccccaccg

SEQ ID NO: 9168 - DNA, 29670 bp, Oryza sativa
attaacatttatatgtgtgtggacaatgctagaaaatcttacattattatattatggaacggagggagtaatatgtaatatttgaaatgaagtagctaccgatgatggtatccagtccagatttgacatggaccatccttgatgttgatcaactaataattataataaggaaaaagtccaaatactctcctaaatttagatagaaatccatctagcaccttaaactttaaaaccggacatctaatcccctgaactttgccataccatctatattaccccctaattaaggtggtttcagatgatggttttgcatattttgaaagcttaaatgaacaattccgaataactaatataacatatttgcatatcatcagttataaatcatcaatttattcctatacaatgatatcatactattactatgttggtacttatttgtaagtgagagctaataaggagaaaaaagaaagatttaagtcaaaattttaatatatacatatatgttcaaagtgtatgacatgtgatcaaactcatccaacttatatacaaattagataaaaaaaaaaccaatatgtaaaaccatcttagagggttgtataaatggtattgtaccaatttagggagttcaatgtgagaatgtccggtttcaaagttcaggatgctagacggacttccatccaaagtttagggggttatatggactttttccttataatattttgaatggattgtaatactgaaggcctggaagacaagttccctcttttcctcgtcgtgtctcatatatatgaactttgagaagaaattaaacagcactgatgcttatgtatgtacgtactgcctactacgtacctgtgtattcatcagttgtacgtgtctagctcgtgtgggacttagtacaagcagttcttggatccttcaaattaaagcctacttgcagctcagctactacttgctacagttgctatggtgcatgcacggcaaattaagtaattacttaacctacatatacacaaaaagatgtgtttagtaattacttaacctacatatgtagctcaagtactagttggggatccaaggatacagtcatacagagagagctttgagcctttgatctcttttacaatctaggcgcatcatgttctactatcggaggtatatatgactagctacgtacatggcagaaaaaggtctggatcaacccacatatatcatggcatgcatttgctctcttttaactctctctttttttcacccttcttttggaacgtctttcttcggtagaaacatgaaaaaaaaagggggaaacaaatcattttatcaagttgtttttgcatggaactaagaatgtggactggtcaaaaaagatggaggcagtgatatagctttgtttcacgttgtaagaacagaagagcatgatagcatgctacgtctgagctttatttgtatgacccagaagaaatgttatttgacaatcccgaggcaagcctagctagataccgggaagatcagcagggtcttgcataattctagacttgaaggatgactttgcccaactacgaatgcattatgcatatggctgttttgtttccatacttcttcacaacttgggtgaaaattctcaccaactttattttgaagcaattacaaatcgggcacctgaattatttttgactcgattgccctctcctcatgtactacttcacaacacatatgcaattctctcgagtgagtatgtaaaatttgtgctcccgcctctctagttgtgctctctctacctttctcttagatgggcctgtagtgtagtactacacagcacacacacacacacacgattttttctctctcataatttgcatatgtaagtctcttacatgcacgtataaacaactttttgacaagtttcaaattatttttaaacaacttttctcctaaattacttatctaatatatgatccgattacaccatcatatccattgtaattaaatctttaaaataatataatatattattatttttctaattgagatatttttatattatatatgaaacatttactggtaactgctgaaacattcaaagaatataacatgcaatatttgaaatgaactagttacattttttttgtttcatttgtggttgacggtgttgtagttagtatattttgaatgttgcatctatgacatgtatattatatagtgaattaaaacaatttttaaaactggccaaaaaacatttgattttttcatcaaaatataatcgtgtgagatcttgttataaatatttaattgtaagaaatacaacaatgtaatcggatggtaaatcaaaaaaaaatgttttagaagaaaattcgtttaaagattatttttacaagatgaactctaatgaatctagctttagagttgttttttttcatcatagcttatttttcaatatttgctcttaaactataaataacatggatataaaaaaaacactcaaactatttttttcttatatgtcgttttacggcttattatctattttttataagatcaggcctcaagttgttttgcgggtactagcatcgtttgagtacatggttgctagaagactgggatcttttcttaggtagagaactaccgtatctatgatactatagtgatatactactttctctgttctaaaatataattatttatagctgcacacttggacaaatatttatcgcatagcctaaactaaatgtattctttttagacatatgtgatatatttcaacttctccaggtgtatatgtaaaaattgttttattttggaaaagaactatatatgtgggtgttggagtatttcatgtgttctcacttggttaaaaagaactttgatatataaaatgataagatagagttggagaatgcttctaatcaaccgtccgggcggaaggaaaaaatcgaacgcttcttaggctaagagaacagtagggatatgggtgtaggtgcatgcaatcagatttaggaaagatgtccatattgattgaaaattcaaatgttttttctctctgactatttatccaaactacgaataaattttatcatttgattcgctacaactaaatcttcgtaacacgatctcacatcactctgtgctgatgactttttttaacgtctttttttgtgttgcactcagtgttattgtgatgtttcaacaaatattggttcatatttcacatagttatttgcaatgttgtacgtggtgtttttctatgttctagcaagatctcatatgattatattttagataaaaaaaagtttttatatacacgcgcgcgcgcacacacactgtgtgtgtgcagtgtgtgtgcgcgtgcgtgcgtgtatttaagcaggtgcaattggatgtttcacgtgtaagaaaaaaacatttcaaatgaaatttcactttgtaactaattttaagttttttcttgcaacattttactcatagtatcaatgttttttgaaagaggctcatagcattatttagatgtttcaatagatattttctggtgtttcactaattctttataactgttgcacacaatatacttgttgaaacattcaaatacaacatgtaaaacattcgcaaataaagtaatgaaatatcataacatatttattgatttcgcgtgtaacattaaaacaacatctattttattaaaaacataaattacgcaacatagtcaaattctaactgaaatatttacttcttacacgtgaaacattaaattttaatgattgaaacatatatcatttttcaattatgatataatcgtgcgagattttgttgtaaaaatttaattatagcgaatacaacgatataatcagaatgacaaatggataaatggtttggaaaataaatcatctcaaaggttactagtatcgtattaatcaatgcaagcacatcatatagtatcatcacgtagcaattatgtgattagcttgttgatgtagtacactggtagcgtccaatattttgcattatgtgattagcttgctgatgtagtacattggtagcatcccatattttacattgcatgggatgtctgggcggtagtctcctctaaagttaggtggtatattggtttcacgccttctcaaattttggtactccctccgtttcaaaatatttgacactgttgacttttcagtacgtgtttgaccattcgtcttatttaaattttaagtaattatttattcttttcatatcatttgattcattgttaaatatactttcatgtacacatatagttttacatatttcacaaacttttttgaataagacgaacggtcaaacatgtgctaaaaagtcaacggtgtcaaacattttgaaatggagggagtataattttacgatgagtcaaaagttttatagcaacaaaactaaatactctctccttcctaaattgagcatcatatatgtttatgcaccaagactaagaataatttcaatcacatcaatcatgacaccatgcacatattctcccacaattaatacatcgattaaaacgccatgccaattactccctctgtcccaaaaaactaacttctagagtttgaattttgtcccataaaaaaacaacttctaccatactacctaccctcagcacgtaaaatgagaagttttatcccttcaataccctttaactacatatcactcttactacttttttcaataatgaagggcattttagttattctccatatccactaatttcacctcgggatgctaggaatgtatttttttttgggacggagggagtataccttagcatgcgtacattctcccatactgtattaattatattctgatgaaatctatgtccacgcggttatatgatgataaatttgagaaattttaaatttcattatatgatgatcaatttgggaagagggagtaataagattggatcgggaccagtgtgtttggtttgtcagtggatccaccaaatttaataaagtggtgggctgtattggctctaccgtctaccacgaggccactggtaccacatccatggaccatcatgcatgggccatgaaaatctatggcccattttcccccgcgcttctccgttcttcggcccacataaacacactggcggcccgcgcgcacggcgcaccgcgagccctcgcaaagcaaagcatggcctcgctcgctcgctcgcccgcgcctccagcgattgtcgtcgagacgtctcgccgtctcgcgatgaagcgaaaggctttttgtccgctgcgcggctgcgcgcgggcgtcggtttcagccgcggtgtcgccgcgcgcgccgcggccggccggtgtgtcggtgcgcggccggatttttccggctcataaaaccccggggttggctatcagctacgtcgtcgtcgccgaggcgatgattgatgtcgggtgtcacgattgatcagcctcagctatagttctcccatcgactctgcagtgtcatcactcgtcagctctcctctcctcctgcccgtttgatgtaagtgtaagtacgtactcggggacgaccgtgacgcgctgccgaatgccactcccaactcccgctagctaggtacgttggtgggtcactctccatccgccctagcgcacttcatttcatttcatttcctctgccttctcttcgctttcgttggatcatctcgtctgtactatactgtacggcgtgagaaaattgcccacgtacgtacctgtatctcatgaagactcttgctctcgtaatttatggtactcgcacaaagtttgaatgaacggcatgtgtctccgttgaaacgcgaacaggtacgctagtgtcgttgtggggatggaaggcaggcagggcaaatactctgtttttttatacattgttgattcttcaaaaggcatgcaaaaacgatcgatcgactgtattgtaaagctttgatgcataaatgttgtttcgacaatgacaaatgatactaagcggatgtatacatataaaagtggccttttattctgcacagattcagaattgggggggggggggggggagggggggaagacgcgctgactcgataagcttacactgttacaattgctaatccgatactaattacttcggcgaggtgcgccgttgccgttgcgtctgtagctctcatggcgccgccgtgcgtgcgttctcccgcgacaagctagcgtacacgctcactgggggttgcacggtgatttcgcgtcacacgtcgacggtgcagtccgccgcctgcgcgaacttgagcgagacggtggcgttgccgccggcgccgccgcccgccgtggcgctcatggcgaaggcgccgccgacgttgccgccgctggcggcgagcagggccgggcacgtgacgaagaggtggtagccgccggagacccagctgccgaccttccacttgacgcggccgtccaccttgacgtgcagcagcacgtagcccgccgcgatgtcctgcctcatggcgtccgccacgtactgccccacgggcaccgactcgccggacatcaccggcgaccacaccgacacgtccttgtgcccctggtagatcgccggcagctccaccggcaccgtgatcggctcctccctgtacgtcgtgaacacgtgcagcgtcttgtagtacacccccaccctgtcgttcgggttcctcgacgcgatcgtcacctacacgcacacacagaagcaaacgatttttcagtccccccaagaacaagaacaaactgtacaatttttagccagaatttgattaacctggaggttgagggagatggcagggtcggagaggtcgatgttgcggagctggacgtcctggaggtagaaagaaggcttggaggggtgaatcgcgaggtagatgacgagcacgatgaagccgacgaggacggcgagcgtgaggatgcaggcggcgatggagccgcagcaccgccggaggatccagtcgcggtggtgcttgtccttgcccatctcgccggcggccgggccagaaacccaactagctaataatcaactgtgtacagtgcgttgtagtggagcgtgagcgtgagtgtgtgtgtgatactgaggactgtgtgcgtgtgagtagaaggaaagtgtgctgcgaggagtgggggtggccttttattaaaaggtcctaactcctaagcttgataggaggacaggtaagtgtggtggtgcgtgtttcaaaggggattttaatttcttttgggtgtagggaggtgacgaaagctacagctcaactcaccgagattcttctgcttcttctttcccctggacccccttgcactgttgcacaggaggctgccctgtgtattagtgtaccactagtaattaagtacataactccatcaacttagcttaaattgagattggtttgtcgagcacacatgagccaggcagactggtgtccctctggagctctgctgcttgaggatcactccatctccagatggtcaacaggagatgattaccattgcggttggtgttttgcatgtgcacgttgaggctgagttgacctgcggctatggtacccacaacccagtagtagtgcccaccattttacccctgtccactgaactaatattaatctccttcatgtacgcagtacattctcctacactagtattactgatcaggataggatatccagatgataaacgattcacaacatatataacaacaatcagcagcgttacgtgtacgtgtgcgggcgatcaatcatcaatggcactccatacacatggcgtggtcggtggcgcgcgcgcgcgtggctggcgccggagacgggccaaactgccaatctggctagggattacgcgcgcgatctcacccatgtcgatctgagcggcctcgaacggcggcctccgcgaccatcacccgagggccgaggagagcgtcgatcggtgcacggccactacatcacatcgcccgtgcgccgcgccgtccatcgatcgatcgcctcacgcacgcgagatagtacgccggttggtggagcgtagcacgcgagaggcaggccggccgttccggcgtcgcctcaggcgaacagggccaaagaaaaccccacccaaaataaagaaaatatggcagccatcatcagcagatcagctgcacaagcggacgcgcgcatgacgcgcccgccgcgtgcagaggcgtgtgcgtccatccggcatcgtgccggtgcccttcattccttatccccctcctccaccgactgcggtgccctgtgccctatggcagcatctgttccagaagcaccatgctacctgctacgaccctgtctcttaactaatcatcaacgatcatttgcctcctcccgtgaattatcagcgtccagaacgatcttgcacacgccactgcctcgcccaaaaaagaagcttttttttccaatacatacagtggcttgatctggtcatcaatcatcatacaccggatatgcatactactatataccatttctatccattattctaaaaaaaatgaatactactagaccggaaaaaaaactgtagacatttttctttctgttgctgttggataaatttgtggaatatttgcttttatgtagcagagtagcaggatcgctgtcttacagtatattcaaatcaggctttcggataaaaagcgccgacgagaaaagttgtggaagggcttgaagagcttttgtgtcatttgatccatttccatgtagtgttctgagtcaggatggctagcatagtgcgatcgaggtcgtctcttttgacaaaaaaggggggaatttagcatgtaatcaatctcaatagttaaacatgcgcattgcaaaagaagtgagggtaatttactttcatctcttccataaaggatggggaaagagactctaaaagggggctgcaaaaaggatggttattcacacaaacttagcctggaagtaaaatgaaaaatatgactgttctacgcagacacgtcgaacctactaaggtttggaactagtgatgcacacatgcacccaaatcactctagagtaatcaatcagacacttcagatatagcaattgccaggtcatataaaagaactttgtttctattagcaattttgcaacgggttcggcacacaataattcacacgcacacattgcagaacagatccacagatgcaggcaccatgcaaaaatacaagcatacaggatgtaagtagtacatacggccagggaccattgggacttcgaagtacagagcttagctagaagacggtcgacctaataccctgctgtgcttatatcagaaaaaatggaggcaagtgcaccatcctgcccgttcttggacatgtcacctaccatccgatcttctttgttccgtttggtgcatccggtagcagtagcaaattggaggcaagtgaagcacgcatgcgattcacggttggtgtgtaaagtagtagtagtactatatacctaaggagaattattgacgtgtccctgtttttctccgctattttgctcgggaaaaggtagggttgggtcaccatatgtgctataactaatcgttccaagtagtgctagtaactgaagtgagaaatgctgtattagtatataagtgaggagcgtctgtcgcggtggacttctgtgacgtgagatgatcggttactctattttggtcgaaacatgtcctagaaagtttcaaattctattataacttattaaagaaatagaaaaaatagccttcacgttcgctctcacggcctagaaattctcatattaatcagagaaaaaaaacagagtctatatagaaatataatctatgaatagttgaaattcagaattaaaaaataagagatattggaagaggagaccagagcccatgttgttatacaatttagaactaatggaaattcagaattaaataagaaaactaaaatttgtttagaattaatatagaaataaaatttggaataactaaaattcggaattaaaataatatagagtacagagttcatatagaaatacaatttagaaataactgaaattttgagttaaaaaataaataatattagcagaaaagtgtcagcgttatggataccacatacctaatagtagtcgactaaatctcggcaggacccaccacataccatgtcttatacggaaacaacatgtggatataggaggagtttcggataaggaaatacaaccagagttctacatggaaacgacaaggactactcggattgtatccataatggtttccctagttctacttggacaaggagacacctatgggtataaatacaaggccccctaggaggagaggggacacactcaacatagacggaacaacagaagccacaagacaacatacgccaagaaaaaatgctggatatcgacttcatggataagcacggctagtcccctacggtgtctccggatactgtcaggagagacgaaagcgctatctctgatctcgccgggcacggattcgaggaggaagactaccctgttgttgactacgagtagactttcataccgccaagtcgacaacagttagatagactaccccaaatattgtactggtgtgattatggtgaataagagcaataccggcttcggccaacaggatatagggttattacctaacaattcaggggcccgaacctgtataaaaatcctcgtctctatctcttttacctcagtctcgcgcatatactagtaccaacgatccccatactatgcaaataccggaatcgcgacatcaaacgtcgacaaaaagtataaggtccatatagaaacacaattaagaaaaataactgaaattcagaattaaaaataaataatattagaagaaaagtgtagagtccatatagaaatataattaataaataatagaaatttagaattaaaaaaaggaatattataagaagatatagagtccctataggaatttagaattaactaaaatcaggaataaaaataataaaaattaaaagtagagtttagattccatataaaaatataatttacaaataactaaaattcaaaattaaaaaaatatgggaagaatagcctagagtctatatacgaatacaatctagaaggaactaaaattcgaaataaaaaaataaaaaacattgaaagatgagtttagagtccacatagaaatacaattagaaataataaaaattcaaaattaaaaataaataatattagaagaagtgcctagagtctatatagaaataaattttacaaataacgaagatttgaaattaaaaaataatgaatattgaaaaacaagtctagagtccatataggaatacaatttagaaataactaaaatttgatattaaaaataattaatgactatcacattggtagtttggtaaatttagtacaaaatttgaaattatgttgtcattttaatatttttaataataaattgggaatatatatatatatatgtatatatatatatatgtatatatatatgctattatatgagaaaaatataatgatactaactgcgcaatctgcgcggatcattcgatggaaaaaatagtaaaagtgggggtcttttttttttagatttttagtgacagttatgaataaagggacagtttaagaaagcccatggttcctgtacaggagtcctacgcaacttaattgggccgtaaccttggcgttgaggtgctattgggccgtaactcagatacccgagcgaagcccatgtgttattgggccgactcacgctggactagcggccggtttggccggcccgcagcccgttcacagccgagcttctgggattgtaataagttcacttatgtcccttaatttgtcgccaagttttaaattcattactgtataacaatactaatatgatgtatccctcgacttccaaaatcagtgcaaagaaggttctaaagtagtttggatggtggtttcggctgcgtggcatctacgagtggtgttgacgtgacacttcaagttaaaagaaaccataggactcacatgtcagtaactgaccggttaaaaataaaaaattatagttggacccacgtcatcacccatatgtttctcatcttctctcccttcctcctctatctctcttatggttcgagcacggcgtcgtcgctaaggagcgtgggggatgggtcccctttcttcccctcgaatctccccgtcgcctcctcctccacggccgcatggatcccaccgccaagtcaccaaatatgtgaaaagtccttctcctctctcatctccacacctcttttgttgcctgtccaccatatcgcttgctggagttacatcgccgacgccatgaactggtacactggcacgacgacggctagggatgaggcgccaccgccggtagaggagagagacgagcgaagctcacggaggtgggggaggtggccattgccgtcatcaacgaagacgaggtcggatgcatggtgtgggaagaaggactctccccaactttggccgctccatttcattccttctcagcccgacaaggtcgttcaagcctagggcggcggtggcgtgccacacgcgctccattagcctaccacgctactcccacctgctcctctcccacctcccgagccacatttgctgccatttgctcctaagcctcctagcttgtccatgacgccttctccatcctcgccgacctcctcctcctcctcgtcctgcaggacacgctctaccacgccatcgtcgacgccttcctcctcctcattgtcgcccaccagggcttccacgaggccctcctcgacctcaactaggacatcgacacgtcatccctcttccaccccttctccagtgtcgtccgcgccctcccaccgctctccgtattcttcgccgagatgaacatcctgtcctaggactggttgttgcatgacgtcatggcatcgtgcggctaggtgaccgctcaagctcgtgatgccgccaccacccaaatcctctcctactggcggccgaccgccgcgcaactcctctcccgctagttaccgactggacgagaatcagaagcaattgaaagcaaagagggtgagtactgaactgaaggaagtggggcccaccgagatagatacgtcgttggcttatgtctctttaatcgtgtgttagaagatacaaccattagtatgtaagtttagtgtcacgcgtatagtggtgtataagcgtgccattgtattttgtaaaaacatttgtggatgtgtgagtatagtgttgcatatacgtgtacgcgcgtgtaatgggaaaaagaaaaaaaaggtcacttcctgtcaaatgtgtgaagaagaagggtactcgtactcgttaaatccagaaccatctgcagacgcaaactgcaaaagcacaagcggcgaaccgcgaagctaggccgtacgtccactgggcatccacgcaagcatattcccactcggatacgcgggccccacatcatttcaaagttcaaaccgccccgtgccaagtcaccacccccaccacaggtcaagattgacagggaccacatcccacgtggcagcatcccactcctctgacacctcggtcccacctgtcagtatcacacgcttcccaccttctctttccccccaagcctctcacaccgtcgtcgtcgtcgtcgtcctcgtcttcctcttccccaccaccatctcccgcctccactcgcctcctctacgcgtctctagaattcaaaccctagccaaccaggtcatgggcggagagaggccgccgccgatcagcggcggcggcgccttcgcgttcatctccaaggggtggcgcgaggtgcgggactcggcgagtgccgacctgaggcagatgcgggcgcgcgccgaccgggagctggagcacctcctcgcgtcggcgtcggcgctcgcgggcccgccgctgccgccggtcgcggcgggggcgcccatcgcggaggtggagttcgtgcggaagcggatccagcccaagatcatggagctgcggaggcagtactcgtcgacggtgcgcgacgcggggtgggcccccaaggccgccggggccagcctccgcgtcgacctctcggggattacggcgatccgcaacgccattgtggccgaggggggcggcggcggcggcggcggcgggaggtgggggctcgtgcggtggaagggccacgcggacgacgaggggaggaaggagtgggaggtggtgaggatgatacgcagcgggctgaaggagttcgagcgccggagcttgtcgagtgaggtgtttggtggatttcgtggccgcggcgagttcgtggagaaattcaagttgagcttggtaattcgaaagttccatcttaaatcatgatatgctcctacttggttaggacgataaacctttccacttgcttaggtacattttctgtaagttactgataaatgaatggagcaattgagtcttacacattagtagaactttggcatccatgaaaaggaatctaagggagttacatattgattgatacatgttccaatgcttcatcaaatagaaggattgtgtatttgcaaaaaataagtaacatggcattgctccatttttgttcatatattgtttaatattttgtctaactctatatgactaatccatcatttaaaaatattgaaatgcttccctgaaataaagtacttttaaggactgccaaaaagtagcaattccagttgctcataaagccatatcatttacatcaggtgacaactgacggcctgatgcattttttgcagaattatgcttttgagaacactaagtgtattatatgatcatcaatttttgtgtgttaagtggagcactgattcatgtttctcattttgttgcagaaatctctgaacaaagagtcacaagaatccaaggtaatgtcagaacaaactaagcataactgttggaaatcttctgctatttagggcaaatagttagtaacttcagatgaagaaatgcttctggatcactttcctaattaacttgaatttggtttacttgattttattttttcgctgcctagttcagtccagctagattctcagaacatttatgctctactattttgcaaaatgcaacatattagattaacctttaaactttcagttgtttcagaacatttttcgttatagccagttgtaggtcagaattagatgcttatcgctttgtaatggcatagtgaaatactgaaattgtaacaatgactacttgagttatatggcggttgaatttctttaagtccaagttttaagattcttagacactgcattattgagtataactaaatcatatcttttaataaagcatttttccgaaagcagttgattataatgataatgcaatcttcattgttatgtcatcttattaatttcacagagtgcgtgttttctaaactgaatatttgcatacaatccaggaggttctcccactggatcttactgaaattctggcatatcttgtgcggcaatctggaccatttctggaccaacttggtattagaagaggtacggcgtgttttatttgcctgcactttcccaactcttgtcactttggtgctgaccatcgttaaatctttctatattatgcagatttatgtgacaaaattgtggagacattgtacagtaaacacaatggccggctcatttatcattctctttcagctgatagatctttaattggaaatgagaacatgactgatgagcttgatctgagaatagcaagggtgctagaaagtactgggcatcacacagaggaaagtttttggaaggatcatgcaaagtacaagctctcggacaaccggcggcatgttgcaattgtcacaacagcaagtcttccatggatgactgggacagcaatcaatccattattccgtgctgcgtatctagcaagaagtacaaaacagaaggtgacactggtggttccttggctctgtaagtcagatcaagagctagtttaccccaataatatcaccttcagttcaccagaagaacaagaaaattacataaggaactggctacaggaaagacttggctttgaagcaaattttaagatatcattttatcctggcaaggtaaaaatccaattatcatctgattttgatgtattcaaccatacattattcttccccaatgatttaatttctttatttaaaatttcatgctatacagttttcgaaggagcgacgtagtattattcctgctggagatacttcacaattcatttcctcgagtgaagctgatatagcaattttggaagaaccagagcatctcaactggtatcatcatggaaagcgttggaccgacaagtttaaacatgtcattggtgtagttcacacaaattacctagagtatatcaagagagagaagaatggagctcttcaagctttccttgttaagcatatcaacaactgggtgactagagcatactgtcataaggtattgtgtttgcttgtctcgtgtaaaagccctgattgctagggtgaaacttataatgggtgcatgcaggttttacgtctttctgcagcaactcaagatctacctaggtctgttgtctgcaacgttcatggtgtaaatccaaagttcctcaaggttggtgaaaaaatagcagctgataaggagcatgggcagcagagctttacaaagggagcatatttccttgggaagatggtttgggctaaaggatatagagaacttatagatttgttatccaaacacaaaagtgacttggagggctttaatgtagatgtatatgggaatggtgaggactcacaagcagtgcagatggctgctaggaaattgaatttgagcctcaattttttcaaaggaagggaccatgcagattcttcgcttcatgggtgagtatcattttagcaagctgctaaaatgaaccctcattctctggcttatcatttactatttattgacaatggccttttttcttttcttaattttaggtataaggttttcattaatccaagtgtcagtgatgttctatgcacagcgacagctgaggctcttgcaatggggaaatttgttatctgtgcagatcatccatcaaacgaatttttcaagtcattccccaactgcttaacatacaaaacttccgaagaatttgttgcccgagtgaaagaggccatggctagtgaaccttcacctttgacccctgagcaaaggtacagtttgtcatgggaggcagcaactgaaagattcatggagtactcagagcttgacaaagttctgaataacaaaattggttattctggacaagatgggaagagaagtaaagtgagaaagatacctttacttcctagactttcagaagttgtggatgggggactggcctttgctcatcactgcttaactggcaatgagatcctcagattggcgacaggagcaattcccggtacacgtgactatgataaacagcaatgcatggatttgaatttattgcctccccaagttcaacaccctgtatatggctggtgatgtcaagacgcttttattaaactaatatatatatagttgaaggatgttctcattaggtatgtgcctattaagtgttatgcagttcacacactgactagatcctgtacttctgcagtgtccttttagggtctgtatggaattaattttgtttagactctttgcttgtaaatactacatccatttttgttacccaaataggttaggtgtattaatggcagtatgcgtgtatgatgtttccttttttctgacataaacgaatttaatgaaagttaagtcctggagtttaaattctttttgtgtgccttttgtttttgcctatcctatctgtgataaaaaaaattgaacaggcaatttcattttgtgctaggaagtcgcacccagcttacaaattgtcttaatatggtttctaatccttaaatgtctcagattatagataacaaaaatgtcattagtttctcaaagacatgtagacttggttccttttaatagttttaatgtcaatggtttctcatatttatatacttcatactggatgagcaccaaggacataaaagaaaagcttaattatgacactacgaaaaagaataatagatggcaacatctaaaagtagaactaacatgggattaagaataagccaccaactccggcaccattaaaataagtgcttggtctccaattggcaatgttttgtttttgtttttttgtaatccattaatccttcactgttcataaggaggtttattatagtaatttactttgcataaggggctgggatgctttgcttcactgcagtcggtttggtgatgattgttgattagtaggtattattccaattatgtgtagttcaaattgttgtatttctgctatattcatggtaacaaaatggtaacatgggaaggataaagaaccttgcttgttatattacctcttcttgatccctaaagtagcacacagttggaacatattagttatgacttgttatctccatttcaaaattctgtcctcaaaggtaagtccgtaccttttcccatgcaacttggttcccagtagtggttgacagtgcaaaagatcaactaactaatcgctccatctatcaccaatcactgttatccaataacttgtggttgatgatgatttgcatctatggagtcgggtcaactttatcacctataagcggatcatcttccaattcagctgtttatcttacttctacaagaatatctttactatattaaaaggagttggaggtgagaatgtgctctaccccattccacactccacaaggcttttgtggccacatatatgagtttattgatgtacttgcatatatataggctgtttattgatctcatgtagtattgtatatacaattttgtaatttaaagataattattttttacatgccatgtaaatctatgttacatttatttgcatttgtcacaatgcgtggacactatgcaatttgtcctacttaaaaacaggtgttggtggtgattatagcaggctttatgctcatcttctgtgttcatctatgtatagaggtgtatgccatctgtaggatgttttaaaataactgcaccgtatacgtatacatacgtagatagctggttggtatggttttatttagttttggatttgaatatgtgacgtgtatgaatctgaaaactgtatgagctcacgggcctgtgctgtaatatttggcaaaaatgattaaagaaaggacagtcttattttactagataaatatcaccattaaaatatgtttgttatatcaatatcacattttttctgcttcaatagtttctgaaaaaaaatctgttactttaccatcacaaattttgaaatgatctgaatggatattgtgaaaccataattgtcgtccagttattttctttggcgcagcaacacatagggagcggttcactcattccccaaaaataagaagaaaactgttcatttatatttagctgcttataagtagtctttgttgtacggaaggctgcaacgttttatttttacagttcagcatcataattacttctagcatcgaagaattagtcacttgctaatactcctacacaataaaattgcaggccgtactagtttgtcccatttggtgttgatgctctcgacgtagtcagtttgtcaactcatgatgttgatagccacttctttctgagatttttcagggactttgaagcaggcaagtcgtgccaggttatcgacagattctgcaattttctttacttgtgtaaccaagtctgaaagaagtgatgcagtaactgccacatgcatcacttgcagcagagctttatcctctgatagctcgctcctgagtgttttggcagctttgatggctgcagacatggaggttgtagatggtacggtcattgttcgaagtgctgccgagagctctctgagtgcctgagcagagtgtgagctcatctcactgcatgctgttcgtactttgaaggacagctcaggattggcttcaggatactgtcatcagggaaaggtacgagctattggtcaataaactgggttccagtgtctagatcatgaaaattattatgatttgtaggttgtaagtacctgagattttgtgagtgtgatgacataggaagccatagcctccatggaagaagcgcactggcgagaaagagctccaatcttctggtattggctccatgggtgtttgaaactgaattttccatgaccaggctcccatctggcaaagttgcactgcagttttgggaataatgtcacattgcatcattttcaccaccttgcttgaagatgtctgtaggacttcgcctctcggcacggggtatgtatatatataactgcatagtatgcttaccagagagtcttcagtggccttcgaattaagtatgctcttgtacgcttggagaaaggctttgccctccaaactctcactcgtagcgctttctccaaagcattcggtttccattcctgcattcatgtataaaagtttaggccccactctggaattaatctgcctgtagcatattacttctatagctctatgtgagtaacaagtttactattagtaatttaatacatgatatagttgtaattctgccttcagttgtattgtgcacaagcagggcatagttaattagaaacataagtgaaaccagaataacatgaaagggcacactattcttctgtgacatatcggccacaagctgccatttcagcttgcagcagtgcgtacgcaccttcaaggaagtcggccagcttgtcgaggttgccggcggcgagcttgtggaggtcctcgccggcccagacgggcatgacgaagatggtggtgcagaggcaggtggcgacgccgacgacgatggtggagaagcgctggtgcgcgagctggatgagctcctctacccggtagctcgacacggccaccaggctgaaggtcaggatgaagatggtcaccccgtagtcgtacctcgcctttatctccggtatgaaccgcgagaacgtcgccgccgacgctgccatcaacaaattaacatgaatgccactggtaagtacatgctactagctacctactgcttctctcctcgtctaaaaaagttagtgcatgacaacatatgaactattatagccatcgtttcgccggtatatttataaaagaaaagtaatttatgaataaaacttttatataagtatttttggtgatctaagagcaaatgctgaaaaataaactacaatgaaaaaactttaaaatcagtacaaatttaatgttgaaaatttaaattttagctgataagtataaacataaacgaaaagataagaccctaaacattgaatagtcaatgaagaacaacaaacacacatgcatgcatgcatacacacatacctagtaggaagacgaagacggcgaggagtatgggctctccctgtgcgccgcaccggttagccacctgatgcgccccgacggcgatgaacccagccaccagcgtcgcgaaggccctgttcaaccctttgctcagcgtgccacctgtcgcgtacgtacgtacgtacgtccaaaacacaaacacgtcactgagatatgtactaatagcgtactgcgtacgtagttacgtacgtagagcgtggtaggtaccaaggatatatagctagcgtatatatatcgtcgcctagctacgacgatacgtacgcccgcgtgtatacatatacgtatcgtcatctgcggcaacgacgactttctggggatggaattttgtccctcaacctcatttatccaaagctactattttttttttattttgacaaatagattgatatagtatatattacttcacaaacatataagattaaattcgatttctacaaattataaaagtaaattaaactctaatcagtatacatacatttgtaattctttttttacaatttgtataaatcaaatttaagcgtgtttataacttatgtatcatatactaaggatcaacttatcacattttctcaagaatgttttgtaactattcaagtgatgatgatcagtaagaaactcaatgagtaagaaactcaataaggccttgctcggtttagagaggattgaagggaattagagaggattgaggggaataattccacaccatcataggtgtagaataaatctccttcaactcctccctcaaagggattaaccgaataaggcctcaacgagaatactttcccccgtgagaccccgacgtacttggcatgcattagcgctagctagcttggtacacagagaaaattacataccgacggtgtactccatgacgacgacgacggtgagcacggcccagagcgtggagaccccgaaccccttgaaaagcggcgtcacgtagtagagcacggacaccagcgtcagcgccagcccgaccttgagcgagtgcgccaccctcctcgggtcgtccgccgcgatcccgcccaccttcctcgccagcccgcccacccacctcccggccacctccaccgccgctcgcacccgcgcccagcatccatccacccaccccccgccgacgacgacgaccacttggccgccgttctccgccgccgccgccgccgccggcgtcgtctccacggcagcagattgcatgatcgccttgaagtacgatgataagttatcgatcgagctagctatagctagtgatcgatgtagctaattagtatatatagctagcgccgcgtacgtacgtctttgagctgggggcttgatagatggagtagatagctacaagtgaagcacgggagacgatggctgggtgcaggggagaggggacgcttatatagacgtgctcgcgcgctccggtgcagagaacgcgcgggccagctgcatacatgcatgagcgcgcgcggcgcctttttgcagacaggatcaacaactttttcggagaatgacttgggatattgttgttgttgctgctgtttcattttattttactccatccgtttcagtttacatgacgttttgactttggtcaaagtcaatctattttaagtttgacgaactttatagaaaaaagtagtaatatctacaacatcaccatagttttattaaatctataattgaataaattttcataatatatttgtcttggttaaaaatattactacttttctctacaaaattatttaaatttagagtagtttaattttaaccaaagttaaaacgtcttataacctaaaacggagggagtatttattatcgagaactgagatatatattgtgctacgtttgttgtttctcgtttcgactcgtcttcgtttagttgctctcgttgtcgttgatatgccatcggtattgccagctcatgatcatgtcactggtccgaggaaatgtgaagtactcctactagactattttggccgggttaagtttaattagccttgtatcactgggtacaaatcaacaattgttggtttgttttatttgtggtatatataatctcataattaacatttgctatagtacagtagctctcaacacatcagttgtaattgtgcacctttatgacttgtacattcacttggaaacattgttgttggttgaggtagaatgcaacttgtcctttgccttacaaatatatgggtgcggctttatacttagctgactcatggcctgtaaataaattaagcaagctacatctttccactctctgacttttttttaatgaaccgaccaagtcgagccgtactgaagcatttttcacaaaaagaagcactttttttggcatttgtgataagtaaagcaactcttatgcatcatttgaaaacagaaaaaaaaagggggatcgatgacctttttgtatgtgctccatttcatgtccgtagtctctctactacgtaccatcactagtggctatcaagatgtggcctgacttatcaataaaaatttctgaaatttaggtggatctcaacccatagcttatcacattgaattccataaaagcttcgatctagtccaagcacgcacttctatttcctgacagcacgaaatttatgagctttttgttcaatgcatgtggacaaattgttaatcgttgtcatcctttagtcaaaactctttttctccaccgttcagagctgaccaccactaactacaaaacccactattactgtttacttgcttctgtaccacgtaatttccgtagcattcagagctctcatgaattctgtgagcagacacagtggcagtcgtactcccaggtgatccacagtatttgcagacgttgatcagtggttcagagttcagactttactgtctgtctgcctgtcgctagctacgtatgtacaggcacagctcatacagcaatacatatacttgactactgcaaatatgcaattgagtggttcttcattttcctgcaatattcttggtatatatacgttaacgttacgtactcagctagcagctagaatcaaattcattccaagtgaagtagtgaacccaaagtacaatccatctatccatccatcgcccaaaaggctcagctttatttcttttttttttttgaaaagaaggctcagctttatttcatcaagaacacgatatgatacgcatatatacatgaaatggctgagtacacacatgcacaaagctagctagctagcacagagtgatctgaatcttggtgccgatcgattcacaggcaggagagcaacgctacgccgcttatttcgcctttaaattcttctctccctgtccaatcctctctctgtaaatattcgcgccttatcctgctgcataatgcaatcgccaacctcaatatgtacagtatcaaagccacgaaatctagctctcgcgttgtactagaaatgagtcggataacaacagcatcgatatgattcagagaacaaagaagggaacatgtgaataactgtttcgtcagtaaaaccggaacggcacagcatagcataatccagagaatatgtgctcatatgctgcttccagaggttctccctctagtgctagctcttgcattgctagcctgtggcctctgtggatccctgaaatcccactagtagcctacatgtctaaaggaaaatcattaccacattatctctcgaccattcagtcgtaaaatttccgctaaagcgaaggacagataactctgaattaatgtaaagcatcgtttctgccttgcatgtgccgttgccaaaatgcatggagctagctagggtagtgaccctagatcatagtcatatagatgcaatatatatgtggtgacaatttgtaatgggattacagtcaaaaaaaaattgtaatgggattatggaaggtgctgcgaagctgaagaaaaatgggtttagtgggattgcctttgtcgtcaggaaaaaaaagaaccttttggacactggtagatcgatagtggtgttctcagacttaattaagctttagcatcatttgatcacgccgtcatggtatgtatgacttctctttgcactttattttgcactttaatttcgcactcgtcctgtcgaccaccgtacatctctgtcctgtgaagttggtcgtactacgtacttctaggaccatttttctttgtggcagaattaattgagaattctgcactatcaagtatcaactagctgaccttcttgctcatgcttgtctctttctacctgttgcttcattgatcttctagttgggagcgtctctgctttcttcagggagaagagcgttaattgtatcaattaaggatttgagctgaaaaaagaagggtttttctcgagtctgacggctgcatttggcgtttgttaggtcaggatgaggttagtacaaatataccatggcatcatgaagtgtactttggaaaaagaaaatgacgatctagggggatcaaaggacgaactagatgccatgatcattctcctcccctgatttttcttatccgggcgaaaaaaattaaagccgaaatcgccgtcgaattttgtgtctgtgtttcataccaagaatcgcgcagctttaattaatttgcctgttcttgcaaccgcactagctagcgtgtagcgatcgacgagaaccgtgagtggtacggaaaacacacaacttgaccggaaaaaaagaagaactcaaattaaaggtgtccgacaagaacacgtcgcaattggactccacttataattttctcatcgatcgccaccagacagacgccacaggccggagagctggattatattcatgacagggtattcgaattctatctctctctctctctctctctctctctctctcaaaattcagtcacatttcacctttcaatcctccagatcgatcgatcgagctttgttggatcgatcggtgcatgcgatatatacgagcataatatcgatcgatcggcccaatttccttgcagcaggatcgagttaaacagtagaaaggacacgcacaggctaatagaaggcttcgatcgataccacactgcaggaacaacaagttggtaaagagaaacagtttactgctgccatcggcagccacaggcgtcacgtccttggtgagttggtgtacgtctgaatcgagcttgttgcaagcatgcttgcagtgctagcttgcggcagatcttgggcaagtagctagcacaatcgatcgatcagtaagtgaccgaccgatcgagatcgacgtcgaccggaaacatagaggcgaggctacacagccacctcatccagggaatagaacagattttgcctcttttgctgcgatacttgtgagcagctgatgagctcgttgggaataaaggcgaccgcggttttcgaggcagcaaaaccggcctgcaggtttctggagatgcgagaatcgagatcaggttcgtgtcgtgtatgtatgtgctacgtacaaaggtgatcgatcagaagctagaaaaggagacgatatatatgatcaaaatagtcaagcacgatgatgagaaccatatctgcatgagtgcatgggcacggcatggacaaacggagtctaaacattggatggcgtaatatttagacttagtggaggtacaatatagcagactattagctaactacaaacatattataatgagataaaagatgagagagaagagcatcgggctacagatctgtagctagctgcagcacggactccaaagcgcagtgtgtgtatgacaggtgggaccatatattaatagtatagtaagcaactattatatgaattaactattagattggctatagatgaattggagctaatagtgggctatactattaaacttgctcttagggtgtgttcggaacccctggttcccaacactaagtgctcgcaccgaaaacggagcaacgattagcgggtgattaattaagcatttgctttttttcaaaaatggattaaattgattttttaagcaactttcgtatagaaactttttacaaaaacgcaccgtttacccgtttgaaaagcgtgcacgcggaaaacgagggagatgggttgggaagaggggctgccgaacacagccttagacaccccatggacggatttctctgggctgtgcttgtgtacatattttaggctattcccaacccaatgactaggatgatgtccatagcattaaataaactgtcacctagaatgaagaatgatgtggcaagtgaataaatgaggaaagagaaggaaaccatgtcttgtatgagacatggtttctacacaacattcaagatattatgtgagataaatagcattaaatttaagtatggaataatggtgtttgcattaaaagagtaatatctagtactagtttcttaataatggaaagtttatgaaaactatatctagtgtcttggattaggaatgaccttatatatgtttcctagctagatactcctcccgttcccatgttgctagtactagtataaagcagtacggacatgcatggtgtcatggtggtgtatcgtgcgtacatgtgcatcttggtcttggcgaggctcatctgccgctggaatggatgcatccatcgaccatcggcgccggcggcgtggtccagattgtcggccacacgtacgtacgtgtttatttcggagacggtacctcgtacaagttgaaggatcgtaaagtgcgctctgtgtaaaatgcatgcaccctttcttttttttttttagcacgaggtgtcatgtggtacacttacaccaacatgaaccgtgacatctggttgatcacttgatcgatacatggatatacagctagtgcctagtcacgcatgcatcgagtagtagtgcaatttttttttcctttttaacgagcgcagtgcagtcttcggcggtgagggttgagaaccctttcaaagataaagtatagagacctaactcttaaactgggtttgtcaaaaagttaacgatgttattatatactccctccgtattttaatatatgacaccgttgacttttttatcaatgtttaaccattcgttttattacaaatttttgtgcaaatatgaaaatatttatgtcatacttaaagtatatttgatgacgaatcaagtcacaataaaataaataataattacataaattttttgaataagacgaatggtcaaacgtttaattaaaaatcaacggtgtcatatgtagtattaaaataggctttggtagcgcaaacacgttaacaccatgcccctttttttcccctagtctttactcccttcgttctcatttactttttctttttttaccacaaattgtttgtagatacttgtcacaacacgaattctaatataaaaattttaattttatacccttgtaattaattaaaaaaattcacccccatccactcactcatgttgcttgtttgttctacagtttttttttcttcctcatttttaaaatatacgacgtttttttacttctcgcataatgctttactattcgtcttattaaaaattagtataaatacgtaaaagtattagtgaagattatatatcatctgatgataaaacaaatcataacgaaataaatgaaattcatgcaaactttttaaataaaaagaatggtcaaacggctcaaatattatgcgaaaagttaatagcgtcatacattttaaaatgaagggagcatatactagcttaaatataattaacacactttggggttgtttagaatgtagccaaaataaaccttatcatactaaaattttatcaagtttggtaatattaccaaaattttgacaggattcgttatgtatttagcaaagtttggcaacaaaataaatatagatacttttttaacttaaaaaaaatatggttgaaaataacattaatctgaacagccccttcatcaacaataggaaaaagtacgaattatacccccgaactatcgcggtcgtccgaattaccccccgaaccacaaaaccagacattcttcacccccaactatgaataccggacgaattacccccctcgactcaatccgcggtggttttggtctacgtggcgtacacgtggcagtccagtcagcattctatttataaaaaaattgtggtccccacctgtcatacacaactctctcttctctctcacacacactctctctcacttctctatctctcactcttcctctctatccctctctctcacggggtcagcggtggcgggggacacggagcggcggcggcgcgtggcacggaggccgcggcggtggtggctgccgggaggcggaggcggtagcagccgacgcgtggaggagcggcggcggacggcggcgtcgcggcgacggccgagcggaggaggagggcggc

SEQ ID NO: 9169 - DNA, 87552 bp, Oryza sativa
  unsure (1)..(87552): unsure at all n locations
attacttctctgtgtttacaaagtacaacaataacaacacttcttacgaaaatctcgactaaactcgaaaccctaacttttctctaaactcaactctctcaaaatcgatatcggaaggctacacctaccctctctatttatatccgaggtaagcaacctaaaaccacgaatcaacgttgtacaagaagtcctaatcccctagaaaaccttcccatacaaaaaaacgaaccttacaaactccaactgtaccaaatatagactccctccaatttcgaccctgcatccattacgcacacaatatctctatcatataccatataaaatcttcaccaaccacgtgcattgatctttagtctaagcatcccgcatgatatcctgatcttcctgacgtcatcttctcctgagttgactttggatccatcatcgacactaccctcccgaggcatcaagattcacctacacatgcatcaactaagaaaccatattcgatcacaagttctcaccaacttgactcatggtagcacacacataatatccatctagaattcataaacaataattatccacaaatacccaaataaataacccgaaactgaaaccgacaaaacgtcggccggtcagaccgcgccaccgcagactggccggtctgaccgctgtaagttcaagtgccttaatttggtttcggtgattaatgacaaatctaattatatgagactaacgtttttatgagcctttctttgactagtcttatttggatatgaaagtaaaaatgatgggaggtatgtattaaacttcacatattctaacttggtctctcttgtggatccaaaatatagtgtgagctctctcattgatcctgattgattatgtgcgtatgtgttcctttatatccatatgtatgtacacttgagggggagcttattctatattttgtttattataagatttctatcttgatttgaaaacatctttcatctcatctctctatttgtttatatcgggttattatccatcaccaaagagagaaaagattgaatgatcttggattaaacaattcgtataattgttacgttggtgatagatgataaaccgatgtttatgggattaacctctcttttgcataagttgtctactaggtcatttcccgataatgagatgtggaagacatgcattcttttgtgatggaccttaatcatgacaaggatgaaatgcatggagataaaatgatatgtaccacttcttatctcctactttttgataggttcatatatatgatttccatgttattgatatataagtgtgagactaatgtttacttgagtcttatcttatttagtctcatttacattgagaacatggagatcatgaaggtatatgttttatgttggtctacattattactacatatgccttctctttatgtgtataggataaaccccaattggtcattctctaattatgcatacacttgcatctcttgtatttatttgtatgcatatatttagggggagcaaatcctatacatttattgtgcatgttctagatccatgttgttcacctattatttatatcggatctttgcacttgagcttgcatacgagtatatgacacttgtgatgttaatgaaaactcaacgaacatatctatatctttcatatgcaaccggttggtcatcaagtgaaggatgacaaccgatttgttgagactaatgttctcctttgagatgtgaaaaggaataggtcccactacaatgaggctaatgaatgacaccatgggttaatggtcaccaagccaaggacatcgtcatgttggcaagaatgaagtcaaacttgtgatgagaataaagtcttgacaaaggatggtaaagacctcggcataaatatggttcaactggatggtcacaagtgttgatcttggctcaagcattaaccccaagttggatggcgcaaggcaaaggtataatggagctaagaatgttttcttagtcttttcccggtcttggtgtttggtgtagaccggatttgctagatagacgccgtactatcaagaggggtctatgaagcgagaatgtggatgatcttgcgccatattagttcatatgcatgtaggtgcatttggtgggcttgtctagccaagtgtggtgagtattctcaagtcctaaacaaagagagatgtgggcaaatcctataggtttgggtagcctcatgtggttatgtccggtggagtatcctttggagtgtgagccctttttccctgagaaaagttgtgtttcttggatggattgttcatgggttggatagccctttgaataagctttccatagagtccaagaacgccaaattccgagacccgtgtcaagaaatatcgccgttttactaacggttggttgtgctgaaaagtgacctgcggtctgaccgtgggccttaggacggtttgaccaggcctgttagccggtctgaccggcgtgataaggccggtctgaccggcttcaatggtctgttgcactggtctggtttatggtggcgatacagagccaccagagccgcaaccggtcagtccgagccgatgacggtctgaccgagccgtggacggtctgaccggcctctacactgcggtcagaccgaccaagttgagtgggctcaatgattgccctgtaacggctagttttctagccgttacaaagtagtccggtctgaccggcctcacaacagcggtctgatcggcggagcacagagttggggatttcggttccaacggctagttttggtggttgggggtatatatacccactccccagcagcaagggcgaggttttggcactccattacattatcttgaacccttgcaagagctctcacacccttgggcacttagtttatctagtgaggtgttagagagtgagttaagccaatccaagtgcattgtttcattgttatagctagtgtggtacttgatcatccgcggcaagcatcctagacttgttactcttggaggttgccgcctcctagacggcttgtggaggtgttgcccggtgacctctccgaggagattgtggaggaggcctggcgccagttgtgagtggtttggagttcaccaccttcggagtgaaggaagaactaccctagtgatcgaggctttggtagtcctctccgtgggccggctcccgccttgccccctttgacgaagggggcgtgcgatggcttcgtggttgagcggtggagttgggctcgcctcaacggggattaggaaaccggcaagtttccgaacctcggtgaaaattccttgtctcttgtctcctttattttgtgcaaatttactttgagcaagtttacatactagagtttatttgtgctattatcaccctaagcttgcaaacctcaacataggctagtttctttgtgcatttacttgagactagttgatttaggttttgaattgtgcaaaaccattttgatttacgcttccacatacgaaactcggttttagccaaaagtttgaaaaaccgcctattcacccccctctagtcagcctccttatcctacaaccgctcgccatactccggtctgatcggcctaccctagccggtctaaccgcaaccatcagacatgtccatgttcatcacttgataacattattcatcatcactcctatctgactggtatacatgccctggtccccccggtctgaccggtgcaaaaaaaaatcaattatcccacatgccaattaatcaagatatgatagtctaatattctagaggtttctataggggtaagatgtgtttgtgtttttataactatgagtgtacgcatattatgaacgtctgcatttgtttcgtgtttataagaaatattaaagaagcttcgccgattattctctggaattaatcactgccatgaaactgcgagacaatagctgacgaaccatcccgtgcaaatgccacaaacgcgggccactggatttccatcgacgcaaaaccaacagcatcgcgacgtaccgtccatcccaacggacgctgccatgtgggccccacttgtcatcgcctggtagcgctccccctccacgtataaaaagttttgcacacccaacctctcttcgccccttcttccatctccatcgtcttcgtcctcttccgatacctcacctcaccatacagctgctttctctctctctctccatccacccgaagcagaatccccaaaacaacagcgagagaaaaaaaattcacgcggcgaagccaaaattttttgttgatttcgatttggacataaaccctagctccaatctccccatcgccgcgtcggccccgaacccgtgcgcccccccatcgctcgctgaatcgaagggcgcctaccagtcgattcccccaagacgaggtaatccgctcgaccccctcgagagagagagagcctgggagagaaatcggtgttgttttctgctgaatcgatcgggttggcgggcgatttagggttttgggaagggtggctcgccgccctctccgaaggggactagcctgcgcgtctcgatctcgcggggagctagggttttgtgatccgagtgcgaggagggactggtgtcgccctggttctgatgagaattggcagtggaatgctcagattggctgccggcgacgacgagaggagcagctcccttggcagcggcggcggaggaggcgccagattcaccgcccccaaggtccgcacgcgcgataagggcgcgctcgtggccctctgattcgaggagggttgctggtgcgtagacgtggagccttctctgaggagagtgggagatgacgaggatcttcgtgcagcgcggggctgccggctcctcgtccagctccagccgctcggggtcacagacactgcagcagcagcagcaactgcaggcgacatcagcggttgcccgggaggaggagctgccgccgcagcctcatcagcatccatcggagctcacggcttcagacaatataactgaccatctagtggaggatgctgataacagcagtaatagtaataagccattggggctagatgatcccacatcagagagttcaagctctgcagaggagagggctgttatggagaaacctcccaaagacgactccagtgtgatcgatcctgctttcttggtggaggaattaacaggcctccagttttctgatcagtttgagcaggaaaatctagtgcagtcaggtattggtccatcacagattgctggtgcagcatcacacccaccacctccaccagctccaccagccccaccaccgaaaccatcgtctggtaataatgggttaaggagaatggggtctggaagctcaaacaatgcacggattggatcttcaagaaggccagttgcttggccaccagtggcagttcggtcatctgcttcgggttcccgaccttcttcacctagatcacttgctgatagtgaagggtataatagtgcagatgagcagggcccctgttacgcctctaattattatgattcggtatgatctcttgtctgcttctattttatatgaaaactttaatatcgtatttcctatatcagctttgccatttgtcaatgattgcatggcatgaagatgatgtctaggatgtggagataatgtcatagatcctttggaagtttggatcctttgtagttgcatgatacaataacattattccttttatcgttaatggtaggtttgtcacattcgcaaacaggcacctttttgtttttgacaacaactaatgtagtttatatttcctcaggaaagggagcgcatgtttgaacatgacctaagacgagtgagaggatttgaaatcaataagatggctgaagatgggaattgtctgtttagagcagttgcagatcaagtttatggtgatccagaagcttatgacatggctaggcagatgtgtgttgattacatggtatgtttattgttacatctatatcctttgccattaatccataaactagattcacaagcttggaggcagtgttctaacatgttaatctgttgcattcaaccttgccccttatttgttcactattggcagggctaggcagatgcgtgttgattatatggtatgttgtgtcgttgcatctgagtagtaacaccgtatattatatgtattccgtccctaggttcaattcataagccaacattaatatttggttaatatttctcattctctaccctgtcgcataatttatctcactattttatactaagttattggctctgtaagatcttggataagtttggggaagcaatatgggtagatggtggaacattactagtttgagacagcctgcagtttcgtctactgttagttagggttgaaacatagttgcaacttgcttctcctttgctggtcagggtagatattggtttctgctgttctgtttccttagaggtagcactcagctagttatacaggaattaaaatttaataatgaacttaccaagggaaaagtgctgtctgttctaccttttgacttacatattttgtgaaatgacatattaaacaattatatcgtgtgcaacaaatgtgaagccatgcctagttcattgttaatgaagcatttgattcaagttcaagtccagactcaactgtatcgtttatcgttgaactgataaacttcttggcaaggatctatttgtttgcagcatgattttcttcaccgtcttttgcccagtcatctactttcacagtttcacatggaaaaaaagagagaagttttgagggatgctcctgtctttatgccagcaggacctttttctttcctagtgttctgttttggtttctgtattttttttaatgcatctcctgtctactatgcaatcaccaggacattgcttttctagtgtctttttctgtatatttcacgcatttgggagttttctttaagaagttgaaagcatttggaagaacataccaatttgagtttgcagcatggtattaggcatgcattgaaatcgtaattactccctgtcgtctgagttacttgacacattagcaccatgtgcatagaacaaggagtataattcaaatttctgatgtgattttgattgtatacacatctcatccacaataaatcactgttcctgaaaggggcattctgtattctggaatatattgcctcgaaagcccgaagtaatccccagtttcctgaaacctgaatacctgatctattttagactatgaggtaacagtgacttcccctttgaccaagtggctgatatgctcattattgttatcaattcttccaggaaagggaacgtgatcatttctcgcagttcatgacggaaggttttacatcatattgtaggagaaaaagaagagataaggtatgctattcaatagatcctggctgtttaggatatattccaactgcttgctgcttttccttacactgagtgtcttcgaaccgttgtgctgtgcttgtgaacatcctcgtattttttttttgaaaatgttatgaaactaatgtttttcagtcagctgacttgtcttttattttaatctactatagagcatgtgcgcccctggaaagcatgtttttcagctgtttgaatcttgttttgcagatcttaatgaacgtctgcatttaatttttttaaccatttatgcttccacacaacagctgtgcattttccctgactttcagaatttcttttttttattaaaaataatgctatcatgtagatactgagcgcttgtttttcaacttcaaaataaaattaggacttaggacaaggaaaaatttagaaccttaccttcttccactgcaaataatttatgttgacatgcttgattctcaaggtatatgggaacaatatggagatccaggcatttgctgagatgtacaatcgtccgattcacatatattcctatagtacaggtaactgtaacacatatgttgctataggattttaacccttctctgtagttgcataaactctttcatagtctcatattgtttgctcttactgcagagcccattaacatttttcaaggaagctacaatacagatgtccctccaattaggctaagttaccatcatggtaatcattacaattcggtggttgatcctcgtgggctgacagtaggggcaggcctgggatttagttcccttagaggggtatgtcttggtccatggttatcattgcccttatagcctattctacagttgagtgtttgccaactggtattctttgttaataaatgaacttcatttcctttctgtacagacaaataacgttgacagggatcaggtgaaggctgcaataaaagcacagcaagatcagcagattgagaatgtaagtactggtaattgttttcaaggggtacttgccatctcaacatctgcacaaattaatcaggtttaccttgaattgttagagtataaaccgaaatatacttaattcttttcttgccggcaacatcaggcacttctggctgaaggacgactatactctgatttggagttgacagagaaggaaatagagcggatggtgatggaggcctcacgagcagagtatctaaagcagcagcaacaacaacttaacttcagagagtcatcaacatcaggggcagagccatcttcttctgctgcgagtaagcccaccattcttggcattggactacctggtagaccacatacagaaactttgataggtttgctgaaaccatcatgatttcctattctgcagttagtgggtcttctcggtcagctgggactgccgatagagttggcgaggagtgcttcgttctcccggacaccgtgctaacccgcagcatgcagctcctcctggcaatgggcttcaactacatccaggtcatggaagcctatagcatatttggcgaggacgtcgactcaatgatctactaccttgtggagatgggaggcaccggagcctctgcaggtggtagcaatcgcaggaaaggaaaagctgctgagtgatctgtgtacctttcaccggctatgacgaatcgaaataaaaatagttatgcataagccacaggagagggatggcaagactcgtggattaaatgagctgaaatgtcaatatactttccactgtatggagtgataacaaaataaaattcacttcttccatatgtggcctggcgttttcatggctgtcggcacttgtccacagatgtctacacggaaaaccctaaaacattgtactacctccgtcctatattacttgcttttttgagttttttaagtttttgtttgtcaatgtttgatcattcgtcttattcaaatttttttggaattattatttattttgtttgtcatttgctttattatcaaaagtactttacatatgacttatctttttttatatttacactaatttttcaaataaaatgagtttttgtttgtcaatgtttaatcattcgtcttattcaattttttttggaattattatttattttgtttgtcatttgctttattatcaaaattactttacatatgacttatttttttttatatttgcactaatttttcaaataaaacgagtttatgtttgtcaatatttgatcattcgtcttattcaaaattttttagaattattatttattttgtttgtcatttgctttattatcaaaaatactttacatatgacttatctttttttatatttgcactaatttttcaaataaaacgaatggttaaacgttgcaaataaaaaatcaaaaacgtcacctattatggaacggagggagtataatgcaaccaaaggttgcgaaggaagttgttgacgtcgagggattcaagcatgagttctggcagtatgccagtattaccaaacattgtataatgcaaccaaaggttgcgaaggaagttgtggacgttgagggattaacgcatgagttctagcagtatgccagtattacctgcaggctccggtctcagctagatgccataactgaaagtatttattatagctaaataacacaagatttggagggagagatgtccctctaaacagccggacgtcataactgaaagtatttatagttaattaacactgggttttgtagatttagagggagagatgtcacttcaaacattttttaaaaataaattatgaacatgttggagattgaatacagaataaaaccacacacccattgtcattgcactattaagtgtatctcaaagttgtacgcacggagagtggcgtaattctaataaccagatttatttgcacttaacagtatatttgtagttttacgcacggagagtggcgtaattctaataaccaaatttatttgcacttgacagcagaagttttgtaggtatttttgtcaagccatccatgagatttcatttgaacgaagtaattctaagtcatgagatcatctattaaaacttctcaattcaagtttctcaatataatgctcgtgtttctgaatgcctcataagatttctcaatatagtggttcataagttctctcaatgttgtgcgtgatgtaataccgatataaatagttttgcttgatctactgaatcacaaaaccatttgccatttttagcattttccatttgtattctatacagtgaacacattcctcgagcctgagcctgaatttgaacgcagcagcgcttttccaaaaaataaataaataaataaataaataaataaataaattgaacgcagcagtgccaatcaacactactgaatctgaaccgaatgaattcacaccggttacactataaaatacaagtacatttcttttaccattaccgttgctacaaacaaacaccacaataaattcagacaaaattttctgacacactttgcaaaatcggcagcctcttggcagcacacatctttcttgcaagaaagatccaacatttcagccaacgagtaatcccatcaagaagaaaacaacagtttctgaattagaatgcaatatcgaggaaatggtggttgaaacactgaaactgataaaaacacaatcactagaaccaaagccagacatcgtttgatcatgtctttttgtatcgaaaaaatattattactatttatctatttgtaaccgtatggatcatgtcattttatatgccacagatatactttgaatctttttttctaccatattttggtatagaccaaaatacccaatccacacatggaggaggagatgcatttgtaagcgacaatgtaacgttataatgcacgtgtgacaagagcaacatttctcatatgaaaagtgacaatgtaatgtcataacgtgtaacaagagcaacatttctcatatgaaaagtgacaatgcgattatgcgacgtcataatacatgtgtaagttgctatttacagagatacacactaaaatgtggttgaattggacaagatagcacgatgatagacacaacggcactcccaccgatgatgaagaggagaaggtaggcccgagattcagtgtatagtgatcagggactagatgattgccctagtcagctccggatcgatgtgcggtctcaaaggtcgatcatggacgagtgctgctaatagaaacaatgacaacgagtatcacatttggattcggattccatggagtatttggattcgaatgagcttttctccgtatcatgatgactcaacatgttgtgagaaattgtttccttagaaattttattttggaaatagaagtgcatacacgcaatttgagaaattcctaagcaattgttcctacccaccaataacggaacaacatgtgcaactctgcaattcttccatgattatcataattggaaaagacaaccgcgtacaatataacgtaattataaatagaccttccaatgaaaaaaagttgaaagaaatactacttgaaaaacaatacgattgtactatctccgtcccataataagtgtagccatgagtttccgcgtctaactttgatcgtccgtcttatttaaattttttttataatcagcatttttgttgttatgagatgataaaacatgaatagtactttacttgtgacttatgtttttaaattttttcaaaaaattttcaaataagacgaacggtcaaagttgggcgcggaaaactatgactgcacttattttgggacggaggaagtacatcgacagttttagcagatagaacaatatatacgacggatatttattgaagtaaatatttgattctagagacaagggagctgtgttaaaaaaagtagaacttacacaaacggcataattggatcaagacgactagtaacccatatagctaactacaataatgaaagcaatgagagcatactcatgacatgtgaaaaacaggccaaaaccagttccacgatacttggccaccatccctaaatattcgcggtgcaaccccgctaggagaacgaaccggatggtcaagatggcgaaccggatgaggcggcgacgacacccccggcaaaacgcagtgctatcattgttttcttcttgaatcttattcccgcctgccaccaaatctgtcttcgcttcagccttggagccggagccggaatctgcaccaccgtcctcctggagctcatggatggattgcttggagtgctccatgagttatttttcctgaaatctctcaatgctgtgaaagggataagcgaataattataaacgattgtattcttttcaaaaaaataaacaaataagcgattgtatgatatttttcactggttgctgattgcaggaggtggttctcaggtgcgatacttatagtagattaatcgaagaaacgggagtcagcatcggaagtagcttaggttcggttcggttctgtttaggactcgcgtcgcgcgccgagtttggccgctgaacgatttggccctggatgcgctgctcatcgtcatctacctgggatccacggattcacccatcgctgaagatactggagaaccccgcgccctccgtgtctacgcgtcgtggcgaagtcctgtcgatgtcgttgctccttgctcggttcgtgacctccgccgctgccattgctagatcgcgacggcctccatgtcctgtgcggcgaagaggaagcggatgcccaggaagtgcgagtaggcgcgcacgaaggcggagaatccgatcccgacgtcttgtcctggccggcgacgacgagcggttgcggaagtcggcgaggtcgaaagggacgcggcagatcgaggcgcgccgcgcgtggggcgagggtgaggtcggaccgcagccgcaagccgtgcgcgagcacgaggcgctcccctccgcgcgggcggcggtgttgaaggtcagcacctgcttctccaactgctcggctcggccatgcgggtcgcctcggcgtcgcggctctcctcccccactcatgcacgctcgactcgttcatagccggcggctggtcctcgacgttgtagatctcgtcctcctcgtacaccgcggacacgttgcacgggatcagcctgtcaatgaacattgaacaccattgttactgtgcatgaatttcagtgcggtttaacaagatgaaagcaatcaagcgcacaaaagaaacatctcggagaaattcagagttcagggaatgatatgaatttatttttacatccaccggaatggattactatgatgaattattggtcacagttttcttttgtcggaactgttaagcttaagtatataatagagtaaattgcatcggtggtacacgaacttgttaggtgaatgtaatctagtacatgaacatgtaaaatgctcgttttggtacacgaacttatattgcacgtgcgaacgatcagtcttggaaaagtactaaagattgtgagctacagcataatcagtacagatatgaacaaaaaaaaagaactattttgatgatcaaacaagttgatcagcatgacaacatgtcataattctaatggatactacaagtttatgtgctgaaacaattggtttcaaatcacatactcatacggtatgttctaaggtgtggttacagaagctatactgtcaaaaattgatgatcctaaataaactcctaacgtgatccaaaactcagactattcttaatcaaggctcagtagcgtccccgttaatccaatgcattgtgctcaataaagctaagcaaacatttagctagattcaaaaacatttcgtcagaataacatgaaacagaaaatcaaactttctgatcgtgcctatttccctattcgtccacttcatcatagcgaaatcgatgaactaacccagcgcacaattctaaagaattctcaacggtttggcgttagaagtgttcatggattaatttgcaagcagcagaagataaggttgccatgaattcctctgcacatacaactaattcagtgaatgcaaatatctagctagagaatcgtgtgaagtacatgaatgatcagattcgctgcaccaaaaccataaaacacgcgtgaattcacatgaggatgaaattaaatcttgcaacaaaaaactcgatcataataagagatcctacatcgctggccggtctgactgccacataacccacagtctaaccagccacacccggccggtaaacaacaaccgttatttcacaaaaccaatcatctattatactccgaaatctcataacaagaaactaatctttcacacatataatatcacaaaccaccaatattattaacacataaaatctaagtcactacttcattttacatacgtagacgaagagcttgctgaagatggtggcgaagaatgagaaccacataagtaggcggtgcaggatccatgaaaatattgcttgcctcgctttcttactttttttttttgaccggactcttactcttactccaacgatgcagatgtgcaaggggatacaaggaggggtttgtggctatttgcataaaggcagttgtaaaacattttattgagcaaaacagtaaaactgttgagtaattaaagtaacattaaatctccactgatcaacgctacaccacgttgaacaggcccaaccaacccacctgaactacagtgtattgggtcgatttattaagatgggactaatcacggtgaatctggtcgaccgcccataaccgcgggcacggctattcgaatagttttactctgatcagaggtgtacaactgtacccacgagacacagccccacgacacgtttccgtacgccgacatgccaccacgacataccggaaagaggccgtgacaggacccttcgcataaccccctctagccaagcacaccacacctcaggtttcaccctcgtccccagcgggcaacgggcagtcccctctcgtgcctaggtgaatccggaagcgacagaggccgtcgcagggcccgccccgctccatcacgcccacccttgcctggatgcgtcgactagaggaaagctacactacaagcccagccgttgcccacgctggcttgtggtaagtacgataagttcttccagggcatctcgcgaaccggtccttaactgccatgggtgcgaccagcaaaaccatgcacccatagcccaccattcagtcgcattttagttgaataattacgaccatgaagcatggccagatgtctcgagcacgcagctcactctgatactaaaaaggtctaatactgtaattatcccatcaactgagctagtggtaattaagcatggctaagcatatagttctagctaagtcatcaaagtaacacaagctaggcgatttattacccatggttgacaaaggacagatatcaagtaaacatggcacaagcgagcagataggtaaaaccctgaccccatgtgattagcaaaacatgcatatttatttgcaaacagtaaaacatttgtaaattgggatcaacatgctcaaagggaatgtgtgacttgccttgcttcttcaaacaatcttccgaactcctatccttgcgaccgtgatcttccgaaacgacggattctacacgtaggcacgcaaaacgaggaaaaaatctaataaaaaccaaggaaacagtatataaaaagtaaacaaacatgtagagctcaattttagatgaattttgcaagttgaatggctcaattcggagttcgaatgaattagatatgaattttagaagttttgagccatttatatgaatttctagaattattcacgaattattgcgcaattattatttatttttacaaaggaaaaggacctcgctgacgtcagcaaggggcggccggcgccgacatgcgggccccacacgtcagcgagtcaaagggggagggcgcacggtggacatggtccacacgtggcctcgggtgcgcctccaccacgtggacggcccagatcgacctgagccgatcgggcggccgaggggagcggcagccaggggcacaggcgcggcacgaagccggcccggccgagccaaggcgcggcggcggcggcatgcggccaccggcggcagcagccggcgacgtggaacggcggcgggcggccggaggacagcggcgcgcacggggacggcgacgcaccccaagaggcggagatcggcaagaaagggggacgggaaaaaaaaaggaagggaggagaggtcctcaccggaagcggcggccggcgcggaggaagatgacggcgacgacgattgcccgatggcggcttgcgaggacggagggcggacggggtcgcccttgaccttcagaaggagaagagggagttcgggaggggaggaccgatgcggggtgaccggtaacgacggccgaccgcgacaatatgagaaggatctcaccgacgaccgaggaaggaggagctccggcggatttccggcaaagaggggcggcgaccgaggtcctcctcgtccttgcggagctgagggaggcaacggcgcgggtcagcgtcgaccgaagcggcggcgcgacgcggctggagtcggcggcggcggcggagagaggtggttcgcgtggctacggcgctacggaggtggagaggggaaatggagcggtggccgagcttgcccgggcggcggcaaagctggcggtggcggcggcgcagcgcggagacggcggtggtggctgaggcacgcggctggagaacgctggcgagcggcggcaatggggaccggcgtggggagagcggggaaaagcgcagggagctcgggatggagtgggaaacgaaagaggggagcacgagggtgctttatatagggctcggggatggagatcgtgcccgggagaggcgggatcggctggcgacgtggggtggcgaagtggagctcgggatggcaacggttttcgcagggcgtgggggaaacggcgcggacgtgggcggcgaccgcgtccacgcatgcgcgggagagggaaccacgcgaggaaggcggcgacgtggggagcacggggtggccatggcggcggttggggcgacgggaggttggggaagaagatgacaggtggggcctcgggtcccacctgtcggggagagagagaagggaaaacgggcgagggaggtaaagcagacttgagggagagagagagccgagcgggccgagggaggaggctggcccgagagggagagaaaaggggcgcgcaggccgtgggagggaaggaagacttgggccgaaaagggcccaaagagaggaaggaggattttatttgttttctttttattttaattgatgcaatgatctttgtgctattaaaactatttctcaagctccgaaaattcacggaaaattccggagagtacattagggcacaaagaatattacaaaatattcccggccaataatttttaaaggaaattttaatttcctctataattcacttgattaagttgatttaacttttatttaatttctagaaaatgtattattaattgatttttattcccgaacgaaaatcagggcgttacactgaacaaggttggtttagtgatcaggttttggatgatctacaggggaaaacatagatgcaatcagattttccagaaaagagtaatcagagggagggaaagcagatagtcattgaggggggacagattggaaatgttgatctcaagtacagtggtgaaccaagcacagaggttcctaagggggggtctattgatgcctgacatgatggtggtggaagacaagataaagtgttcacaaatattaagagacaaagaattggcttttaagttacagtatgaagattcaactatgatacagctgaatgtttgtgaatcaaagaaatcctcaagtgaagaaggggaggtgcttggtcaggtggacaagatacagtcttctcaggaacagttatttggaggagggcagataaatgatcagatagacagcatatctagaaaagttgcagaggggatcctagaattggagatggatgaggaggataaggagaaagtttctttgaaagacagtgaagattatatggattctcaggaatcagaaggaagttttggccaagagattagatatagacttgactgaagatgtgacaggaagtcaagaataggagatgaggaggaacaaaagaccgaaggacaaggaggacaagaaaccttatgagatggccattgaaagaaaagaagcccaaaatgcttttatcaacaaaggtcagaaccagatcccttcctttatacatgattcaaatttgtctttagttgacatggctagtattctaggggtaaatcttggttgtgctgtggatgatgtagaatccaatgtgcatttgattaaagagttggacttggctagaattaacctctttatgaaagagggacaaaactctgattgccattttgatgatgtgtccaatagggagataaatcctgtgatacttgaacttaatgattctaaaaattccggagaggaggttgatgactttgaggaaattgagtttatgctcaagcaaatacaatcttcagctagaaaaatgaaacaaaaaaagggaaaccttgagattttcaaggtcactcctaaacttaagaaaaggaaaaagaaaccaaaagaattatgaaaaggcatattctggaatattagaggcatggggaacccgaaaaaatagatcatttgcaggacctaattagggattcaaatgtagactttgtgggaattcttgaaactataaagcatgatttctctgctggcttacttcatagcttaagtggacaaaaaaaaattaaaatgggaatggctactctcatgtggcaggtcaggggggattctagtgggtgtaaacatatacaagttatcatttgtaaatgttactatggagaattttcatatcaggttaaagttgtagaatatttgagacaaaaaaacatgggatctgttagtaatatatggggctgctcaaccagagcataaggctgtcttcctagctgaattggctaaggagttccaaaaatctaagggaccctttgtggctggtggagactttaacattctgaggaaagaaagtgagagaaacaaaagttgggggttataataagtggaccttcctctttaatgcaataattaagcagaacaatttgagggaggttcaaatgggaggaagacaatttacttggtgtaataaccaagataacccaactttagaaaaattggatagagtgttcatcaacaatgaatgggaatttgtttaccctctcacctctgttcaatctttggtaagagccttctctgatcacaatcccatgttgttggacactagggaattagttaaaaaaaagagtatgctcagatttgaatttagttggtttatgagagaggatctagggactttggtgcaggaagcttggaacaaatccttttcaggtaatagcattgaaaaatggcaaaagagacttagctatctaaggaggaaattaaaaggtttgaataagaattggtaaggagaatataggaggagaaaaactgaaattttgaacaaaattgatgcaattgacttaaaagctgaaaatgttggcttgagttgtagagatagagaagatagaagagcctggaattgcagctgaaattcactattagggaggaaaaaacgaagtggttccagaggagcaaagaaagggaaatcatggagggagattgtaatacctaatattaccatgccaaagctaatgtaggaagaggaaaattctgattcactctttatctcaataggaaggtatcattactgggcaagccgagcttttgacatacattactcacttttacaatgagctctttggtaatcccaaacagaataacttgtttttaaacctagaggggatcacaaaggtaagaagatgcagaaatgttaataaaacgtttcactctggaagaagtgaaacaggtagtttttgagctaaaacagaataaggctcctggtcctgatggtttccttggtgatttttatattaaattttgggatttaataaaaggtgatttactggatctggttaatgacttccatagaggtgtgctagacattgagagactaaattatgtcataattactaaagacgctgctcaaatacaaaaatttagaccaatatgtttgctgaatgttagtttcaaaatcattacaaaagtgttgatgaatagattggatagggttatggcttctatcatttcaaagaaccagaatgcttttctcaaaaataggtttatcatggaagggattgtgattctacatgaggtgttgaatacttcacacaaaaaaagcaaagtgggatcatttttaaggtagattttgagaaggcctatgacaaagaggactgggtgtttatatatagaatgcttgaagcaaaaggctttcctgatatgttgtgtgattggatcatgagagtaattaaaggaggaaaagtagcagtgagagtcaatgatgagataggtccttactttaataatcataatgggctgagacagggtgaccctctctcccctctgctattcaatttggcagctgaagcactcactacgttaatacagagagctaaaaacaacaatctgactgaaggtctgactgtcagtggtaatgaaaaggtggccatcttgcaatatgcaaatgacactattttcatgctgtctgataatttgaattatgcaaaaaaaatctaaaattcattctttgtctgtttgagcagctctctggtttgaaaataaattttaataaaagtgaggttttctgcctaggagaagcagttgagaaacaggagctttacatctagattttcacttgtaaagtactcactccgtcccacagtataagggattttgagtttttgattgcaacgtttgaccactcntcttattcaaattttttttgcanatataaaaaacgaaaagttgtgcttaaagtactatggataataaagtaagtcacaaataaaatggataggaattcaaaaaaatttgaataagacgagtggtcaaacattgcaagcaaaaattcaaaatcccttatattatgggacggagggagtaggtgatttgcttatgaaatacttgggagtgccaattgatcaaaaaaagattgcttaatagtgaccggaatgttgctgaaaataaaatggaacacagcaagacagactccaatcaattggaggaagattgattcttaatttcttatcaattcaagccttagcaatgtccctttatatatgctctcctcttaccgattgacacatgggctagagaaaaaatatactattttagaaaaagattcctatggcaagatgaacaaggatgtagaaattatttagtgcaatggcttgttgtttgttcccaaaaagatcaaggggtctgggattgctgaattttgcaaacaacgaacatagctttgttgtgcaaatggttatggaaattagaaaatgaaaatggtggtggcaagatcttattaaagccaagtagctaaaaaacaaaaccctctcaggagtatcagttaaacctggagactcttattttttgcagggcttgatggaaataaaaaatgtcttctttaaattctgcactgaaaagtaggaaatggggaaaacacccttttttggaagacagttggattggtggccgtcctctgaatatacaatttccttcattgtataacaaaattttcaaaaagaaaaagtttcagtagccatggttaaaaaggaaggttggggtataatcaaattcagaaatactttgcttggagagaagttgagagattgtaataaataagataaaatctatgtgtgagcagatgcagctgcaggttggcagctctattagggtcttgtggaatcttacgttgatgagtctttcatagttaagtctttatataaaactcttaagattcaacaaacacatttccccttttaatttatttggaaattcaaaatcctctaaagatcagattcaacaaacacatttcccctttaaatttatttggaaattcaaaattcctttaaagactagagtgtttcataatcttgttattaaaaagaaaatttttactaaggacagtttattcaaaagagggtggaaaaaaggagataaatggtgtcaattctgttacaatgagcaatcagtgcaacactttcttctgttatttggctagatttatttgcaatgtgttttgttgtgctttgagtttgaaacctaacttagcaaaaaatcagttgtttgggagctggctttctggtttcaataaaaacataaatatttgatgatggtgggtgtggctacagtcatttaggccaattggaataccagaaataaaacatgttttgagcatattttactaaatgatccaattgagatgatatatctagcatataactggattgagtgttgggctatttttgcatagaatggaagcaaatcaaagaaggatgttgttgttcagtttaagacatggctgaagggtctacacaataaggctggaggtatgaagaaaagcatttttagggtgtagtttgtttgttgtgtttacttaggccatcgttgctattttgtcctacccttttagtttcccattttctctttttttttctactatgtcatttctgataatagaaatgtgggctcttagtcctagttcaaaaaaaagtttgaaaagttcatgaattccggacatgttttgagaaatgagaagtgtcggtaggatttttgtcgggaaacttttataaacataaacggatatgataaggcttctatccgtcgaaaactttaagaaaacaaatttgaaaactttttataaacgaatttagtttttttttctcgtaatcgaaaaaaagagtatttctcatatacaaataattagcttcaaccttctttattctaaatatttagatttatactatgtattgagttacttaactaaatagatgtattattttagtcaagtactttttaatttttttcctaatgaatatttttatttttattaggacacgccatactacttataactatagttatagattaatatagttcttttttttctaataaaataaaatgtacaactagttgtattattataaattgataaaaaatagaaatattaatttattgttttaaaaaatattgagttatatctcttcgttgatttcttaggatatgctttgaaaatccctcctcttacataaaatgatatatgcattaacaaatatgattaattaagtgtaagctttttttgaaaaatagatcaatataatttttaatgcaattttcgtataaatctttttgtaaaaagaatattgttcagtagtttgaaaacgtgcgcgcaaaaaaacgaaatagatgaatgagaaagtaaaccaaaagtacttagccttatcattgttcaataacggaacaactatatataactccacaattcttccacgatgattataatgggaaaagacaatcacatatagtacaacaaagctctaaagtattccttccatctaaaaaaggtaaaaaaactacttggaaaataaaacaaaggtacagtcgattagaagatggagcaatatatataataaatactcctatttattgaaataaatataggatcctagaggcaagtgagctattaaaaatttgccacgtgcttcaccgcggttcttgttttcgagctccttccattaagaaaggtaaaaaaaactacttggaaaataatacaaaggtacaatcgattagagatggaacaatatatataacaaatactcctattaattgaaataaatataggatcctagacataagtgagctattaaaaatgtgccacgtgcttctctgcggtccttattttcgaactccacgaggctgcactgcaaagcaggagtgtgtgttggccgttgctggctaccgccagaggaagcgtgccccacgcctacgcttgacaaggggtagtcctaatgggcgngtgatcnctcccttcccttccancaaccacccgcccttcccttactaccccttcctcctccccttcttctcttcctactacaccataaatatttgaattcaaattcaaatttgaaacgggtatgtaaactttttgcttataaactttgggtctataaactaatatttgaattcaaattcaaatttgaaacgggtatgtaaacttttgacctataaactttgggtctataaactaatatttgaatttaaattcaaatttgaaacaggtatgtaaactttttacttataaactttgggtctataaattaatatttgaattcaaattcaaatttgaaacgggtatataaacttttgacttataaactttgggtctataaactttaggtgtataaactttagatgtatagaaatactatatacagaaaatatttgaattcaaattcaaatttgaatcagatataattcaaattcaaatttgaaacgggtatataaacttttgacttataaactttatgtctataaactttaggtgtatataaatactatatgtaaaaaaatatttgaattcaaattcaaatttgaatcggatatataaacttttgacttaggtctctaaactttagatgtgtaaacttgaggtgtataaactttaggtgcataaatttactaaaataagaaagtaatgcggtgtcaaaaaaggaaaccaggtggagggaaagagggggagggggggcgaattgatcgctacccccatcaccaggcgagcgatcgcccattagcatttccgcttgacaagcaccgtactggccttcgcgagctcgcactactgcagcaccctacctcctcacaattgtggaaccaactgctgctgcttggaggaggaagagaggggaggagggaagaaggaagaaatggctgacatgtgagccacattattttttcccttttttttaaaaaaaaaaaagattgtaatagtaatgccacgaagattgcgtgctgcgggaaagtcgtcatgggaggtcgattcggccgccgcgacggctgaacgagaaggccagtgaagatgcaccattttcgctagcggtggcaaaccatgagcgaagatacattttcactggcggataacataatggagccgccaacaaagatagttatcgttggcggttgccttataacagtcaccagtgaaaatgatcttcgctggcgcacttaagctacatggcccgccagcaaaaatgcactttaccagttgcttgctgacacgtgacccgcttatgaagatatttaattattttttaggaaaaaattgaaactatttttagtttgttcacgtacttaagaatcacacatagaggatatattcaatcgagcaatcgatgataaatgttttcttattgttgcttgcaacatctattgataattaatagggttaattggaaccatgtcattataaatttcattgtttggaaaaatgtcattaatgttcatctatttggtattatactattccaatttcacaggtataagagatatgctactacgtacccctcactgtatttctaacattttaggaccaaattacccctttatttttcttcttccttcccctctcttctctctttcagccgacgaactgtaatgacctcatgctcgaggagatggattctaatcatttgggcaaatatccacccgtttattacatgccaattaaatggttattaaaaaaaaagacaagatggatcaatatgtaatatacatcatgtaaagccttatcttatgtcatacacttgtcatacataggtaatgacactaaaaaaatgagttcaataggagcacccaacaaaatataccattgaacaaaacttcagcacgacaaaaacaagaaggttaagatcacggtctgacagtgtatcagcactattaacgtatccacaatttatactcattatcatgcctcaaaactgaacggcaactatccaacactgatccttgggttctttcgttgttacagtatgaaaattgaacccatcatattcacccaacaaaaagaagcattcagcttcagtgcacaaatccaaggataaaagcttaagacaaaaaacgtacagcagctgccaacttctgttcacatctgttggaacagtctcaagcatcaccatgaacaaaaacacggtccttatcatcaagaactaggaagaaacagcttttctttcttcatcatcagtgatcggtagtttcgtaggcacgtcaaagcttgcctttagcgtgcgaagtctttactctgtgctgattaatgcctggagcaggggatgccctgattctgcaattgaggtgcccgcaccattagatcctggatgccctgatctacaacagcaatgcctgcagctgcaagaccaaccaactgttagcagccaattacacatggaaaatatgacgggatggatgatgtcaatgaccaaccaactgtcaatgatttctaaggcaattctgaaaatattataactagtttggtgtgtttacagtcctgggagccaatactggagctgctactagcatgagttcaggaacaaggtaacttgtgcaggctagaactatagtaattgacatcagcagcatggctccaatgtgcaccaattcggcgtcacattggtcaacccattttctgggggtgcctaacagggcgaaactaactagaatcaggctctaattcagtagtaatcccatagattggataaactactaagtaaaaactggcttgacctatgtatcttttggtctagtcttggtaaaattgaattggtttctgttgttgttgagtccatttggacccctggtacctgtgcacctatttcaggctggctggctggccatgtgtcacacaggtctttttggttaattcatttgaagattttgcctaagacttgctgcatactaagatacctgccgggcatttgaaatttggtaacccacttcattgtcctgtacatatacaaaggcttctgttcgctgctagtactaccttagctgaccagaagttaggaatcaacgatgcatttatatgtgtgtttagttcacgtcaaaattgtaagtttggtttaaattggaacgatgtgacgaaaaagttggaagtttatatgtgtaggaaagttttgatgtgatggaaaagttggaagtttgaaaaaaaaagtttggaagtaaactcggcctaacctgcatttgctgttttggttgaaataagattcagagaagattcgttggtaccattaaagagaggaccaattttccagttgctcactaggtgatttcaaccagaagctccggtcgaagccccatgttcataagaccatgctagcaaaaagataaaattagtaaaacaaagcagatgttcaaatatcgctgggataatataccactctcaaacgccaaatagaccgttcttagcaccagcagaggtggggaagcgcgcataataccaatgcctcactcaagatgtgacaggcaagccccactgctatatgaagagctaaggggctgtgtggttttcgagacttattttaaggtcctgtcacatcgaatgtttgaacactaatttagagtattaaatatacactaattataaaatccatttcataatattggactaattcgcgagacgaatcttttgagtctaattacgccataattttgacagtgtgatgctacagtaaacttttgataattatggattaattaggcttaaaaaattcgtctcgcggattagctctcatttatgaaattagtttttttattagtctatgtttaatactctaaattaacgtccaaacatccgatgtgacatgggctaaaaaatttttagcaccatctaaacacccccacacaagcataaacaggagaggggttccatgttccatcaacagtgaaggtaaagaatactggcttgccaatggtatagcagaagggaacatctttgggatctggagaggtgggcatcactgccaatatttagaatcacaaatgtaagttacttctagattagacaaaaagaatgaaaaacttaacgtaagaatcagtaacagtatactatatgtaggtgcagcacgtgctcttattagggaacttgctgcctatggagtcccgaaagccagaacaacaacaacgaacacgaggaagagctcctcaagggggatcccatgggatcattttgtaacctagtttgtaaaaactctgggttttttttctctcttctcctaatatgaaataggcagagctcctgattttacccctaaaaaaacacgaggaagagcatcagatagaacgccttacggacaaaaacaacacaagggtcattcttgtgctgtcgacatacatagcatcctcttgcttattgtaatgaatcccatgtctttctagccaatccttctccatacctcagatgctatctgcatttaagtgatcaaattttcaatatggcaacatatttcaaagatatttggaacaacttaatagcacagatcgtatgcttcaatatgggtaaatggattggcataatataacttctttttaaactgaaactggcataatatgaccataatgatggaaaaaccatgtcaccgcctcaccggtcttgacttcctaggaagttgggacgcttgtgtcgggaggggtttgcatcgatacctcaaatcaaacgcatcactaggcggtcatgtcagcctgcaggggattccctggtcggattgaggcgtggcgaggacggcgctagaggtggctgccggcgaagcgctcctaattgaacctagagcagcactgctagctactaagcttcgtagcaagttggattataggcttaaacaaacaatcggcagcaaaaaaactccgatcgggtcaatcggcgccactgttaaaccctacctattgactattcccgccgaaggcaccggggtgggggggaggagcatgcgaaggccatgacgagatagatacttacaaagggacggtgcaccaggtcaccaaccaattctgtcgacggagtcgggggcgatcgccgcggcggcggcgagttggggaggagaggcggccatggagcttcgcgtggtgagttgggtgactggtggtaccaagaaaaaacgtgcaataaaaaccaccaattaattgaaaacccatgaaaactatatctaaatttctctaagttcatgaaaaaaaaatgcagagatggttatagttttgaaattattttacacaaaatcttaaatccgatctccaagaggaaaaaaagggacaaattccatgtgaatattaccctgatactattcatccttttttttacactcaaacgaagttaaatttagacttgatatttagacataatgtattttatgactatacctatatctaatatttttttaaaaaacttttatgtttgattttcataggttttatttgatggtttttacttaatatgactcaagtatgaattatttaccagtagaactacgtagattggggtaatatgttgtttttcaaggggcgaaaacgactcagaaatggatggaaaccacctttaccgctttcgttttcaaatctttttaagaatcacaataaaaaaaatcctgaattcaaaaatggaatcgaatattatcggatacggaaacagagctaatacaaaatgacgcggatatgggaacggaaatatatcggaatataaaaatccctctaagtgagcttccaagtgtttttttttctaaaacaatagataaaatccaaaattttagcaactaacatcccagatcacttcgtcacaaaaccgagtaaagtttgtacttactgccacaaagtgaggtgcatatcttgatctctcattgtggcaatcacaataggaagtgcagaataatgcatcacataacacaatcactcacagagtgaaagtcacatttaaattgtagtatgtcttctgctcaggtccaaatcccccaaaaccacgaattccgcgtggaccgcgtcgaggaaaaaaccgaactttcctagtgtcccctccacactctcatcgcgtgcttcctgcgctcactctcttctggaagagcttattcccggcgcgaccatggcgatggcggcgctgcgtgaggcctcccgccgtctggtctccaggagggagtccccggcggcctacgcgcgccccttcctcctcacgcactcccggggcatcacctacaggctcttcatcggaggtaaacctcaccccccgtctccgtctcctcccgtttcctgactcgcgcatgccgcttgtgtaacatctccaccatggcgtcatcacagcgctgcagatctttgctcgctcgccgtctctcgtgcgtgcagatctgtgtgattggcggctcggcaagtcggcaagcctgtgcatgcatagtgttcgacgaaatgcccgagagacgcattcaccctgagtttctatccttttacagggctgtcccaattcgcgaccgaggatagcctggcagaagctttctctcagtatggccaggtactagaaggtacatttacttgtaacttaccagagccgagcctagagcacactttggtttatacttcttgtcattactagtaagttggaaactgttcttgttcaaatgcagcaacaattgtcaccgataagatgaccaacagaccaaaaggattcggctttgtgaaatttgcctccgaagaagccgccaataaagcaaaggaagagatgaacggcaaggcaagctttttgaaacagtgtatttttagttcagcctaggccttgtttggaatgttggattaccacatgaacttcacaggaaaccccaaaatccagtttaagggttggttgtttctttcctagcaagttcatgtagaatatcagtcttgcaaacaaggccttagaagttagaagcacactctgtttttcctacttgatttgattaacgcaaacttgcaacaggtattgaacggccgagttatctatgtcgacattgcgaaggccaaaatgaatcgtactacagattccagtccaagagcgacaggtcctcctaagccacctgaccgctgttgatagcatgcgtgtcatcttcatactttcctttttatctgctgcacgagtagtctattgttagattgggagtacctaaaaccatagagagtaatatgaacgatattacaaagcttagaatgttgaatgtccagttttaaagttcaggtgctaatggattttcatccaaagtttatggggaggttattgggacttcttcctattattattgagaagttcatgcgtaataatactggatttccagttttgcaataaaagaagatgtgcccgatcaacagctcagattatgatataacatcacatgctcttgccgatcaaatactgtgccctttccttctttgtcatggacagtatctataatgctgtcgccatgaaatgatctgaaaagtgctgttcatatagttgcatatgctcttgatgaagctgtggtagaacagtgtccttcctccatgtctgtccagtgttctgtatggaactaataatgaattggtgttttcaagtactcctaacttaaacttcatttgatttccctaaaactgtggaacagtaccttgattatacggaaaacatgaattgtaatgcgatggacagacggcacatttttttctgcattcttgtattatttgaagggaaaacattactctttctttttcaaattgaaacgtaaaaaagcactactacatgagattggaacatgcgaacaatgtcaattctactaggcttaatgtcacatcctaggatcagctcaggtgttttatctcctattttaaatggatgataagcacctggccaatttttatagtttaagaataatgtaactacggtggaagaaaaatacacgcgagttctctgctcgatttgtacactgatgaagagaaggccacattttgtcctctctttttcctaaccgcagccgccgatcaccggagcaccacggcggcgacgaagctcagcacggccatggcgctggcggcggagcagcacaggtcgatgagcgcctcgcgtcgcgccttgctctccttcctccccttcctgctcttcacgaactcgtcatacctcctcttcgcctcgtcccgttctctccccccgcctatcctctgttcctccattgccgcagcgaggaggcggaggcttcgctcgccgctcgccgcggcgccgtcggcgtcctgcacggcgaggctgacctcgctgatgttgccggccccctcggagcaggtcacggtggtctcgaacttgcacccgcccagcaccaccgcgaacctcaccagcgtctcgccggtgtaccagtgccggtccaccgccacggcgcgccggctggacacgttcaccgctcggccgcgggcagggtcgacgaccacccagctcagctccagctccgccggagacagcgccgcctccgccgccggcttcttgcactccacggcctccacccggaacggcgagccgaggaaccacggcgacgacgcgggcgtctccacgacacgggagagcaggggcgcccccctgtagtagacgtccaccgccgagacgagctccgacgggaggggacctccgccgccgccgccgagctccccggcgtccgggcgcgggaacgggaacgcgtcggcgaagagccggcgcggcgggaccacggacagcagccgcgggtgccccgccatggacggccactccgcgaggcagagcgcgcgccacgtctccgggtccgcggcgagcgcccggagccccgccgtggcgcagctcgccgccgccagcgaccgcccgtccagccgccgcagcgcgcgcgccagcacgtcggcgtgcaggtcctctatcgtagtagtcgccaccattttctcttcttctctccctggcgccatcaccctctctctcctcttttgtacgatgaaccggtgataactactgcgcctccgccgtggtccggcttttatatagcactcctccttgtgtgccctactagtagtaagcgcggtgaactctggtcaaaaccacagccgtcctggctgcgacgtggtccagtacctgtacagtgcgttggtgtgtttcacaattttctttcgttttaacccgcatgccggtgtggccgtgtgggcgcggcttgcagtgcagggcgccggcgtggcagccgacgagaaggggtcggtggcgcgtgccagggccgcgctggcgcccgtggtacggcgcgacgcggctcgcctcggcgtatcatctcaggccgcgaacgcgtggcgcgccgtgtctcctccgtgccacgccgcggcgcgtctacctgactcttgagtcggtacgcgtcgtgcgatcggctggttggtcgggcgcaaccgcaaacgcaagcgagacgtgccgttcgttgcacttgacgtgacagagaaccaaaagaaaaacaggttttgtttccctgtgcctttcacggcgaccggtttttctggcttgatggcaaagcaaatctgttgtgcaccggtgtaccgtgtgtccgtgtatctgattcttaattgcgtttagaaggatatcgttttcctcgcgggggggagaaggccgtcgaacgatcggcacggcatctgcataccgctgagatgctgacgatgggggcggctcaccggcattaatgtcctgggagagtgagatcgagggctactggacgtgttacgtgtacgacggcttggcctgcgtacgtacagctaccgtgtgctgctgcgctgttgctcttgcagatttctcgtcaagaaaggcgcattgatacagggatatgtacgtccgtgtgtgtcgttcctatcctctcgcggtgacacgataagcctctcctaataattctttttagcacacgagctttctcctgatcttgcgattttctgcatgatctctcgttcggtgttcggtgaagcaatcaaaatgagaaacaaatgtggtaactttctgcttactactctatccatctcataatataagaaattttagagttatgcacagttattaagatggaggtagatggaaaaagtgaatgatggaggtttgtgattggttggaaagagaatgctggtgaagaagttgttatattttagaacaaattcaaagagaagttattgtattttgagacggaatgagtagtttagatgcacagcaatgctacgctgttgttctgtgattgtgcttcagctggggaaagcagagcaatagtattcagagtttagaactgtttatatgcataatgcaattttctcgcgctccatttttgaagttcctcagctttcaaagcctgggcgatcagtctgagcatgtcggtagagtcgcggtcatgattgccagagcaattaaactgaagattaaataaagtcatattggagtagattcagattggccccgcaataagataatcatatatatcctttgatttcttttctcataatggtttctgaagccttggctcggccggccgtcatgggttgcctgaactagcatcagggtttcggggcccaaatcctcatatggtcatatataactgcatgacgttgcaatatgtatggcaaggatctattttacatgggtaaatttgtttattaccgctgtaaaaatcacgagctaaaaaatacatgctactccctttatcccataatataagacgcggtcaaaattgacacggtctccaaaactaatctttaacctataattttccatgtactataaggttcctagccacaaaactataaccatatgaaagtaaatttaaatatcaatctgatataatttttaacaaataaaatttattttatactccattcgtccctaaatatttgatgtcgttgacttttttaaacatgtttgactgttcgtcttattcaaaaacttttctgaaatatgtaaaactatatgtatacataaaagtatatttaacaatgaatcaaatgataggaaaagaattaataattacttaaaatttttaaataagacgaatgaccaaccatgtttaaaaaaaccaatgacgtcaaacatttagagatgaagggagtattatactaagtgttagtgaaatattttaaatgctaaatctttaaatacgtgtgcgtcttatattataggatggagggagtacgtcattagtatgtagatccagagatccagcctttatatgtcattatcatgttacgatgttatgttacaactcgagtatctttaagatggtactaagttatccgattttacattagtataatgttttgagttaccatgtttttaagagaaaagatagttttaccaaagatttggatgctactatggtattacttccttcatctcagaataagtttgttttccatctatttgtcttacagagacgccatctttttcagcgatcattgcattagagtattgggagacaaacgtattgagatttgctaaagtggagaataattatattggagtttgctaaagtaagaacattctttttttttcctttgtattggcatgggtagaaatgggctaaaaatgaagtcttagtgatggagatagtacacgggaactgtctaaagatttcagattgcagatttcaggcttcaggcttcttttgtttgagaccaaaattaaccaatcaaaaaataaatgttgatattgccaaattatttggcttagggcttgttcactttatagtcacttttaaccttaccaaaatttggttatactaaattttaacacatttttacattaccaaatttttagtgctagatatgttttgtttgaagccttatcaagttttgatggaatttttacgagtggaaacttataaaactacgggcctgttaactttgggcctgttcactttggcattgccaaaattttggtaggatttcttatatagttaccaaaatttgacagtaaactaaatgtagccactttttttggcaactttaccaaaatttggtaaggttgaaaatggcatcaaagtgaatagaccctttgatgccgaaaaaaaaccttaccaaattttggcaatgttgtcaaaattttgacaacttgccaaaattttggtaggatttcttatatagttactaaaatttagcagcaaactaaatgtagccacttttttgttaactttaccaaaatttggtaaagttgaaaatagcatcaaagtgaacaggccctaccaaaggttggtagggtaacattaataagaatatgtataatttgttgccttacaaaaatttgataataccaaaattagtagggttaaaagtgacacaaaagtaaacaagcccttaccaatcaaaagcctagtcaattttccccaaaaaattagtaattaccattgtaaaaaagaaaaatggtaagatcacaaatggtaaagaaccatataagccctaattagagctaaagaatgcagctcaggaacatgtggcagtgatctcggcacaaggcatgtttcggagtaaaaacagattcttcaaaaaaataacttcatacagacagaaattcaacattttcagtctaaaaaataagaagatatttggagggagaaatgtcccttcaaacatttttttaagaaaaaattatgagcatgttaggatcaaacacaaaatcttggagttgaaattacataccccttaccgctccactgcactgtcaagtgcatctcagcattttagtctcacagagaaccttctgttgtgttctagactgagataattattttggttaatccaattaatcattatctcgagttacaacattttttctctctagagaaacatctccattttctcatcgtctcccggtttaactgcattattatatacttcctccgtttcttaatgtaaatcattctaccatttcacatttatattgatgttaatgaatctagacatatatatctatctagatttattaacatcaatataaatatgaaaaatgttaaaatgacttaccctataaaatggagggtgtaaaacggagagagaagctgttttctgcgcagcttgtttatgactcgcgcatattccttgtggacaattagtcattgaactaggacaagtctagaagtggaatcgtggaaagcttcgattaggtaaagaaaatgaatgtaggaacttcatctggaccaaatgccacatttgacatccaagttaagattccccatgttgtctcatgcgcgctcgcaagcctctcctttgcatgtcgccgtgtcttcagcggtcaagccgccttcatcgatcctctatttgcacgttgtgcagtactgaattatactataattctgattcagtacaggtgaagagtttttttaaaaaaaaactgaaaacagcactagagtgtcttttcattgaatagggcgtacaggtgaagagttagaagagtgctttggcagcacctccagcctcaagcttgtgatcccgtattctgagttaattccatgacctaaactcaaaccattcggctcttcctcttgtgtagtatatatctgttgacctgctgctgtcctggaaggtttgcttgcttttgtcaccatcttttcgtttctagcggtattgcatcgattgatccatctaatccagcatgttacccagggaaaaacttggctcgaatcagcggccgcgcgtgcgtacgtgctctttggtgcgatcggatctgataagagtcctggactctggacgtgtcttgttaggaaggaatcccgtcgacgaaggctgtttggtcggcgtcgctctcgatctcacgggctcactgtacgtagtacgatgcagagcagttcatctcatggcttcgtttgactgacaacgggcgatgatcggttatcctgtaagacactctccgccagaagctgtgtacgggatgggaaaactgaactgatcgctgatgtatcaggatcagtcgatcagaagttcaggacagatcggacgccgcgatcggtggcgcgtggaatcgacggagaaaattttggttggatgtcggtacgccccaaagttccagttaaacacttccacaccctcttgctctgtggctccgtgcttcagcgaccttcccatggtacgacggccaatgaaccgagctactcgtctactcctttgctagaatgctagcttctttccccgcttcaaaataaaccaatataaataataataggatataacctaggataataatctggatatcgttatcttagatcctctagattgttttttattatacattctaaaatatacttcctcgatcccaaaataagcgcatcaatttttgtgtccaactttaatcgtccgtcttatttaattttttttatgattagtatttctattgttgttaaattataaaacatgagtaatactttatgcgtgaattatgtttttagtttttttaaaaaaaattaaataagacaacgattaaaattagacacagaaattcatagttgcgcttattttggaactgagggagtagcaattttgcacacgattggacacattcaaataccatgaatatggataaggatgtatcctaagccgagtttagttccaaacttttttttcaaacttccaactttatcatcacatcaaaactttcttacacacaaactttcaacttttccgtcgcatcgttctaattttaaccaaactttcaattttagcgtaaactaaacacacccctagtatcatgaattagatagatatctattcatattcagatttatagtattataataagaccaattcagtactaagttgctttttttaagatggagtgagtatctcattagtcgcttgacgcatagttataaatgaacagttggtgtacttaatgcgaaatttgttaggaagcaagtgcaagctgattgcaatcagggagcaaagacatcgcgatgaaccattcagtaatactccgtccgtctcatcataatatagtgatttaagataagatgtgatattttatactacaataaattttgtcttaggttgctatatactatatccatctcaaaatatgtacatccgtggatatctgtgtccaacgtttgaccattcgtcttatttagaaaaataaaaaaaattagtcacacataaagtactattcatgtattatcatctaataacaataaaaatactaatcataaaaaatattaaataaaacaaatagtcaaacattgaatgaacaatgcaaaacattatttattttgggacggagggagtatattatgaaaagtaaccacgctagtgtgtatggtagccgcggaatgggctggccttcgggagttcgggatctttacggattggaataagtgcactttaggtctctctattcgtcgctcagtccgattttcgtccctgaactgtaaaaccgggtacaacccatcccccaacttacgaaaaccggacaaacgaggtccctcggcagtatggagggcagttttggccgacgtggcgtctatgtggctaatttgacttgatcttcatctgacgtgatattgacatggcgctgacgtggcaattcgatccagaaaaatattaaaccccgtggcacccacatgtcagtttgacacacaaattaataaaaaatagtggggcccacgtgagccccacatatcattctcacccttctcttcttcctcctccctccctctccctctccctctccctcccctctcgtggaggagttcagggccgcgcatgtgggcgcggtgccgggagctgcacgaccgagtcgtggcgtccgcgtccccttccctgctgcggcagcccgcgctgcggtccctcctctgcctcgttgccgtcgagctgcagctcctcaaactcctaaacgacaccactaatcaatggatagctagctagaggaagagctcaactgcatgtctgccactctgcatgcttatggttcatggtgtttatggttgggggttgaagccagcttgaacacatgtgtagtacttcggtcaactacattggtagagagtataattggactgagctgcgttggatggatgtgaagaagagcgagacggcacgaggcaagtagcaggtgatgaggctgcaaaatgagaaggaacatgagcaagtgacgacgacacagtcgtgcagcttccggcacctcgcccgcgtgagctccagttcgtcggagtcgggcggcgccgtggccccgaactcctccacgagcccccgcgcggggtccgcgccgctgccgtggaggaggaggaggaggaggagaccacggcggccggctgtgccagtgggagagggggaagaggaggccggcgagcaggttgccgccgagttgcagccgcacacgggcgggaacttagcgccgcaccccgccaacgacgaggttcccgccgttcgcttggctccaccgccccgccggcttcgggcgccgccactgcgcccgcgcgtccgcccgccgctgccccactccgccccgtcggctttgcgccgccgtccgcctgccgccgccccccactccgctccgtcgttgtccccggcgccgctgctatgtggggtgagatggggagaaagaagaggtggggtgagaatgacatgtggggcccagtggcccacgtgggctccaccattttttattaatttgtgtgtgaaactgacatgtgggtcccatagtgtttaatatttttccagatcgaattgccacgtcagatgaagactgagtcaaattagccacataggcgtcacgtcggccaaaaccgctctccataccgccgagggatctcatttgtccggtttttgaaagttgggggacgggtcgtacccggttttgtggttcaggacaaaaatcggactgagcgacaaataggggacctgaagtgaacttattccttacggatttgcgtctcccgcccgctgggttaagaacttacgacgagccgctgtttctgatcgtgtgcaacggtgaattggtaaagtctgctgtctgcagcgaagcccggtatcatgccttgtgaggtgaacgaactaggcgggccggtggctcatcacatccacacaagttatctacctgttcaccactttacctcgttaaacagctccagttcaccaattgcatagtctagagtctagacctcgatcacattccaaggtagtagcacgaaaacagagtacctgatctggaaaaacatagtgccggccatcgcctaccaaagtatgatttgcgggtacactactacgtgcagttaaacttgtcgaaacaaagatttcggtaatacgaaaaagggtggctatcaagctagaaaagtggatgggtttagagacacaggttcaggccatctcaatgagaagtaataccctactcctgtccggggattaatccaccgagtatattattgatcgtatgatctgggagaaaagttatgtcccaagagatactcggacccctctttatatagggagaggagtccgtattacaaggtatagcctatattcctaacggaataggcaaataaagataaaatacagtcgtaaccgactagaatcccgagtatttccttgatatacaagttaaggaatgtaacccgagtcccttaaagatattctacctatatatggcattccatatccagtcggatatacatgccgtgtaaatatggggtatccataatctccacaaaactgccatagtcttctactgacgaaattaagtttgcctcggtaggaactactagctgagtactcagcatactggacggcagaaacagccgtggcactggccttatccactcatatccaagtggagtctcccaataggccgctgcacgggcgacgaatctatttcatccgctgcaagtgatccacatcacgcgagcccccacaacgatccgcgcccgctcatcccctcccgccacgtccgcaaccgcagccaccaccacaaaataaggcctaacctacgctgccacaaaccacggagacaacacacgcagctcgccgaccagagacagagagagaccatctgctagcttagctgccatggccgcctccaccgtctccggcctcgccggcgccaccctcgcccgccggccggccttctccaccggtgcgtgcgtcacagtcacaatcatcttctcacgcgctataaccgtgtgtttaatttgatcttggaatgctcgatttttttgtgcaggcttcacgacgggcgcccgggtgtcggcgaggaacccgctgctgacgaggaacctggagaggaacggcaggatcacctgcatgacgtaagtagcagtagtaggatcacctgcaagaagaattctgagagcagcaagcgtacgtggcgtgagattctgacggtgcgtacgtggtgttgtgtgttgggcctgcaggtttccgcaggactggcttaggagggacctgaacgtgatcgggttcgggctgatcgggtggatcgcgccgtcgagcgtcccggcgatcaacggcaacagcctcacggggctcttcttctccagcatcggccaggagctctcccacttcccctcgccgccggcgctcgactcgccgttctggtcagtacctctatcttcttcaggcacgcagtatagtactcctatataattagtagcaaaagcgttcagtggctacgtgtctaattgttcatgtgggttttgtgattaatttgcaggctgtggttggtgacgtggcaccttgggctgttcctggcgctcaccttcggccagatcgggttcaagggcaggaccgagggctacttcgacaagtgaatgaatccacagtggcttttggttagcttgactgtacggacggatgtgtgcgctgcatatccttccttttgtatagggctctgatttgatcctcttgcggatgtacgctgttgtaattctcctcaactccttaaaactttaaaggacaaatatatgtgttgtggctaaatctttttcgcaattagacacagacgcacgcacaaacgacactgcatgtacagttgtacacaattacacactcgcacagaccaccaaaattactggaccaccaaaattttgtagtatcacaaaaccaacccatgtttaacggtatcgaccaataaataccataatatctgatatcatgtagcaaattttgccatttaacaaatatttaagaacacaaaattgattggtttgtaatataacctttctctttacataattcattgattatacaattgtcaaatattttagaatttgttaaatagcattattgaggagtaagatcctggctatagtatttgtggatgtagcgtataagatcggtataaggatatgcacgtagatgtcataagaagaaatgcaattagatttttacaagttcgaaccctcaatgtgagtaatagttctattcatgtttatatctattgaccgaaagtatcacactgagtatgatgtctgaggtgggatctctaatctagcatactcaactaaccttgactaagagcaggtacaatagcaggctataagccaactataaacatattttaaaaagataaagaaatagagagaatagcagtgggctacagatctgtagccagttgcagcacggactccaaaacataatgtgtgtatgatatataggatcagatattaatagtatagtaagcaactattgtatgaattggttattacattggctatagataatttagagctagtagtgggctatactattacaactctaaagatgcggcaacaatgcaattggcggctagctctgggcttcccctaaatggatttggcatgaaggctgtggcttgagatttgacgccctattctcctaggacgtggtgtgtctttataccggaatacgaccctggttcaagtagatcttgatcccaagtaggacactagatcttgtccatgaagccataacgtctatgacttgaactatgcaatctttccttgtgtgacgcgtattcactcctagtatacccctattcatagatatctttttgtgtacaattactccctccgtctaaaaaaaaagacaaaccctggtttccgtgtctaatgtttgaccgttcatcttatttgaaaaaattatgaaaaaaattaaaaagataagtcacgcataaaatattaatcatattgtatcatctaactacaatgaaaatactaattataaaaaaaattcatataagatagacagtcaaacgttggcacgggaacccaggtttgccttttttttttgggacggagggagtagataactacattccccgtaaagtaagtatgagtgtatgggatacctcatatctactacttcctccgttttatattataagattttctagcattttcaaaagactggaccgacatatcttaagattgatgaagtcaacacgaacatcttgctgtcgataggtatctcgtctaccactgaaagaataattagccataattacaaacacctgtgatatactctcttatttcctaaatatttgacgccgttgactttttaaaacatgtttgaccgttcatcttattcaaaaacttttatgaaatatgcaaaactatatgtatatataaaagtatatttaagaatgaatcaaatgataagaaaataattaataattgcttaaattttttaataagaacgaacggtcaaacatatttaaaaaggtcaacgacgtcaaatatttagggacggagtgagtaggacttaaggtctgttcagattatagccaaaataaacctagacatagacttattcaaaaattttggcaatattgtcaaaattttggcaggattttttatgtatttaccaaatttaacaacaaactaaacatagacatttctttggcaactttactcaaaaatagtatggttgaaaatgacatcaatctgaatagccctaaatcaggctggcctgggtcaaatacaagaaacataaccggtgagctattcttgaacgaacgtaattcaggatacaacatattgttttgattctacataatttataagttgaatttccaaaactcaatcaaaccatcaatcttcaaatatttcaattggatatatgaaaaccatgtgtagattttcttttaaaaaaatcgtaaacatgtacaaaaaaattctgaatttttacattagttgctcgtttgctactgggctagctagcagtctagcaccacaccaacatggctaggcccaagcccaactcgtgatccagtcatccatagtcgactcgactttgggttcgagcgatcgaaactcggtaacccaggcgaggcgaatccaaatgcgaccacccgctggccggcctccccgctcgccgccgccgccgccgcatgaccaccgccgtcctccggccatccccaccggtcgccaccctcctcggccgctgccgcaccgcgcgctgcctcgcccagctccacgcccgcatcgtccgcctcggcctccacaaccaccacgcgctcctcgcccgcttcgccgccgcctgcgacgccctctcctgcccctccgtcgccgcctccctcctctccgtcgccgtcccggtacgcctgcggaacgccgtgctcgcctccctcgcccgccacgccccgctgcgggacgcgctcgcgcagttcaacctcctccgcgggggcgcgtcccgcccggacgccttctccttccctcccctcctctgcgcctgcgcgcgcgcctcctccctccccaccggcgcttccttgcacgccgcggccatccgcctcggagtcgacgccgacctcttcgtccgcacggcgctcatccagttctatgggaggtgcggcgccgctgccgccgcccgggctctgttcgattcactgacaaaccccagcgaggtctcttggacggccattgtcactgcctatgtcaactctggtgatattttgactgccagggagttgttcgaccaaattccacaccgaaatgtggtgcattggaatgccatggttgatgggtatgtgaagtgcggtgacttggagggtgcaaggaagctgtttgatgaaatgcctgagagaactcctgcagcgtacacatcattgattggcgggtatttaaatgcagggaacatgggagctgcgagaacattgtttgataagctagaggaccgtgatttgttcgcatggtcaacaatgatatcagggtgtgcacagaacggttaccctggagaggctttgaggatttttaacgagttccaaaagcaagaaatatgtccagatgagcttgttattgttggtttgatgtcagcatgctcccaacttggtaacatcacattggcaagatggattgaaggttacatcatgatttatccaatagacatgaacaatgtccatgtgatggcgggtctcattaacatgaatgcaaagtgtggcaacatggagagagctactcttttgtttgaatctatgtcagttcgagatgttttttcatattgttcaatgatgcaaggtcattgcctccatggttcagctagcaaggctgtagagcttttttctcagatgctcttggagggcatcaccccagataacgccgcgttcacagttgttttgacagcttgcagtcatgctggcctagttgaagaagggaaaaggtactttgatatgatgaagaatgagtatatgattgtaccatctggtgaccactatgcttgccttgtcagtcttctcggacgttttgggatgctgagagatgcatatgagcttatcaagtcaatgcctggagaacctcatccaggagcatggggtgcattgctggggggatgcaagtttcattgtgacattgagcttggaaaaattgctgcaaagaagctctttgaaattgaaccggaaaatgctggaaattatgtctcgttgtcaaacatttatgctaacattgaccgatggggaaatgtttctgaaactagagctgagatgacaggaagagggataacgaaaattgcaggctgtaccttggttttgcagtagcatggttgagatgagtgagggatttattttgccatatgtttactggccctactggaaagttcagtgaacatctttctgaatgagaggaaaaaccatgtgtgctgtaatgctgtgcatgttgactcatgatggttatgagatcaatagaaaccaagagtttacactcaacctgagaatgcctacaataaatctggcttcatgacataaatgatgtgcttgttaacaagctgtatgggagttaataagaggaacgggaccatcttaagtagactgttctcttcggagtgctttgaattctttctgccgttgataccttatgagaaccagaggattccgtgacactggtttgataccatccacttctgttgctgagtctcatccactttttcaattgttgatgagacgactcccggtgagtgctcgcttggtcattcctaatcttctttactacctatcttagttattgttcatcaattcgagcttttttataatgtgatttctactgaactactacccatcatgcaaactaggatggttacatgggggaaaaggttgctgattatttgccttggcaggatcagtatgtgatgtggtatcctgatattggttgtcattaatcagaaaaaacaagtatatagctcttcaggtatgtccttaggattcctattatatcttggtttccatgtgtggcttgagcttcaatgccctcactaagtatgttcaaatactcagataattgtatccagaagtttcattttgaaacaaaggcagaagctctgccttaattcattgatatagaagaggcaaataacaactgtatatccagaagttgtggagtgcaaaattttggagttttgagcatcgtgcctcggctatacttcctgaaggtgagaactacagggttcaattagacttgctaactgaaagtagcacatagaatgtttgcttatattgccttcatgcatgcaataagtgtgttatttgcaggaaatgtgaaaaaccatggatgttattttgcatcaaaccaaacatactactgtgtgtctctaccttaccaaatattagcaatgccaaaattttgcatgacaagaattcgttagggttgatttgggcgataaaccaaacagccttattgtcacatttatgctttgaaaaccattaggtcatgtgatcacagtaaggatcaaggttttagttgattgagtttacgaaacattacaagagctcttcttttcttggaattacttcagtaataacataattcatttcaattccaatcatgtttcaaaattctgttgcacctgcataccccttttggtgttgttatcagccattaatgataccaatgacctatcaactcgagggcatatgctcacagaaatataaacctggaaaagtcaattatggcttgatgaagtctaatgagtaagctatgcttacagtaatatttcaggcagtttccattaaggcccacgtgtagcgtgtcacctctgggttaagaggcgcgatgctttcagattcctccatttggaatttggtttgcaaatgtggtaactggtaaggtagtaacatgtgctcctattaaattgtgtcccctcatcctagtcttaaacaaaagtgattagacttgttgttgagtggcgtcaagtggaccaccttctgcaggccttgttgctgtttcatctgcatagtgcctgtcacctgtgtggctgtgtgtgtttttgtggcccagcgtcatatcactgagaaatgtttgagctgaaagttttctgactgtacaacgctatgctaaatatacacatgtatcagacaatgaattcgctaacgatactgcacgaagtgtcttctataaaatgcaatgtcgatggtaggctggtagttatcagcttgcagtctcggacaggcactaccgccactatgttgcactatatcatctttcttcctgaatcttcaaatcaaatatagccagatttatctaagatctgtgcatggtgatgtagtgggatcattggcaagtcatgatgtttagtattttctgattataaaaaggatatcagtacacccatagatacatgataatacctgtgctcgaaggtttggtgtttgcatgtgctctcctaggtatatagacctcatctaatcacctagcctgttggagaacctctaccataggtattgcacgatccttattattttggtgtgtgaatctattaggctccgtttatggcagacaaacttatcttcatgtcgatttaattattaataacttgcccacgcattctgctgcaccagtgctcttccaggtcaatgagcttgttattaatgaaatcatgcgttgattcaaacatctccctatagcatttgtattagtagcactagggagtaacgacagtttgggcaatatataaacaatgccattaaattctcgggctatctggttggtccatgttagattcttagtgggatgtgtgaattgcagcactatgtctccgtgtgggcatgcgcacgagtgtatgtgcatgtcgtatcacatgtctaacaccacggtgcacgaactgaatcctggaacgttgtcccgttgaagttatcagcaattggagaggggaagctaattttgtcctgcttcttctttgtcagggataacaaagaggttatttgagcaagtacccgctgtgctgcgagtaagattcgagttatcagcggttgtttaggttggatctcaaagaatcaacatactggtgagtgttcatacaagttcacccttctggttgattaaatcatatgaccaattgttttgtgctagagcaaaccaacattgctttgcttaatgttttcatcaaatgtcaacttttttgcatttgtatattgcatggatacttctcagtatatcttctaaactttcaaactcagaagatattgcatagagataaatagtgagtatataagataaagctagaattgtacgaacaattaaatggaaataaataagatttagacttgtccttagagttgacattaggtctggactttgttgtcatgataattatggtggtattattagattttagtttttctttattgaagacatctatgaagctaatggttgtatttcaaaccatttgggttagtagttatggtttttcttacaatgtgtcagcttcttgcaatagtttagtcacaagttcgtaccatcattaaaatggagtaatcccttcacttaagcgaagattaatgcgatgccctgcactttgaatccactatcttttaaccaaagttaaacaaatcctattgcttaatgcatggttagttgcacacgcccgtgcgtgtgagcggagattaggtgtttgactcactgctgcagcgttaatgcgcaggatctttttaattaggattagaatatgatatttggcctaaacttatataaaagtgggtgttacaggaggccgtgtggcacttaacccccacggcgctgtgtggttaaaatattgaggagatgttcccttcgtgggcgggatgatctattgtctattctctcgatgcaagcaatgaaggcatggaaaaataactgccgacggccaactaggattgtgaagattttttttcctttttatttaagaactgtgaagatctttcattctgtgttttctatcgttcataaaacctgtagggtatgtgtccgttggaagttgcgatcgtctgtttcaaatatttgaacttagcttaaatttgaggtgtaattatcaatgaaacttgttcatggatgtctagctgttgaagtttatttgtatgaatgaaaccgcagttgaaataaaacttccttttttttttcaggaagtatcctaacatctcaaaattctgtctaccctttgattcttgcattttgtccatgtttatccattgcacaacctacagaacaatgaagttgtttactaaaactgctgctggtgacatcattttcgaaagcagctgttccttatggtggattttacaagtaatccatcacaaataaatgatttggaatagactctgaaatgcgaatttaactactgatttcaactatgattgatattgtgaaacataacaccgttatagtattatgaaaatgtattttaagacagatttgaacataccattttcatatatccttctaaatttataattatttaaaagagagtagtggtggtgttgggtttaccataagtccatcaccaactcctaaaactatgacatgtgaaacacatatgtccattctcaaaaccaaatataagtaatgataagtcaattgagtcagtttaaaattttttacagctatataaaacatctaatttcattccagaattaaactctaaattcaaaatagctttcttttttcaatgcgccgatgtgattttctatattctgtaacaacgcactggtattttgctagtattcctgcacattaattacacaagtgtatatactttgactatggatgtttaacctcacccattttcgactgcgtctccacatgtaatatttatagacactagaatttaaacctaagatagattcatatacccaacccgctactacaacccactactacaccgcaccacatcctcaactgcacactactacaccgcaccacatcctcaactgcacatgtaatatactgtacgcagtggtggatccagaaaaaaaatagtagtagggtctgagcaaactagataatgttacagtcccccctcctatctatatatggtaaaaaattttagtggggtcttcgtgggggctcgagaccccgccacccctatgctggatccgcccctgactggacgatgttgtcaaacgaatattgtaaagtgtacaaacttacttatcaaaagtgtactccctgtgtgtttctgaatataactatcttttagaattcaaattttgtgtacaaatataagcatttcttagagtcctactctcactactcagtctaatatctcccaattttatcttcaaccatcatcccacttccaagttccaactatccattgctttatttacagacactatagtttttatctccaatcttaatatgtactttctctgtcccaagatgtagacttttcacataacgtttaacaagtcatcttattaaaaaaaatataaatatcatttattttgttgtgtgttttatcataaaagaaactataatattaacttatacatttacatatttatactaaatttttaaataaggcaaataacaaacattataaaaaaaatcgatgacatcatatattggacagagggtacaataagcaatgtaaaaagtgcttatatttggaaactgatggaataggtagtcacgctgacaagtgacatggactagccatataagatccacttaataatacggcctaattaagccattagcatccgacatactcccatcacctctatccaattcaaacatctaagcgcgacacctcgcaagtcttcactaagcgagtggcatatcagcatcatctgatcatcagcaccacaaatactatatcagtagcacaaatatcagggcctccttcaggacgttcactgaaattcaactaactcccacgaaattcctataaaattcatgcgttccaaaagagctatcatagtattcatcaatacatacctcaaaataagacaagcaacaagagagtccactagaacagcagctggagtttaaaaagtaattaaattgtgaattttgccaataacttggtaccttatgcgaaatcgcaatatatccaactattttgcattggagctcattgcctttgcaaccacaacaagaaggcgcgagaaaactcagtggagattatttttcactcataatctctaattaagctccttagatgccaccatggaattaaagaagagcacatgggtttggcccccatacaccgactaatggcaatatatacgtgcaaagatacatttatataccatatcctgtactaagcaataacctagtggcacagttatgagctcgcatttgggtcaaccttgccttcatagttgccttcaactccgagactttacctgcaattttagacgcatcatcgatgaatcatgatgaatggtggtgaaatattataaaatcaggtaaactgaactcaaacctttgatcccgaggccgatagcgttggctctggatcccaaaaccatccattactgcttctatttgcccaaaacgggagcattaatgctagaattagtcctaactgaggcaaattattttctctacaggtggctatctcttaaccttgatgagtagcagcattgaccaaacccaatgcaacacacaaaccaaaacaactttaagtgagttgtatgtcatcatcattaatcaaggtgggatatgtaagcaatctcggggattacattagtgggttgatactagtatgactttacaaagtttaacccttttcttaattgtaaggtgattaagtcacacaatcaggatgcaacatctccataacactaacaagtcaactaacgaatttaatatctgctctcggcatttaaacactgcaagctggaaacaagaaaaaccccaacggagctgagatttcaaagtgctgctcttatgtgcatcaaacaaagtggcattaatgtattacttatctcgtcgtcattgtatcaagatgcgcaccagaagcaacgcatcggtgcgtgcaagaacataggtgttgcgttgcaccatttaaagacctaattgcataaggtgcactagcagcatatctattcaagaaacctatttattcgattaacataaccatggctcaacattcaagttctctcttctctccttttttttttgacagcaatgctgggcatttgagatggtgtgcccaataaattccattcaaggccacattgaagtagtgaaatgaattggaggtcagtcaaatttctataatctttagaagcaatcaaaaaggacaaatagttgatgagtttcaactttcaactccacacctaaaaataataaataattgtcataattacccaataagtccagctaacttgcttacatggccactacaaagttgtaaaatctactggaggtaattaagtcactagcaaacttttggcacaattaaactagacatgcctatcatgggttacaattttcaaccaggctcactgttgggagattgccacagtcatctagcatgtggctaaagaaaactaccgccgaagtaagaaaaaaaaagagaagattcatcactggaaattttcttctttcagataaatgaaaaaaaaacatttctttgccttgtgtatatgaccaaccataaagcctctcacctcgcacttctctcccacccaacacagattattcaacccctaccatgccactctccagccatgaataccttggtaataaaatgcgtccttccttagcctctagtacatgaagtagtagtagtactgctatactcttaatgctgcattaaagaaaaccaattgacctccccctcaccctcacccatctcatccccctataaatacttgccatctcttctccgtccaaccacaccacccagcaagaagaccccgagcaattctacccgctcggagctcctcccctttcatcgtctccaatcaccatcatctgcacgtctcaccggccctacgcaacagtaagttccttcgccatcgccatgtcttctcctacctctaagcttcatatgacagtcgtgcaaaagtttccatttgaccaaccggctaacgaacgtttttatgggggtgtaggcaagtgggttacctctcgatcgggatgagccgcagcaacaagaagagctctaggggcatcgacctgaagctgaacctctcgctgccggcgagaggggactcgtcgtccaggagggcgatggccgccgacgaggagtcgtcgccgagctcgtgcctgtcgtcggagaacgagcacggcctgcagtggtccaacagcccggaggcgacgtccatggtgctcgccgcctgccctcgctgcttcatctacgtcatgctcccgcaggatgatccgcggtgcccgcagtgcaagagccccgtgatccttgacttcctgcagcaggacaacggcaacaacaacgccaacagcaatagcagcaggaagaccaggagagggtgaagttaaacaaaagggggggcaattctccgtttggcagaagatcaacatcaatcaagaaaaagaaaagcgtctatatgaagtcctaggtccagtaattctcttttgttttgcctattcccccagtgtaaccatgatatattccttactaaaattgtgagactagcatgaaaatccatgtgctggtggcataattttgatacatcatggatacactggggactatatccatccccctctcctggcttccttctttagtggttctaaatgaagaagttttgcttagacataggaccagacttctcatctttgttttgtttttgtttcctttccgagatgaaaagaaaacatttaccctgaaaatgttgagatgattattgttctgaatcacatgatggctttctatcaagctcatgaattctgactcgctgtgctgtttcattagacaaggtaatctagtcgagcatagaaaatggggaaaaaatcacagcaagaacagtcaatcacataaatgggatgtttacgagtctgtcatcacaggttagctgaactaaccaattggtactgctgctcccacgttgcaacataatgaggtcgccttccatggacactctactatctctgaaaaagacattatgtaattgaaaaaggtatgcaattttcaaattaggacgagatatagtatttgaaattgttgaaaaaaacgctgttgatgatgccatgcaatgaatagcgattaattttggcatccgtcattcttatctcttcataatatacatccatctgaaatacgtgctgtgtgacgcagcaacctaccttaattgcttctctagtcaactttgccaagctgatatatttatgttcacttgataaagacatctcagattaagtccagatcttcataatcacacatagagaccagccattctacaagttgattcaaatcatatcagaagggcagagagcaataacaaataaagatggaaaaaaaatgtgcatgaaaaattagatgtcccttggtccctgttgactggtaacggcaaacttgtcaattttattcatcaatcaacgaaaacaacagtgtctctagctgtattctagtattttaatgacaagacaactgaaaaggaatggcccagccaataaaatacaaaactgaatggcaaaaagattaagaaaaggtaactagaactaaattgcaggccgaatatattatgacttagcctaaaaaaaatgtggctaaccgatataattgatatatttgtgagattacttgcactcgccttgtcctgaacaactagaggacacatcatttaaacataaatactcctgcaacataaggacatagctaattgcaaagaattgcaataccagtcaggaacccaacaatgcaaaacagacaaagaaagcattacccatggttctccacttttgtggaactaagttcatggtccaaaaatagagtaggcaagagaaacatgagatcgaagacaaatgaggcttgagggggtcactaaaaacagagataaactgcatttgtacacttgtgttgagttcatggatctcctgaactccatagaaaatcagcattcagtatgcagaaaacgcaagaactggtatattgatccaaaaatgctaaatcgagtgcaaattacgaagctcaacaaagtctttttttttctttcatgctgatgcacttttgtctttcggtgcattcttataaaaggaagaacaagcagaatatagattccatcctaataccagtaacagggatgagcatgactgctacataagcatagagaagaccagaaatgaaccaatgagcattcattctgttgctctgttctaataaactttattagcttcctattgtgggacatcatcaggacaacaccttcaacactgtaaattggcggaaaattcttctgaatcatggagctagcaaaagtgagttatgacatcaccaccaattgtgctcaacttgtgcaatgcacacaaccgaaaaagtggggaaaaacattatgagtgcccatgaatattcgtaaggcccatacattgaattggatgaatgaatagactcaacattaccacattacgaatatgaagagtccgaatatcaatgattgaagttgtgtcgctgtatgcaatacagcataaacattccatctccaaacatctcaaagctagacacaacaaaatcaagtttcacaacttacagttcctggttggataagaatgaatctttcagatgaccgaagaaacctgcagcaatccaccatccatccagcaggatctatggtataacgcatcaaaattggttaaacgggcatacgaaagcgactccaaaacgtcgaatccaacaaaacccccagatattaccgggcaccctcttttctactacctaaagctaaaactaaaagcaactcagcattgacccccaaatcaaaattttaggtgaaaaaaaaaacctgccctaaattaccgcctcggatcggagaccaaataacacggcgctaatccggaatcgcccgggactcctggagcaagcccatccgcagaagaatggctactagatggagttgcttgctcgaattacctagttagaagaagccgagaagacgagcacttccgcttcgattcgtcttttgattttcgaagcgaaaaccccaggaataaagtcgattttacggtttccgccctagggctttcctttcaggttttgcagagctcatcatgggcttttgattgggccgggccttgtgagcaatagcccaactaatagagctaataaatcacgtttttccgcaatatgtactatgtcaatatgataaatgatcctgcgtttaattttgctttttgtcgctgctaagaacatatagccatatttttttatgactagcaaatatgcccgtgcgttgcaacgggtgaaaaaatgtaatgataatatacatttttcatgcataaccatgttgatgacaatcaaaatattagaaaattggaatatcataaatataatagcccaacctcgatgatggcaactttacgatatttgctttaccaaaaataattggattattcatatgacaacattcatataatctaaaatatttttttaatttcattattgcaaataatcaaaatcctatactgcctcacatggtcaagtctacacaaaatagagtcaccgtgcactcttctctaaataacaattaaaatatgtttattttctaatattatttccatataatataacaaaacaaaagccgtgtaggagatggaaaaaaaatcgatggatcctatttgaccaagcgttcatcaatttagcatttttttttctgacagttttttcctcgtatgattttttttatagacgatggaaatatttttttctcgcatgtttttttacaaactactaaaaccttttttctagcgcgtttctttttgcgcttttttttttacatttttttcctcatgcgtttttttaaactgtttttgttttctcgcgcattttttcttttttaatatacgatggaaacttctctttttagttagattagattagattagatttgagatagagaagagatatatatatggaaaactaaaacgacgaatagaaattagacttttttgccgcgctttttccgtcctttttttttctcgtgcgtttttttacgaactgtttttttcgctactttcttatagagtcggacctttctagatgtttttttgggtttttttttattttttaccgatttttttttgtttttcactttacaggaatcagacttttttccctgttgtgggaatcggatctacgtttcttttttgtttttttttgccaggaaatggaccttttttttgtttttcctgttttaggtgggaatcggatctgtttttttaatctacatttcttttttttcgccagttatcggatttttttttgctttttcccgttttaggtgggaatcggatctatattttttgccagggaatcggattttttaggttgttttttcgctgttttttttatattgacggacggtggaaacaagttaaattttttaagagaaaaaaaagtagtctgaacataactaggtagaaatatttttcttagcaagtctattgatgctgcttgcacatataaaatcttattgctcctatatatattggtgattcaagatttttaagttgaacgtgtgattccaaaacatgacgtccgaacaaaaatatttttatatgaacgatattcccactggtcataaatatttaagtttaggatgaaacttggttacattttaaactttgaccattagtaacttctcaaattattagtttaaaagaaaaggcaaaaaattgtttagatttatcttgaaaagtactatataaacttataagattttagaaacttactatgatataaaactgatggttattttttaaaaaaaattgatcagatcatgtcttaaatgtcaaatattcatttattttccaaggacaaacataaactgaagtttttttaagaaaaacgaaacgaaagatcaaaatgcaccgaagttataaactaacttatattcttgaaagagttgagaatgctaaaacgccttgcacttgtacagcaaggccttctgttgaatcctttgaacaatcaccaaatcctctgccattcctctatatttgtactatcgccgtgtttaggtttcaaagttgttctttaaacttccaactttttcatcacatcaaaacttttctacacacacaaacttctaacttttccgtcacatcatttcaattttaaccaaacttctaatttttgtgtgaaagcctatattcaaaagaagcatatgcaggagtcacagggactgaaggagtatataggagtcgaaaggagagagtgtgtatggcagtattgtcctcttccggccaatccacacacctatcagcgacctgtcaactcgtagcacattcacacgtggcagatcaaatgacacgtcaacttcgcagcaataccatcgttcccggaaaataacaaaatgtaatcatagacaatatctcacagtgaagaaaatgattctcgacaggatcagttagctacagggcaagcaggtcgtctcactctccctgcaacatgtgaaggttcgccatgaaaaaacaatcaagctatcattgacatgcaaaagacaggaaagagaaaaaaaacaatcgctcacaaacctacagctacaaccaccgttgatttgtttaagtcacacctgtcgggttaagttcttcgtgtacatttctcacggtgatcaatcacgcagctccctatgtatatgtatgacaagttcagtgttcatccaggccaaagagtagataattaggcagttatttgatggtgatcatgcacgcatgcctcctgtttcgatcatggattggctctaaattccagccactgtcttgagcgattaaacatttctcgaaggtgatgatcaatgggaatcccagggtgatacattgatgctactagaattagtatgctgtcaagtgtccacgcaagaaacaagcaaggagtcaacttcgcatgtgctgatggagaattactgaatcagttgctaatttactctgttcttccgtagaaattctagctgcagtggagaaatggtaatttggtatagaaccaaaagttgctgttacatatgtcaagagatgtctgaatcttctgctccccatgctccaaatctgcttcccataactatgtgcagcataaaagggaaccacctgctctttgtccttttgcgttaagtaaattcaggcattctgctgatgcctgatgcatcttcttcgacatgagaggttaatgatcaaaatgccaacaaaagtctcaattattagctctgttttttttactcttttaataagatgccatcgatccaacaacacacgcattataaggctctttgctcctgaccctccataacatgaacaagaactacacaatcaagaagaagagcagtcgctacaagagaacaagaagatggcttccaaacacaaccaagaacctggaagaaattaaggattaaagcaagatggccatgtaggccatttttattgtcggtttataatttgcctcagcctttctttcccccttttttttaaggggacagatcattaggccctgaaaagtgcaggcactgcctccctttaagcactaacactttaggtcaacctttattagcctttaggatccactttttgttgaaacaagttgatgcatattccaaccttttcttgtcctaaggtacaggagaacctgataggggacatcatgtcacattagggggaattcatagccattggcccctctattttgtttctgtttggacacaagttatctctcaaagttttgttctcttgtcaaaggataatcttaaatttgcataacctaacattgccacatgtgggcgttggataactggcaaactacaagttttatttataatctactattcaatgatagaaaaaaaggatgatccagatcaaccgaatggtagaacaataatgccaacatatgcgcttcattgtagtacgttggactctcaatctagaccatcgaatgcacgatctgacggtcgtctacgccccatgaagctagcttctccacgtgcagttctccatctttcacacgacacgaaacttactccgaatcgaaaacaaatactcttccatgtattttaagttctaaccaaggcacgaacagacaaaggcttttccttctcaaaagatgcaacggtcgatgcttaattaagcaatcaagcttaagcgttcggtcttgagaacggtgacacgctcgcgcgcgtggaggttaagctcgtctcgaggggagctaagcttaagccaccaaaaactgcagcaacccaagaaactcgcatggttatttgcgaatgatagtacaggacagggagtgtggcaactatgcgttgtttatttaaatcagcagagagagagagagagagagagagagattcttgttttttcatatgacatgtttcaaatttgtcacattgcccaacccatgattgtctgtgatcccttctcactcctccctcactcaccaggtgatttgaaacccatccagttttgatcaacagaaagatacatccatgctgcacttccagctcgtcttctttcttcagatgaatgtttttctggctgcaagtcttggccataccagggtctttgcagtctcccagagcagagcagaaaaacataaatgtgacatcttacaacctgctacctcgcattcaatagcttgcagattgtgccaggcacatctactagtatagattttctttttttttatctctattttcaaaaatccggcagggaacagtgactgttcagaatgaaagtgaggttcagaaagtgatttgatcagtttccaattaaaaaaaaaagagaggatactgcgagcaaaattcggaagagatataaatgtaagtgctccaataagaaacggagtgcaatccaaaaataaacaatgaacccaatgtgcattagacttatgataacaacactgcaccagcacagtgcacagctattagatttgatgctgttttcttttcaagtatttgcttatagcacaaagccagaaacagctatcagataaaatatcagaaagtggctttgcaagacataaaaaataatcaggaaagctgttgatccagccagagagcaaggaacatgatgagcataccacaatcctcgcagcagacatggctatctaaaaaatgtcagttgttaataagctttcctccaaggacttctaaattttaaaatcttctatatataactgaagattaaattgcaacgttaggtggaagccatgcttttggcaagttatagcatacaaatgttgcggtggttcacaggttgttagcaccaaactctaattttcttctgtttaaggttatgatacagtattacagtgcataacagtatgcaaactttgaacagagacggcatatgtgttgttttctgaactcgattttgttttcttcataaatggacactgcagataataaatatttaacattcatagataagatttagttcaatttacggaactttgaccatcaacgacttcccaaatgcttaatttgaaaaaaaaaaggtatacgtatatttgaaatgtacgactatcataatgacaaaaattctttatattttgtacactcaatataataaattattagattttgtaaacctattataacaaaagtagtgattacagtttttaaagttttgaattttatcctaaatatccgagaggagtacctaaaacgcctattttattttcaacggcaattaatggaatgaggggtatgtttctagatcaaaatcttgtttcaaaaaccattagttcaaggtgttctgatctcttttttttttagcagcggccacaaaattcctaacttatatcccaatgatgtgtacgtagttaatactcctttcgtctacaaatataaggaattatggattcaattttatctgcaaatcctatatttctataaagttcatcctcaccaagtgtagttaatgctatttttttctcattgagccacatcatcttaattatttctaacccttgaatgattgatctatggttcaaattatgtccctcctttccttcttctaggaaatcatatcatctttcttttgtctttggatgattattctatatcatttcccttcttttcattccgtcattgaggtatatcaccttagttttgcttttgaataatctatttatatatgatttacattgttataaaccatatcattttaattgtttataactttttttcttccatggttgatcacagatgaaaattatataaagtatataaagtgatgtcgtgtagctatatgcatgttatttatactattatcatatataactcccacagcaactcgcggggtttcattttgaagtggagtactattttcccatttcatccaaccattgcatttattgctactaggcatgacctttccattcaattaaactcacatggaaattacttcgaaagtaatttcacctcaacacttaactttgctaaccaatctagagtctactccttatatttgtagatggaaggagtatcatcagtgatgatgagtagaaacactcctttcaagtaaatattacagtactattttttagccttttaatggtcatgataataccattttttttctactctctctatccacaaaagttacacatattacttttgacaccaagaccaataagaaattaaatcacattggatgttaatcaaagagcgaatataaacatgcaactaataagtatttagatgactccttgagttttaatgaagcatgtaatttatctcttcatttaaatcttgaatatataaagactataaataggaacaatttatttagaaaaacttaaatgtaaaatatgtgtaacttttatggatggagaaagtaactttcacagaaggtgcagtaagcaggtacagggaccatcactcctcagtcaaataaaaaagaactaaaattgatgctgagaaaatgaagcaaatagtggatgggggagtgaaaggccaagtttagttccaaaatttttcttcaaactttcaactttttcatcgtatccaaacttttctacacacacaaacttttaacttttctgtcacatcgttttaatttcaactaaacttctaattttaacgtgaactaaacacacccaaagacacaccacatcaaatcttgtgctagtcattggccaatagaccattcaatggcggtattcaattcctctactgaaaccctctccaaccctctcgtaaatgtgctgcaacctcctctttctcttctccctctctataaaacacaagcgaaaataaacgccacgccacgccaccgcctccgtcaaacacggcggcgcaatgcctcccctgaaccctccccacctccactttggaaagctcaggaagcgggcgcgcgccgtggccgccggcggcggacgccagccggctgctgccatggccaagaaggggctcgttggtatcctgtacaagctccgcgacgtgcaccatcgcgcgccgccgacgccgacgtcgccctcgtcgtcgtcgtccccgcactgccacggccggcatcagctctgctacccgccggcgccgtcgtcgtggccgtggccgtcgtgccggcacccgcgcaccagctcgttcaggtggccgacggcgccgcagcaggggcaggcggacgacgacgccgccgccgccgccggctccgtgtaccgcaccgtgaacactgtctacgacacgtcgtcgctggagcacttcaacccgcggcgctcctccctggacgaggcgtcgtcctgcattgctgaccggagcttcttcgccgtggagtcggaggtggaggtggaggaggagaaggagaaggagaaggagctgcagctgcgtgagacggccgtcgtgcgcggcgtccgctcggagcggctctttttcgagcccgccggcgcggagttcttgcccaagcaggtaatgcggcgcacgtcgcgcactacgattaagacgcgcgacgacgcgagagcaatcgatcttgttataacacgagagaggatttcaggaaatggcgcgaggcaagaacgacgacgaggcgacagccatggacgtcgtcgctcgcaagaacgacgacgtcgacgaggcgacgccgatgaccacgccgcagaccggcaagaacgaagcggaagcggcggaggccgccgcgctgaagggcggcgcggtggtgctgacggtggagtcggaggacccctacggcgacttcaggtcgtcgatggcggacatggtggcggcgcacgggctgcgggactgggagggcctggaggagctcctggcgtggtacctcaagctgaacgccaagggcgtccatggcgtcatcgtgggggccttcatcgacatgctcgtgagcctcgcgtcctcgccgatcccgtcgcagtcgccctcgtcgtcgtgcatcaccttcgaggactactcgtcggcgaccatggaggaggagagctaattaagctgttctcgaggaagacgacgaccacgttttgtttttctttagcctcatcaagagatgacaatctctttttctctttttttgggtgctaattcttttgtgtttccacgaaggaatggcaagtgagggaattattgtacagttgctaaaaactaattgatgctgatcattagtgtagattaattaattaattaatgctgagatggctaattgatcactttgctctgctgtgatctctcttcctagcgtagtgtgggtcaagatgtcaaattttcaatggctgacaatttttatcacaattttgtgaagattttgatgacaagattcagaggaatgatgggtcaaaccctgttccttggtctgcaggtccatgaaggcaatgcaggttatctgggatatattaatgagtcaccaacagctcataaatatgtggccttcatgccattggtttctttggagtaatgcggtaccagatgattttaatccaagagattgcaatgttatcaagctgtcacgtactctaccctgcggcaagtattagtaattattttggtcacattgacagggggctgtgtgtttagttcttttcaaacttccaaaaattctgttacatcaaatgtttatgtctttggacacatgcatagaacattaaatgcaaacgaaaaaaaccaattacacagtttatatgtaaattgcgagacgaatcttttgagtctaattacgccataatttgacaatgtgatgttacagtaaatatttgctaatgacgaattaattaggcttaataaatttgtctcgcagtttacagacggaatctgtaatttattttgttattagtctacgtttaatacttcaaatgtgtgtctatatattttaaaaaaatttggacagggaactaaacacggctagggtcaagaaggcactatttgaccactaattcccattttctacataataacataatatgttgataaatatcagattttaaaaaacgcacactacataattttataacgaatgtaggaatgctattgtcgtgcagccaagctagacacggtttatatactatggtcaaacctaaaaagctgttaaaccacatttaattttcgagatgttttacaatggtttttaatgaaagtagaattaagttagaccgtttattttttttctaattcaacagatcatatatatttatactaccatctctatgtagaattttttttactgctactagaactcatatatcaacgactgagataattttattggtgattatactggtagtaaaatgctatagtagaaaccgcttcaaagattctggtattttggctgaaattattggtgtttagttggaagttccttccaaataccagttgatgaaagttggatttctgttcagtttgagtaaaaacatgttgaaatttgcctcgaaattctacaagaaaatgtctgtttcatgagaaatgtttggccttggattcttatctaggatatccacacattaatccacgcacatattgcaagcatgatacttccattttcgcgagcatagtcagtacaaacactactaggactgtttaagttttgtccatgaataagccttacccacagtcctccacgatcataagtccctttcagtgttttcgacttgaatgcgtcgagtaataacacagtgggtccatgaatttatcagtgcttatcatgaagcttaactcttacggaacaggacagactagtaatatcagctaggccccggcagagtccttttaaatctactactaaatgactacttactctaatcaagcctcatgttcagcagtcttcaggagttaccaggacagtctaatcaagggacaagagtttttcactgcctggagtagagactgcaaatttggtcggtaaagtttatgtaaaatggagtagtaactgggttatgaaccttgcagaattcagaagccatttgtgccatttgtaggttagatcaagcagaaacatagtggaactgagtgccatatcttatcttagcttagacaacactcgtagtagtagctcctaaggctagcttaagctttgtccctaaccaccttgtgaaacttaatttatgatgcttaaaggttcaagcattccaagttgttcttttaccctgcaacactgcaagtttgcagcttctagactgctcgctgagacatgttcgttcaatcccagtaaactgtaggctcacaacgagcgatctttgcgtctctattcttaggtcagattgacatccaacgctggatcatgcaacgcatggataccaccaaacaggaacacattgtgcaatgcagagcacttgatcgatgagacgtactactccagagtccagacagatttaagatcgaacagggtattaattacttctgcaattctgcatcctcttcactgctactcctacgtccgggacagcgatcgatcgatcgatcatgcatgcggctgatgcatcacatctcgccaacatgcagatgcaaacacatcaggcgtagcccaaccaaccggcaactacaagcatcgcatgcatgccaatccatctgatcactgatgatttacatggttcgcgtatctttgggatcacaggcttcgactgttttttcgcagcatcttcagtgggtgccgttttttctgtagttcagagatgataagcacagtaaacaggatgtgccgtgttcctgttcaagagatccgggcatgttttgcgctagtggagtggatgatgattgtgatgcacaacatctttgactatgaattgcagatttgcaggttggtgatgcgtgatgtacatacatgtggttgtggacggcataaattggaacttctctgttgtggatttgtatgatcagtcttgtcttgtggaatcatatgctttgtgttttgtttgaaagttgtgttgttattggaaagttgatctccctggtatttctcttttagattttgtttaagagagtcagagtgaaagaaagttaagactcaccgttttctttctttctttctttctttccttttgtttgactgaagacaaaccttcttttttaactgaagactcaccggtttgttctttcttggtttgcctatagtgcgatcttcaacactgaaaataaatcatttcttcactagctggagagataaaatgaacttgctccttcttctctatccatagtaaaattcaatccttaaatatgaagtgctaatagtaaatatacagatggagctgaaacatgtagtgcatttctgacggaggtttctgaagatcgctctaaggagtaaggagtgcatcatcgatttcaggccaaattgccaaggcatgctcgttccaacaatgttttgaccgtttttattttcagatcaacgaaaattgtgccggatttgtcacgttgttcattagcctcgcttctcacgaacctgacggaagtttcagtgacagggggcaattatctaagcctcccgagcccagcgccgagatcaaattgactaactagttaatttcccctgcttccttagcagagacggtcagacttgccaaacccaatgcacaatgcaagctgcaatattgcaacacacgagtcacaagatgttacagcatagttgaaactctcatcaggatttttagagctaaaagatatctagtggttcctgctgcaactttgacagggttaagttaagaagataggagcaagtagtagtttggatttgctaatttagtcgcctgatgcagcacatacttgcaaactctgcaatcgttagagatctgaggaaagaaaaaacaatgcattatactccggttctccttaaatctacaacaaatcgataactccgtagatttttttttgacagttttagtgctgctctctgtctccggattattactgtggattattttatttatctattctttactattataaaaattgaagatatttttgccggtattttggtacgtcatccgtgtatgaattgatttttaagtttgtttgcttttggaaatacatatatgtatttcagccggtttttaagatcgttcactttcggtaatacagagggaatcacataagaattttgtttaaaaaaaactcatatgctaacttgacattatcggactcctaactgtagttcatgattttatatatatatatatatatatatatccaagcgaactcccacagtaaatttcatcttaactaaaccatataataataataagattaaaatagactttacccattgcaacgcacaagcattttttctggttataaaataaattaaatatgttgaaaaataaatttaatatatatagcttagaacatatcatctaagtaatacagtagaagattgtgttttaagaaaacatatttttagagatgatgaacaagtaatttgcaacggcattaatctagggaaatgatatctaagcgaaaaaaaataaatagcattaattgtttgttgtagctatagcggacttctaccactaccactataaggtaggggatcaaagatagtctattagatcttagcggtcgctatagcttagtgactgttatagcagtaaactattagctttgttgggttgttactgtacttaaactacgttctctatctatggataagagaatttaacgccatgtgcctttttatcatattcattaatatgttatttataaattttatgctatgaaatgtataggtaactagatatgctaaatttttaaattttaagtgaattttgacactagtattaatatataatctaaatgtatagtaatttttaaaattccgctattggaacttagcgcctagaaggctacaatagcaccctttatcagcaaccatctactcatacattaatccgtgaccatttgctattctatatttattaccttaggtgtaagcatatttatatttgtgtatattagtttatgcatcttctatttaaataaaatatcctatgctagctttttttttcctttggaaacttattccgatactagtattttgttgaatccaagctaggtagaattattgagatgcacaaccaacaagccaaaacagaggacattcggagtatcagcccaataattatcatctcaccgtcaccttttagcaggtttagtgtcacatctcctcccagataaaaccaaactaaccctaaattattgatcctaacaaagctcacttttttttaggctttattgctactagtatattcgcaaatcgcttgctcgatccagttcatcacgagtccttaattcggtgggccccactcgtcattgaccatcaaacgcaaccggacaagggcaaagccgtaattaccccctcccaaaaccgccacgcgagatacctaccgccagagagcggcggagaagcagccgagcatagcagtctgaaccctccaccgaagatgatgtctatggcattagctatattgtcacttttaacttatttggcactatattaattaagagagagagtgaaggaaggaagaaactgggtctcatgcaagacacagcttcaacacgagaatatatgcactagacactatcaatttttgtattagaagagaatagtgtcttcataatagatgaagaataaatatgattggtagagaagagaaatgatgtatttattaatggtccactttaagaaaccatgggttgtagagtgtagtttctattgtgatgtcttattgacatggcaccatagacactacttatatatactatgggttgggattgccctaaccacctgatttgccttgtcctcagctaaccaccttgggcaagtaagcgagcaagtcagaaagccaccgaacagagcaaggtcacttcacgccattaccttcttctctccaagaactcgagtagattgggcaggagattaagatcctggccagcttcgtctccaagaattcgacgctctggttcaggatgtcggtggaattcctgacgaaagcgctcacgtgagtgtgccccccctcttcccgctcgccaattctcccaattctggtggggatttccggtgccgcctcgccggcgccatggcccatgtgctatggagattattgattcatctgcttgattgttgggtgggtgcagggcgctgttcgggtatgctatgccggcgttggagtgcttcaaggcgatcgagcagcggcctggtcggacggaccatctccggttttggtgccaatattggtactgactactgactcagaaaccccttagcttggagtaattagttcatttggtgtgttcaatttgatctctgggtgataggctgatgcttagaattcgtcgtaattgagtgaattgggtaaaccatacggggattaatttctgctatctgggtacagttagctggattagagcattagaattggtgctaatatgttactgcattgctgtggaattcagtaccaaatcctcactttcacctttctgaagtgctttgaatattggggatctgaaacaccgtatctactgtttggagatctgaaacaccttgcaagagttgaccaatttcagcaaatcttgcaggatcatactagtaatcctcgtcatattcgatgatatcgctggtgtcctcacctccaagtaagtaataatcacacaaccacaactcatcagctgttcctgtaatctgctccctgtaacctggcaatccccttcattgaatgacaggataccaatgtactctgaactcagactcgccttcctcgtctacctgtggtacccccagacaagggtatgtaatgctatgtctgcaacgcttggtccagcaacaaagctgcagctaactgcatgtcctgatcattgtctgaactaaacaagatttgccacaaaactgcagctgcacataactgcatctcctaatcatatctgaaattctgaactaaaaacgagatttaatctaatttgcaacactgagtccagcaacaaatctgcagctgcacaaaaagtgcatctcctgaccacgtctgaattaaataagattttgctttgtcactctgaaccagggaactgacatcgtgtacgacaccttcctgcggccgctggtgatgcagtaccagcccaacatcgaggagcggctgcgctacctgcgtgccaatgccggcgacattctcatcttctacctcaagaacttcaccgataggggctacgatctcttcctccgggggatggagtacatccggtcccagacgtcacgaggctcaagaacgagggtatgttaccagttactctctgtcccatatcgtaaggtgttttagttttgttctaagttaaaattctctaactttgatcaaatctataagaaaatatattaacatctactctaccaaagaacactatcaagacatatttcatagtgtattttaatgaaactaatatgatattgtagatgttagcactttttcttttacaatcttggtaaagttagaaaagtttacctagcacaaaagtaaaacaccttacaatatgaaaacagaggaagtagtagtacacatgttgggaaccatggtcatcacaggattccggaaatgtaacagtgcagtcaaagaattcaggatatgtaacagtgcaggtgtgtaactatgttggcaatggtttgtttctgctgtgcagcggtggttctcgttcggaggcgaccgggcagagaggtcgagctacgttgatgattatgtcgccggcggtggcgatcggaggagcacggcgaggcaccggcgaccccgcgacgattactaacgggctggaccggcgccatagggattcagtagagagaggtgcacaggattggaaactagttgattaggagtgacaaaatttaaaaggcccaaagcaaaacttctcaaaaacatgatgtgtatatatatatagacaggtgatcactgatccatactctggtatatatagctcctcacaatttggcgttgcaggttggctagtttgttggttttcctgttgtgatttgtgcacccgtcttcgatagactacatgattcattttttgaaacctaaggcgaaactttgttccacttttatatttagaagaagagaattaacccagtttataaggaaaaccgggcccaaaaaccacacaattgcacggttaattataggaaaaccggctgaaacccaccgctacacaactgacaacgacggcggagcccaaaagcaggatgtcaccgccaagctaaacacaaaagcgatataacagctcccacatcgcagaagaggtgttatcgttgccgagctagccgcccaagcgacccaacagcgccgacttcacaactgcagcgacactgaagacacgaaagtcgccaaagcgaaaagcagctccgacatccaacaatagacatcagccaagccatcgagaagccacttccttcacgcggccagcaccccaccagaaggaacgaagtggacccaagaagacaaaggcctcaccgagcacaaggtatgaaagcttttgaaccgaaaaagaccatcaacggtcgtcgatgcattggaacttctccgaagcgacgcccccaaggaggacacgacgtgtaacgccgccgtcgctcgtctgaaagccggaacaaggttttcatctggagattgtgggggatatgaaagaatgccatgacaatgcctccaagaagggaaatgacgcccacgagcgccgccgtcgtcgaaccggccaaaggcacggcaaggctttcgccagcatcttcacatcacccacacaagcacccccacattgacggccacagaatagtccatgacgtctcacaagcacccatacctcaaccgtaaccaacggcaaagacggacccttggccaccaactcctacagcaagccgaagcctccgccctccccctagcgttccccacgaccagaacaaggtccggccaaagaagggagggaaaccgaaatgagggagaagactcggtcggcaacgaggaagtcgccaccgcggacgtcaagcccaattcctgcttcacgccagcataagccatcgtcccgccaactccacatccgcacatcgccgcccatccgacgcggaggggacggatccagccgcggacggccagatccagctaggacagcgcaagccggctcgacgtaagcgccgccgcagcaccgttgtcgttgcgaccaccacgccgccacagcctctgcctgcgcagcgctagcgccgtggccccgcgcggacgacgccgaggccaacgccgcgacaggcgcgagcgagccgccgctgcccgcccaccgcgacgccgcccctgcctgtcgccatctcgagccccgtcgccgacttctccctgccgccagccgccacctcaccagtgttgtcctccgctgctcctcgttgcgctgcaccgctctccgccgtcgccggctgcccctcgcgcgcgagccagcctccgccgtcgccggccacacctccgggaacgcggcctcccccgctgccagccgtgcctccgcgagcgctggcctccaccgccgcggccgcgcctctgcgagcgccggcgtccacagccgccggccgcccctccgcgctccttgcgcgcgccgcatccgctcctctcccctccgactgccgtctccggccggatccggcgggggcagcgccggatccgccgcctccacgccgggatgagtcgccgccgccgcgtcctagccgaagacgacgcgccgccccatcgccaccgtcgccaccacctccctcccgcggccatcctccaccgccgcctatgcatcgccgcgtcccctcgccggatccgcttccaggggcgtcggatccgccgcgcccttgccgtcgccggccgccggagccccccaccgtcgcgcgccgctccgtcctcccgcgctgaggaagagctttgccagttctcttggccccgccgccgccttcccgactggccgcacggctttccggcggcgagctccggtggcggcgaggtggttagggtgggcgggggtggcggcgcgggcggctagggttttgcccccgagccgcacgcgcgagagcgacgcggaggaccccactaacaaactagactacatgattcatgcgatgcaacccccactaacaaaccttttgatcattgtgatgaatacataatggaaacaaaccaaagaatattatactgttgatgatggataaaaaaatcaataccatacttgacgatggataaaaaaaggggatttttttttcatgagactccacacaagtggcaagccatccaataagactctccacgagtgacaggtcatacaactagttggagcaaccagctgctatttatagatttcgcatgcaaatctattcatcaagaatacgcatgcaaatctatttgaaagaattatgggaataatagatttcgcatgcaaatctattcaagaattatgagaatcagtaactaactagtgctatttatagatttcgcatgcgaatctatgcaagaactcataggaatatttgactaactaattaataagttaacgctggatattcctcctcgacctgatcaacctgtttcacgccgatgatgccggccacgaaccctaggcaagggcagacgtacctcttgacgaagcggtataccgcgccgccgcgccgggtcccgagcggccccggcgatcgccggcggtggagcgcggggtggggcctcgcgtacagccgcgacgtcgcgcgcaggagcgggtcgctgatgccggccttcggcggccggcgggagctctcctcgaactcctgcgagccgatcacgtcctcgaagctcacgtagccgggcgtcgtgtggcaccgcttgaagtaggcgtcgtgcgcggcggcggcggcggcgtgcaccaggtcgtcgtaggagtgcagccgccgcgagatgggcggcaaccgcgcctccgcccccgccggcgcggccccggaggaggagaagttgtcgctgccattgctgtcgctggtggcggcggcgctggtggagtggtgggagaggaggggctgcgagtaggatgcgcgcatggagaaaactggggcgacgtacgagacttacgagtagccgatcgagggagagattataagaaagaaagtggttaaaagatggagggcggtattagggtttgattatgagagagcatcacacccaactcgtattcggtgaagggggcgtagaaacgtattcggtaaaggggccgtagaaatagtgtatacagttatacgcacccggtttgccgcgcgccgtccagagaagattgaaactcaaaatcgattgaactcactcaactcaacccaaaagatgattgtaaatagatgtcaaatcgaaatagctaggtttcaccaatcatccgcggacggtttgaggaagcatcgatctccatcgaggactcgtgcggagctcgccgccgtcgagccgtccaggtgctcagtttgctgctgccgcggttgacgaggtcgcgctaggattgggagtttgagaggctggctggagagcccggatggccggatctaactaatgaattgttatgggctttggggctgagagatacatgggctgcaggccgaaccaacctgtgggctgagcagctagcggaggcgcttccgcttcggttcgtttgcggcctggaaaccgcgccgaacaggctactgggcgaagtggccaacacctaaaactggatttaaaagaaaaataaagccaagcataacaatactagtatttagattcggtgtaatggatcaatttacggtgaattttggatttttactctgttcggtagaaactggtagtaatataccttaggatttaatttgtcaaatacttttacttatgttatggtgggtttacactcgtcccttgctaatatcttccatagttggcttggtggtttacaacgtagaataaatgttaactttttataggtgccgtagctttgtgttggacggtaagactttgtagtaatgatataatcttcaatggcttaagtactaactcccctctttgtaggtaattttcaggtgaacccactgcgctagtggtcattgttgcttaacgaggagaatagcgatgtggttaaacacatgcacaagttaccggaggctagagtttgggatttcttttccagatttgcgtggaacttgagtaagcggttggagacctagtatccacttttgtcatcttttgttagttggcttctattcacgagacgacttcgttgtgaggtgttgtagtctaagtacccttgttttatttggtcggtggtgttgttcttatgcaaggtgtgatgctaagtactattgacaatgtatgtttggctatgtacgtatagtttggatgtagaggataggtttttaatcatttttttaaaaataaattgacattttctccctctacatgtttatctatgttttgttagtattgttgtattgctctcactaagcctagatgctcgctagatataatgtatttttgcttacttgtactcccctccgtacgttcaaattttttttatgagatagaacacaacctatatacaataggatgtgttccatccaatcgaacaattatattttgaaacggagaaattgtaagaattacaagttgtcctagcatatctgcactcttccatccatcccaaaataaataaaagaaaacttttgcaaaaccataaacagagtaaaacggaccgagacgagaataagccagcggagcacacgcgcaacaagacaatttttttgtttggcattcctatcaaaatattcccaacatagcatagcttctagtggaaactgtgaaccactgaaccaccaccatagacgatagcgtttgtagcttgcttgcaacggacaaaccaattaaataccccctccgtaaccgcgagattctaagttttcaacgaaggctgtatttagttccatgtcaaaattaaaagtttgaaaaaattagaacgatgtgacagaaaagttggaagtttgtgtgtagaaaagttcgatgtgacgaaaaagttaaaaattcgaagaaaaaagttagaatctaaatagggccaaagcgagaaagcttccttgcaaatcctggctgtgtgcatatgtatcagtacttccttcgtctcagtaagttaatttttttttattttttttatttattccaaaataaatttattttaaaagtaataattgtatcaaaattgatgaaagtagaaaataattatattgaaaatagataaatgagaaatagttgcattgacattgataaaacaaaggtattttagttttttattgatgatatgtgaaagaagatactttctccgttaaaaaaataaatctaaaacgggatgtgacacattctgtacaataaatatgaacaaagatatatatttagatttatactagcacactgcacacgacacacacaccagcaacgggggcacacgacacacacacaccagcaacggggattagaagttgacacgactgtctatctggaatcctagctgtgctgcggtagcaactgtcctcagatgctgatactccctgatagccatagccacgacgcgatggggtccccatccatcctcccctcctgctcggttgttttcgcttcaggttcagtgcagtcacgagcgcggacgcccccaaaaaactcgccacgctgtgtgcgcgcgcgcccaccgcgatccccctgatcccattaacgtttcacccgcgcgcgcccacctgccgctgcaatatatttcgccgcgccccgcgccacgccacgccacgccaccttgcgcgcgcgcgcgcacacacaccccagcagcagagatgagggggatgggcgacgacgggatggggccgatggcgatggcgccgccgcgttccggccacgccacggcggcggcaccgccgccgccgcagcacaagatggcgatgatgatgcacatgaccttcttctggagcgaccgcgcggtggtcctgatccggggctggcccggggagcgcggcgccgggatgtacgccctctgcctcctcttcgtgctcgcgctcgccgcgctcaccgaggggctctccgtgctctcgcgccgcctcgcccgccgcggcggcggcgccgcctcctcggatggcggccgcccggcgccggcgccggcgtcgtccgcggcgctgctgaccgcggtgcacgcggccaggatggggatggcgtacctggtgatgctggccgtcatgtcgttcaacgtcggggtgctcctcgccgctgtcgccggccacgccctcgggttcctcctcgcgcggagcagggtgcggccggccgcccgtgacggcggcggcggcgtggcctgtgagcacggtggcctccctcccgcggatggatccaagacttagtccccatcgattccgttaaacgagtatgtccaagcgccttagccagtagacactatgcactgtatcggatccaatgtgaaaatttaccttggatatctcgctaaaataattgtattttgtcgacttgcttgatatctgttcccgtgcagtcttctctagtcgtttttcgtttgtactcctatgtttcaagatggaatgatactactactagctagtattgatgtgagttctctactatgctaactttagatgaaccaatgatttgttagtactctccttccaaaaatatcctttttttaaatggaatccttccaaaaatattagatttatttcatattttgaattagctacatttgtagttttcatgtatttaaaacttaaatgaatagataaattaaatgattaatcggaacccgatgagtcatcttaatattcattggctgcgtacatgcatacactaattgatctttgttacaccttatctccacttaaattattattatttaaatccttcacccttaagatttctaattgtattgggtgcatatattgtatttattagagtgataaagatgataataattgtttttgttctttcgattaaatgtagctgtgtcttatattcgtttcatatgttgatgaaaccaaccctctagtatatgtttcatgctcatggtaacatatactagggtattctttttaaattcctattttgtgatagtgttgtcatcaatcaccaaaaagggggagattgaaagatctatgcactagaattgccttgtaaggggagattggaatatctatgatcctaagagcgcggtgattgttttggtgattaatgacaacccattgttggaactaactatttccatgagttggtgagattaggttaagtttcagcatcaagttaaaagattgaagctagaagatggacattataccttgatgaggagcaagtgaaggcattgatgatgcggggtatgaaatggctatctatggcaaaccggtgaagagaaagcaaggctcggctagaagatggacattataccttgatgaggagcaagtgaagacattgatgatgcggggtatgaagtggctatttatggcaaaacggtgaagggcaagcaaggctcggctacaatggaccatgtggggggtgaagggcaagcaagaggcttggcgccgatggactgaatccggtggtgaagggcgagtgaaggctttgtcatgatggtcatgatggaccgtatgaggccatttgaagctatgagtaatccgtatcaattataagaagaccgcaagatggaatgccgaggatcaagaggatgtggttcttcgatgaacatcaagtcaaaatccaaagtgggcattgatcaaggcaaaggtataattgatttgggactaatatgcttaatgagtgtaggtgagaatagtcccaatagtgaaatggtgttgacatagacaaccctcaaggtgaagcaagaagatgttcctagtggtgtattagtcccaggttgcttaggagtgggctaggatgcttggagatcccccaaaacatcaaaatcaaagtggcgagaagactcggagccgagttagactagtttactttttcgctttgagtttaggaaaaaccgtactattaaaaggggttccaagtatggttctaagataacacaagtgctcttagtggtgtccaagtgttgaaatatttttaggagctgtttttgaaaatgactctactcgggacagagagtcccacccggaggttctgtccggaacttcctggcgccgaggtgaggttgaaaattttcctaagtgttgcccggaagttcctggcacccaggtccggaacctcctggcaaccctccagttcaaatatgtgagtaacggctagatgacgtcacctaaccgttatatatagccaactcgaccccagctcattctttggccattccactttagttcttgtgttccctagcttgttctagcctctcccaatgtgattttgcttcctccacccaaatcttgtgcacttattgagtgagagagtgaatttgagggtggtggtgaggattggagaaggttttgaaggctaggatgacttgagcacttggtgtatctcgttgggctatcacttgaagcttgttactcttggagggtgacctcctagacggttaggtgtcgcccgcaagtttccaacaaggttgtggattgacccgggcaagtttgtgagagcgttattccacctccgaaagaaaacagaggtgaggtttaggaggtcgtcttggtagagcaagcctcacttgtggtgttcttttggtgtttaagttggggatcttagtggtcacttgaaaccaaagagaagtacctaggggtgttggcttgaagaccggagacctcttcctaggccttttcttggcgaggcaaggtgttaatcaagacccggctctttggagctcctcaacagagacataggattctcggtggagaatccgaacttcgggaaacaaatcatttgtctcctctcactctctttatctttgtgattgtgatgcttatctccttatttgcctagttgtgctatcatgtctcccattgtatgatcacttgtgatatcttgtgtattttcatgtgtattactcttgtttgagacatgttgtacctctctatggtttaggcttccttgtgatttaatttacttgttgtgaggtgcttgaaatagcaattcacaactgcccggaagttccttggaagaaagagaggaagttgagcaagaatgaggatcttgctcataagttcttcaaatccaccaaagagggacactttgcctcaagttgtccttgcaagattgatgatgaagccacacttccaagaaagacatcaagaatcaacaaaaggaagtgctacggttgcaatgagaaggggcatgaaatcggattttgtccgcacaagaaggatgatcattgcaatcaatcaagcaagaggcaaaccggtaacaagcaagtcaagaagcaagataaaagcaaaactcaactttcctacaattgccgggtaaagagacatattggtaaaaattgtcccattggtaacattcctaagccaaacctctcatttcatcacaatttgcttaggaaggccaaaaatggcacttgtgccactagggtgattagttcgctacatgctagcacaaaggccatttgggtgccgaaatctcttgtgactaacttccatggacccaacattatttggtgaggcaaggtgttaatcaagacccggctctttggagctcctcaacggagatataggattctcggtggagaatccgaacttcgggaaacaaatcgtttgtctcctctcactctctttatctttgtgattgtgatgcttatctctttatttgcctagttgttctatcatgtctcccattgtatgatcacttgtgctatcttgtgtatcttcatgtgtattactcttgtttgagacatgttgtacctctctatagtttaggcttccttgtgatttaatttacttgttgtgaggtgtttgaaatagcaatttacaactgcccggaagttcctaggaagaaccccggaagttccgggcagctttctctgcttgtgagaaaaagctgccaggaagttccggaccttttgccaagaagttctgggccctgattttaaccgctacgatttgaagtaaattttaggtgcgcctattcacctcccctctaggcgacatcaaggccctttcggtaagcaactattgtatgattggctattagagcaaggttaatagtatagccaactactagctcaaattcatctatagccaatctaatagctaatttatacaatagttgcttactatactattagtatatggtcctacttgtcatacacacattgcgtcttggagtccgtgctgcagctggctacatctctctcatcttttatctcattaaaatatgtttgtagctggctaatagtttgttattgtacctgctcttatattgactatatatgatttggagttagtagtgtgctatactattaaacttgctcaaattgtttttcgggtcagaaaagaagcttcggatcattaatctttcatgtaaaaatcatgtaaagaaataccgctaaggtctattcaaccgggcatcaaccatgtggaggtctgaaaatatgaaaacgaccttgcagggtggcaccgtggcatgtgtggaggtagcactgtggcagcggcaactacctgtgctgtgcatctctctgactctgtgtggtggcgaagatttggaaaggcagcaggaagaatcttgcaagatcattgggtcccgttcttttctctaagcaaaagttgaaaagattttcgtggcacgctttttatatgaaagttaaaccgtatacttcgtacaaaaattttatatatgaaagttgttttaaaatatcatataaatctagttttcaagtttgtaataattaaaactcaatcatacgttaataccaccttattttgcatataaaacttaatttttatttttatttttatcttcagaagaaaaaaaacaccatctaaaaatcgagcgtccagaacctcttattaaaaaaaggggacgaaacagagggttaaaaaaaaaagcttatcaggcctattagcagtggcagcagggatgaaaaagggatgcttacaagaaacagtagcatctttcatctcttctgaaacgacggattgtcaggaccatatttatcaatttagctatttagtaaaaatagcaatatgatgttaaatagaaaattaaaaatttataaataggtagaaccagaaacggtaaaaaataataccactcatatggaaatggtgctcggtcgacccggaatttccgtgactgttttcatccccagtggcaaaaagggaacaagaaaaaaaattaatttgatttttttcatatagtttgtagattagcaattgaaaaaaaaaatactacagttttagttgaactgagcagattattggctatgtattggtcgcaaacttgcttctcatttaccattcttaagagccccaccgaccgctcccttctccatctctgatgagtatgtcgctattgatgcatcttctccaattgtctccaagtacgacacaatcccccttctccttcgtctccgatggttcatgccattgccgcctgcttcctaacaacatgaccttctttgtttccgcggttgatcctatgcactactctcgttcatccctaagcctctggtgctaacgcttctgtctttccctcaccggcccaccgtctctgccactcattgctattcctccatccctctaaacctgctctcatcgaagtcctcgccatctccctcattgacgcctccacctcttggcaggccatggattttgatccaatgacatccattagtggattcagaatagcaaagcataaaattaaaaccgtttatcatgttgtctattcgtaaacttatgcgtgaagattgatgaactgaaccaaatgtgaaaaccccatatacaagactacaaattacagcactattttttttttttgaaaatccctgatatgactatgcctatagaaaatcctatgacgtaaatatgaggtggctttgcagtattgagactctgaacagaacctctctcaaagaaagaactaaaatacgtacttcaagagaactcgattgaatcatggcccaaggcccaaagcccagtcgacgcacataaaatccaatctctcccggttgacggaccgatccccagtggaaaaagtctttgactgcttccactatcgcccgagtatgatttatttcctccaaccacaaaaccggtatatcgacttctctaactattaaaaccggtgcaaacaatatccctcggtagttttggaggtgggtttggctgatgtggtggtattgactaagtctttctcctacgtggcgcttacgtggcattaaaataaaaacaaaaataaaaaatatgtgggatccatatgtcattaaaaaacaattataggacccactgatatgtgggacccacctgtcatcctccctcttcttccctcttcctgcccctctctcccttgtctctctctcctccccggcctttctctcctcgggaagacgacggtgtggagaggcggtggggagcggcggcgaacgagggcggcgcgggagaggaggtggacgaggaggtagtaggcgcggagggagtgggggatcgacgacgacggcgacgaggaggcggcccagtagaagaaggtgagcgcattcctagcaacgagctccggggaggaggaggagtggcggtgcttggcaagggagaggaggacgacgtcgacttggtcggcagtggggaaggcggtggagagcgcctcccatgtcgctctcggatggtgcgcgaggtaatgggagatgcgctgaggcgtcgtggcggcggcgacaacgatagcgcacgggggaggaactcaccggccgtccgcgcgcgggggagtggctcgccggccgtccgcgcgcaggggaggtgctctccggccgttggcgcatggggaaggcgctcgctggccgtccgcgcatggggaggggctcgccaaccgtccacgcacgggagataggctcgccggccgtccacgaactggggagaggctcgccagccatccgcgcgtgggggagaggctcgccgggcgtctgtgcgcaggggaggggttggagctcgccggtggtagggag

SEQ ID NO: 9170 - DNA, 1398 bp, Oryza sativa
gagagtaaatgtcgcaatgctcgaccaatatccacaagaaacagaggacaatctcgtccatctcctgaaggcgcagcattacaagacgttcatactattgccgtacaacacagagttagtttaattttactgtcttcctacatactaaatttcattcccgtacgaacttgctaagtgtttcatatgtaatgcatcccacgcacattgcagattccactgggtgcttttactcttcgacctgtcggcctgcaccgtcaacgtatatgactcaatggataaaaaagagtctacgtttaacaaggttttcgaacttatacacaggtaccgtcataagttcctctgttaattaagaaaatcttgttatgttaattgctactacgaatcatagctttaaactccatgtagggcttggtatcggttccgtcatttggtccgcggcaaatggagagaaagacttaggcggaagttcaaatttcctgtgagtacacatgctctacatttatatttctccgatttaaatacatacaagtgtatattaattagatctctcgttgtttgtcatttatttgtagtgcgtaaagcaaaagcagggaactaacttgtgcggctattacgtgtgcgagtattgccactgccttgcagaccaaatcatcaccacaagagagctcgatgtacgtacaaataaattcaaaatttcattacgtaacgatttcttgtttaattactaatcaatttcatacattcatatagtttattcgcatgagggataacctgaccacacacaaggaatttatcgcggcggttcaagaacaactcatgggattcatcaacgaagaaatccttgatcccaagggtgaattctactatgacggaaacacaattcaccggtccttagtttctgagctagcagcgagtactactactacgtcgaaatcgtagctagctaggacatataatggattataattaatacatgactacatatgtttctatatgcatgtgtacacattttctataatgtaaatatattttggtcatatatatatatacacatatgcatttgcataacatatatatgtataaatatatatatgcatgtacatatgtactgtatatatatatatatatatatatatatatatatatatatatatatatatatatatataaaatatgtatgcatatatatgtattgaaacatatatatgcatggtttatatatatatatatatatatatatatataaaccatgcagcaacagggccatgcaaaaaaaaaaggtcagctcgatctttagtcccggttggtaacactaaccgggactaaagatcgagcggaccttttttttttgcatggccctgttgctgcatggtttatatatatatatatatatatata

SEQ ID NO: 9171 - DNA, 3069 bp, Oryza sativa
cgtgccctgtttgcaaagcactacgatacaagattagacgagacgatctaggggaagttgacgggcagctaacaaagaagagaattcctgctaaggtgatgtggtatttccctataataccacggctaaggcgtttgttcaggaacaaggggaatgctagaatgttgcgatggcacgctgaagagcgtcaacaggacgggatgctgagacaccccgctgatggttcgtagtggcgaaacatcgacagaaaatttaaagaatttggaaaggacgcacgaaacagacggtttggttttagtacggatggcatgaatccttttggagagatgagcagcggctatagcacttggcccgttatgatgtgtatctacaacctcccccatggctatgcatgaagaggaagtacataatgatgccgattattattcaaggccccaagcaacctggtaacgacatcgatgtgtacctaagaccactggtcgaagatcttaaacagttgtggaagaaggaaggtgtccccgtgtgggacgaggacaaacaggaggagtttaacctacgagcgctgctgttcgtaaccatcaacgattggcctgcacttagcaacctatccggatagtccaacaaggggtacaaggcttgcactcactgtatggatgaaacaaaaagtacgtatcttaagcactgtaggaaggttgtatacttgggtcatcgtcgattccttgcaacaaaccatccggtacggaagaaaggcaagcacttcgaacataaggccgaccaccgtatgaagcctaaacatcgcagcgggaaaacagtgtttgctatggttaaagatcttaaagtagtgttcggaaaggggcctggaagccagcctatagagagcgaagatggtcacgcggcgatgtggaaaaagaactctatattttgggagttaccatattgggaattcttggacgtacgccacgcaatcgacgtgatgcacctcactaagaacctttgcgtaaaccttcttggcttcctaggtgtatacgaaaagtcgaaagatatggaacgtaatgatctgaagcatatgtccgggcaacaataacaaagctatgtgcattcatgaacgcaatttcgtagaaggtcatcgatccggatagattagaagcccttcagaatgaagtggtgcaatgtctcgtcagttttgagttgatatttccaccttcatttttcaatataatgacgcatctgctttgtcaccttgtgaaagagatccgtattctcgggcctgtgtacctacacaacatgtttcctttcgagaggtacatgggcgttttgaagaagtatgttcgtaaccgtgctcatccagaggcaagcatcgccaagggttatggaacagaggaggtcaccgaattttgcgtagaatttatcgaagaccttcgcccaatcggggtacctgaatcacgccatgaagggagactacggggaaagggaactctcggaaggaaagcaataatgacggtagacaacaatttattccgtaaagcccatttcactgttctgcaacactcttcattggtagctccttacatcgaggagcacttggctctagttcacgccaggaacatcggtaagtccgatgcatggattacacagcatcacattgatactttccccacgtggctacgacaacatctcatgggtaacgagtcaatcaaccaacaacttgccttcctggcgaggggaccgtctgggtcgatcgcgacattctagggatatgagatcaatgggtacacattctacacgagagcccaagacatgaagagcacgaaccaaaacagcgctgttcgtgtcgatgccatgggacacgatggaacaactgccacgtattacggtgccatcgaggatatatgggaacttgactatggtcctctcaaggttcctctgttccggtgccaatgggttaggttgactggtggaggcgtaatgattgatgacagtggtatgacaactgttgaccttaacaaggttggatactcggacgaaccttttgtccttgccaatgatgtaacgcaagtctttttcgtgaaggacatgtctagcaaaggaaagaagggcagagggcctgacgagcctaagcgtcaagtggttctcccaggcaaaagaaaaatcgtcggagttgaggacaagactgacgaggattacgatcagttggatgggcaaccccctttcacggtgacgattgaccctagcatcctcctatcaaatgaagacaccccttactcacgcagcgatcacaaggagggaacaatagtgaggagaaagtacgtgcggtcaaccgtcaccgccgatgtaatgccgtaattattgtgtacacgatgtaaactattttggatgtattgattatccatataaatcaattgatgtatggcataatttactatcattcatatgctacatttaattgactatcattcatatgctaattataattgactagagaatttttaaaagtattaaattattcatgtggcatttacagatgttaattagagtttttcacaatttaatttactatctttcatatgctacttatatatgactattcgaatttttaaaaggtttaaatcatgcatgtggcatttacatatgttaattacagtttttaacatttaatttaatataattcctacgctaagtatatatgatgattataatttttattaattttaaatcatgcagtatgtacatacatatcttaattagagtttttaccaatttaataatatcattcatatgctaagtatatatgattattggaatttttattaattttaagtcatatatttgcttattacgatttatccacttaatttattacagacaaaaataatttttcgaagtaattgtcattaatctttgtactttaaataatgttaatgcattaacttctattttagaaacacatatgtaagcgaaaataatatgcagtgctataatctttagtcccggttcttaaccctaaccgggtttaaaaataatttggaaatagcgggaaaagatctttactcctggttgatgagaacaacc

SEQ ID NO: 9172 - DNA, 6303 bp, Oryza sativa
gcgcgctctctagcccccgtgagtgtgacccaccgggactaaagatcgagctcaccctttttttttgcacgcgcgcgcgcgtgcgtgttttatatatatatatatatatatatatatatataccatgcatatatatgtgtctatacatatatatgcatacatatatatatatatatatatatatatatatatatatatatatatatatatatatatatatatatatatatatatatatatatatatatatatatatatatacagtacatatgtacatgcatatatatatttatacatatatatgttatgcaaatgcatatgtgtatatatatatatgaccaaaatatatttacattatagaaaatgtgtacacatgcatatagaaacatatgtagtcatgtattaattataatccattatatgtcctagctagctacgatttcgacgtagtagtagtactcgctgctagctcagaaactaaggaccggtgaattgtgtttccgtcatagtagaattcacccttgggatcaaggatttcttcgttgatgaatcccatgagttgttcttgaaccgccgcgataaattccttgtgtgtggtcaggttatccctcatgcgaataaactatatgaatgtatgaaattgattagtaattaaacaagaaatcgttacgtaatgaaattttgaatttatttgtacgtacatcgagctctcttgtggtgatgatttggtctgcaaggcagtggcaatactcgcacacgtaatagccgcacaagttagttccctgcttttgctttacgcactacaaataaatgacaaacaacgagagatctaattaatatacacttgtatgtatttaaatcggagaaatataaatgtagagcatgtgtactcacaggaaatttgaacttccgcctaagtctttctctccatttgccgcggaccaaatgacggaaccgataccaagccctacatggagtttaaagctatgattcgtagtagcaattaacataacaagattttcttaattaacagaggaacttatgacggtacctgtgtataagttcgaaaaccttgttaaacgtagactcttttttatccattgagtcatatacgttgacggtgcaggccgacaggtcgaagagtaaaagcacccagtggaatctgcaatgtgcgtgggatgcattacatatgaaacacttagcaagttcgtacgggaatgaaatttagtatgtaggaagacagtaaaattaaactaactctgtgttgtacggcaatagtatgaacgtcttgtaatgctgcgccttcaggagatggacgagattgtcctctgtttcttgtggatattggtcgagcattgcgacatttactctccgagggtcgatgaatccagtatcgaaaaccctccgccgtcgggccctttaaatctccattctacaacgataaaagggagtatattattttctatagtctacttatatacaaggacctaattaattaaaggagacgtatagtaagaaatctaactgaacgatatacttacaaaatccagcaactcataatagagacgtcgagtgcgtccagctagtatagttcgtagattcccttgaaattgatccagagaatgtcatctccttgcaagaagtctgtgtccctgatcctcgctccgatcatctctctaccggtggcgctcatctccatgtacagctgatggaacttgtacatttgtgtgggtagggactgcagcagctcaggcttgacaagcggtttaccgagttcgtacatgtatttcacttccgccttttcgatttgtgcgactcctagcaattgatccgtagttagaccggtgtcagtaataaattcttctatcgtcatttctttaccggtcaccaacggctcgatctcctggtttggttgctctccaagctgagggactgttttggactttccagaatatgctttcttcagcgttcgctcatagtacgatagcttgatggcctccttgacagatgcagacatacccctgaagaagttcctgacactggggtctataggaatcttcttttctggacttcgaggcttgaattgtctcttgacttctgatgcaacgtaagcgtcaagctcctcttgcgtgcaatcgtaccccgggtccttgttcttggcggcgtcaactttcgccttcttcgttgcccttgtgtgggcaggcggtggagctggggggcccttgacttgaaggtgccggaagagaagcttgcggaggagtaggtgtaggagcccgaggaggagtcggtgcaggatcctgaggaggagtcggtgctggagcctgaggtggagacggtgctggaggatcatgaggaggagacggtgcaggatcctgaggaggagatggcggagccggaggagatggtgcacgagacgccgcttgtcgcccagggaggatgatgtaccgcctgcgccatagaataatggcatggcttgtgtctcgtagatgcgtctcaccgtctcctccagggtaatccagctcgaggtcctcgtacgcgccttcgaccaactcaacttcgaccttcgagtatcctgctggaatcggcctgcagtggtaagtacctgaagggttagttgggatggccatgcccgacgccaccttcatgttgtgagagattatttattagtaatcaacatatataagcagcaactagcggaatggctaaatctaaaatatataaactacgagcttacctttattgataagttcttgtaaggaatatgtggctcacatggtgtccgctgagtgatgtcatcaacgggacaggtcgattcgtcctgtgtttgcatggcgtccatgctctgtgatcctacctgccccgttgaggcgcagctgctacggtttcctgacgggctcaccattgcaggaggaatggtcggctggggatcatgggaccgatgtgcggccatgcgttcatcaaccttccttgccacctcctcttgcatgctgagttcgtagctcgatacccggaactctagatctgcaatcttcgcctcggtatctctcttactcctcatccgactcctgtacgtgtggatgtccaccttgaaaccaatcttccaaggaatcacccctttccctcgtgttcgtcctggatgctctggagtctgcagggcgagtgtcagctcatccctatctctgtccggtcggaacgtgccctgagaggaggcttccactgcatctgttagtcatcgcgcacctctcgtatctgatcgccgaagaccagtgagccatcagctgggttgagcgttccaccgtgagcatagtaccagaacttcgatcgttccggccaattggcggttgccggttcgatacccctctcaatcaagttagcctccatctcctcccacttcggcatcgcgacgctatagcctcctgaccccaagtggtgatggtacttcttcttggtggcattttctttgtttctttccatcatcgcctgcccttgttcacctgtcttatatgcaacgaactcgtcccagtgatcccttagctttgggaatgtgttgaagttcggtgtctgccccttcaggatatatttcttgtacagctctcccttaaagctctgaaactattctgccattttcttcagagtccaccttttcactttgtcctctgtacccgtgggaagggtgaatgtctcgagcattgtggtccacagcatctctttctccgaatctgggacaaagctctcatgatctccgcgtgcccttgttcttcgccagtacaccgtattgacagtcacgttatcccgcacaacccaaccgctgtgacgtacatagttcttggcggcttcggccggggcactaggacgtccatcttctttcacttacgttatgatgtgccgaccctcaagcttcttcgctacacctcgttgcccgcgtgccctcttttgtacaacggagggttgactaccactagcctcctcctcctggttcccctccacatccctttccacgtgcccctgctggttcccctccgcatccctctccacgttcccttcctcgttcaagtactggtttggatcctcgttcccctcttcttcattccagtactggctgcttccctccgcgattgtatcgtacaatatctgttcctcatcgcagtcagccatctgttgatataagaaatatctgctaagtcacgagacatttatgttttaacaatctaagtcatgtatgctaagtgtaaatgtcgtacattagaaccctacacaaccttacgtgctaagtctaattacaaatcgtgatataagctaagtctaggtgacgtatattatacaaccctagctagtaaataattatatactaagtctaattacaaataaaataatcttatattaaaactcaaataatattacatgctaagactaaaatagtcatgtatatgctaagtgttttgtgcgtatatgttaagtctaattaagactacaatagtcaattgctaggagtcgcaccaattccgtagtcaataattacatactaattctaattacaaataaagtaatcttatattaaaactcaaataatattacatgctaagactgaaagagtcatgtatgctaagtgtaactgtcgtatatgctaagtctaattaagactaaaattgtcaattgctaggagtcgcaccaattccgtagttaataattatatactaagtctaattacaaataaaataatcttatattaaaactcaaataatattacatgctaagactaaaatagtcatgtatgctaagtgtttcgtgcgtatatgctaagtctaattaagactacaatagtcaattgctaggagtcgcaccaattccgtagtcaataattacatactaagtctaatttgcaataaaataatcttatattaaaactcaaataatattagaacactacacaatcttatatgctaagtctaattacaagtctaatattcttaattgcattacaaatataacaatcatttatattattatgtcacttgcctgcacgaattccttctacggctagctcttccactccggcttgagggacgactccgacaacatgtcttttctgcaagatacaaaaaatatgtattaggataaatgcgaagtaacatatatatatattgcatttcacgttcacattcgttcgctcgttctcattcacgttcattctcgttcacgttcgttgtcgttctcgttcacgttaattcgttcgatcgttctcgttctcgctctcgttcgttcgatcgttctcgttctcgttcacgttctcgacgtacgttgacgtgttcgttctcgttcacgtgttcgttaacggcggtgtggcggcattgggccggcgcttggcgcggcggcgtggcggcggcgtggcgacggcggcggcggcgtggcgttgcatgcggcggcggcgttgcgcggcggcgaaggcggcggcatggcgtggcggcggcggcgttgcgcgagcggcggcgaaggcggcggcgtggcgtgccggcggcagcgtggcgcggcgtcggcgtggcgcggcgtcgtcgtggcgcggcgtctcgtggcgggcggcgcgacggagagagagatcgagattggagatcgatgaagggagaggcggcggcggctctcaccccagagatgcggcggcggcggaggaggcggaggcggcggcgaggacgacgagctcgagacgacggcgagatacggcggcgtcggcgcggggatttgccgtaggcagtggcggcgaaggagagaggccgagagagatcgatcggccgaaaacgttaagtgttggtggagaagatgagggcgcgcatcgggaatatatatagccctcgatctttagtcccggttgatgagaacaaccgggagtaaagagtaaagatatatttactcccggttgttgagaacaaccgggactaaagaaaatatctttaatcccggttgttctcaacaaccgggactaaagatatctttagtcccggttgttctcatcaaccaggagtaaagatcttttcccgctatttccaaattatttttaaacccggttagggttaagaaccgggactaaagattatagcactgcatatattttcgcttacatatgtgtttctaaaatagaagttaatgcattaacattatttaaagtacaaagattaatgacaattacttcgaaaaattatttttgtctgtaataaattaagtggataaatcgtaataagcaaatatatgacttaaaattaataaaaattccaataatcatatatacttagcatatgaatgatattattaaat

SEQ ID NO: 9173 - DNA, 11471 bp, Oryza sativa
tttgaagatcaaaactttcctctagtatttaagaagaggggtcattttgaccaaggaatatttggtgaaaagaaaatggaagggtagcactaagtattgcttttgtagttctaataaatgaatacatctattttttagtgccaaattgtgagaaatatgtggaatgccgtatattatttttggaattcaacagccagctagtgttttgctaatattcttgctaataggctaaattcaacctaggctaaaacatattttttttcgtaggcattgcagctatatgttgggccatatggcaccaaaactatctactttttagatggtttcattggaactcattgggcgcgcttggtcctcatttttaagaggaagacagtaccttgatgaaagacgggttcaaaattttggaagctattgtgttggatttctttataaattgcaaaaccagaagttgccattaccagtttatttgacctcctcaagcggttttgacaatggttttattagacctgatggctacgtagcgttactattgaaaatatattttaaaaaaaacaatgtgacccataatttggctgccatgtagatctaatactcgcaagcaactggtacatgggctttacccgcaaaaaaatcattgaggtttcatctctgggcaattagcacggctgcagcggtatcctgtcctatggcgaagatcaccattcactagtgaactagcaaatgagttgttcccttgtttaatgtgaagatgaaaattctgccccgaaagatgtgtagtgaaactgtaaaaataaatttcttttgcacttcaattgttccactgtaagatgcggtcaaatttgacattgttttcaaaactaacatgtgacttaacatctcatatatgataatatttgtagcgacgaaatcataaagattggaaaaaaattgaagtgtcaaacccaatcatattttgttcgttgaataaaaattaatttatattagactaattaatggtcaaatatatcgagcgttgaacattaaaatacatgtttgtcttaatctatgggatggatggagtataaacttgtagatacaagcataaaattaaaaccattatatcataccaatgaaatgtatatcttatagaacatccctgactccctgtacaatgtgggagtaaaatttttactcactgtgttcgagtaaaacattatatatcacgtgctgcatgtgattcagaacgtccatgtataaaacacactaacattaataaggcatgcttcttgaaaagtacagcaagaacattttactccgggaaagtgtaccaactatttggcttgctaatttcaaatgaattgaactaaaatccggtgaaaatccaatgaatttctgttccaagtggaacacacaatcaaccaacgaccacgaaatcactggagaagaccatgctctgtccctacctttgtctatggcttcaatcagaaccggtaagctagtggctctaaccgatccctcagtgcataacatagtacaatcggcgctgaaggctcgttccaggaaggagcagaggtcacttacgagtgttttgatgctggcctgaacatttcacctggtccgtggctgtagcaatccacccagcaatgttgcaaaacttacacccatattcaactcgacagcactgagatcattcaattcccaaagcctcccattctcacgaaaggagaataataaccaagagaggctgggtaatatttaaaaaatacattgcagtagagcaagtaacaaatgtgggtgtgcttcacttcggctttatgctaacaatgtgttgtttggtgttgacttcctatcttccactccttgagccaatacagttcccattttcttcatttattgtaaaaaggacctgcaccctctggttccttgatctcctatatatcaaaagttcatatactgagaaacaaagatatgcatatgctattgccgatgtttagataaggctatgagctcttacatggtagtagctacaacataattaagccacaaattgcaatagtacagcctagatagttgtacttttgtgcttgtttctgccttcatgtgtgtatcagcctagtaggctgaatattagaccttttttttttcaaaactacgtgcaaacaaagacgctcatataaacatatgcccactcactcctttgaacatacacatatacatcttatccttatgagttcatccgaaaactagactgttatattttgaaattgataaagtcaccgcggatgtcttactatcgaggggtactatgtcatctactaccgtagcaaattattaggataggactagtgcatatatagaaagggtaggattggctccagtaatttctaaatatacaggccaaatagaggttaaagtactaaatattttacacgagacattttgccgcacactcaccttcttgtcgtcttattttgaagtggacatagtgatttgttttcagtagtttgtattcggaagaagaaaatacacaatgccacatgaagttaacactaatagaaagggcagtaatgtttaatggagaggaggaatcgaagtcgggcagctctcctttgtgcaaagcttgccgcactacagtatgggagtggggaagtatctccaccgaagctgaatggaagttaggcccgtttagcaaggctctacgttatatctctcgtggagctagagataaactagatcaaccgattttagctcattcgaaaaaagaagcggagtatgctagagtgatatttaaaaaataaactagaggggtcgagtgagattcgagtcgtttcatagctccacatcaaattctacttttggatttagatttaagagttgaagcctgccaaacgggccccaagaatggcaatagctctgacctgtatgttgcaagctcatgatgggctgaatgcctgaatgagatggtgtgccgcgttcctcgtaactactacctcgctcatctcaactacttcaagggaaaaattttcgcctttaacatggtcgcccttagtgtactggcctccgtctaatataaggaccatcaccatttcggtgcgacttgtgaaccagtgagtcgctccgttgtttaatgtggagatggaaccttttttaaccaaaaaatgtgcagcgaaacaacaattttcctactttcttcacccgtaaaaagtaaaacttgtagcccaggtacaactgtgtaaattactgtacatttaacgcatacttcttgagaaagtacaccaccagcatttcgatcactccgtgcaagtgtacaaattgtacaaactatattagcagcctaagaattttcacgagcaagcatgcatgcatatacgttgatcaatcctgtgtccaaccaatcacacactgcaaggagacgcacggcgatctctcaacgactccctgatgtgtgagatgaatccgtgtgattctcacaagccctctcgtggagaagctcctgcagatgcgcgttcctggccatctcctcctccacctccgtgctcagctcctgcaccctcttctccagctccctcacgtacccaaccagcatctcctccctccccgccgtctcgccgccgcctccgccatcgccttctagcacctgcatcaccatgtccctctgcatctccaagctccccaagatggtcaccaggtggggaaccgccacgtcgcttgagccatcgttgccatcctgcctccgccgctgttcttgctcgtgctcgaccatgtcgtcgtcgttgtcgtggtggaaggggaagcatggctgctgctgctgctgctccggtggcttgtcggtggggtcgagctcgaagctctcctcgttgaagttccagccgctgatgcgtcggttcttggcggcgacgacgttgctgccgctgctggcgtggcggcacggggagacgcagcgcgcgccgcgggcgcagccgcagagctgggtggagtccctgcacctctcctcgacggtggggacggcgtcgagcacgttgcggacgaggtagtcgtagtccctggagcggcaccccttgaagaacgggtggcggaggagcttctccgccgacggccgcttcgccggctcctggcacaggcacgacgacaccatgtccttgaacgccttggagaacttcttcttcttcctcgccgccgacgacgagccctcggaggaggaggaggaggcgtcgacctcgaggcggacgcggctggtgatccgcatcagcatcgacttggacggcggcaggtgggagagcggcggccggccgtgcgcgagctccagcgccgtgatgccgaacgaccagatgtcggccttgatgccgtacccgacgtgggagtggatcacctccggcgccatccagtacggcgtcccggccatgtcgttgaagcacgacgagctcagcgccgcccccgacggcggcggcgcgtggtttatcgggccggagaacgcggacgacgtcgatggcgcggtctcgtagatggacgcggacacgccgaagtcggcgagcttgaccgacccgtcggagtcgacgaggatgttgccggccttgatgtcgcggtggatgcggccctgctcgtgcaggtagcacagcgcgcggagcgtgtccctgagcacgacggcgatgcactgctccggcaggccgtcggggaagccgtgggagaggatggagtggagcgagccggcggccatgaacggcatgaccacccagaggtggctaccgacggtgaaggagcagtgcgcgcggagcacgttgcggtgcgacagcagcgccatggccttcgcctcgcgccacacctcgtccaggttggcgcgcgaccgctccaggtcgatcgccttgatggccaccaccgccgaccccagcggcacgcacgccgccttgtacaccaccgcgctcacgccgctcccgatcttgcacagcagccggtacgacccggcgtcgagcgggtacctcgcctgctgatggtgatggtggtcgtcgcctccaactgatccggccgcggccgccatggctggcggcagcggcggccggagcaaggacagaagttgtagcatcagtcggtctcgcatagcggcggtgtcacgtacgagagagacgatgactaattaatatacggcgcgaacgtgtaacgagcggcggctcgtgatcgtcgttagctgctaatcatctcaggcgagagctgaggtggttgttcggtttaattagcaccgtgcgtgcatgtgaagaggtggtaaaaaggcaaggcgcgtagcgattcgggtggcggtgtcacgaagagctgggggaatctcgtgaagctttggatagttagttggtgttaattatggtgtgtgattgtgaatgcgacgaacgggccaggcaccactgtacactacaccagcgtccagtgaccgatgatgatgtctgtccatttgtggataattgttttactttctccccgtcctaaatacatgatctgttccaaaacttacgaagtggtgccatgaagtggtgtcatttatatccgtgaatctaaaaattatatatttagatccgtgaatttggtttagtgtactatatatccccaattaatccaattgtctttcgaccgcggctgactgtcaccgtggcaccacacgcaagtaacatctttgtgcttagcccgttctgcatatactttctcgcataacttaacctgaccaataacctgaatccttcaaaatatcccaatcaactagggtttcgacagcgatgttagcaacggaaccgggcaggcggcgaggtagcggctgtggcagccaagtgcacgcagtgaggttagcggcgagaggcagcgcagtgcgatggcgcagtgcagcccggttaaaggcagtaggcggcgcagtgtggttttgcatgctcggcatcccatgtattctccaatacagtcgctggaagaagctatcgttgatcaagtgctcgtcgtgtaaagagaagaccatcgtggatcgcacaatgatgacgatggagatagtttcactatgatagaaggtgttagtccttgcggttgctggcataaaaggtactccttgtttttcatgtcttaaatactctagtcataaaaaaaaattagaaaaatcataagattaacttaatgcgcgagatatcttaattcgcaagaaatcaatatttaacttttagaattgtagaaaaaagaacaaattaaagtccatagttatgtttgttatttttgttacaagttatagaagttaaatttggatttacatgcttgtaatgtgacatatcacatactacctccttttcaaaatgtacgatatcgttgacttttcacgtaacatttgaccattcatcttatttaaaaatttaatataaatatgtaaaagtataagttaatattatatttgtatttgatgataaaacaagttacaacaaaataaataatatttatttttttaatgcgatgaatgatcaaaagtcaatgtcgtcgtacatttttaaataaagggagtattaatctatcataataatttgtttttaattttttaataactatttaaatgatatgtaaaaaagaaagggatattaatgcgaggggaaaaggatacttcacaaaaaaaaattatttgttttgtgggatacataaaaggacattattttagatacctgataaataaagaatacgaagagaagctttctccaatgacagatgtggtacataaaaaaagcaaaacgcacgtcagtttttcatagggatacactaccacactttgaagcaagcctaaggatgcgtatattttctgtcagtcccgcaaaggactcacagaaaattatattctgtcggtgcacccacagggatatattttctgacggtaaaaccaatttttccgtggatttcgctcctacatagtaggtcgagtctggtagtggaacttgtgtcgtgtgtatgatttgaaaccaagatgacttatcgtagcaaatattggtgcgttcgacaactttcacagcattttgcagcagcacgcataattaagataaacctttaatcgagtaagtaattattaaaaaattaaaaatgatattatttgatttttttttaaaaaaaacgttcatatattaaaattattgtacaaaatataccatttaacagtttgaaaacatattaagggaaaacgagaaagtagacatttaaagttgatgaaaaaaacttagctccagttttacactgattaaagtgccacgtaggcatgcacaggtaggcgtcacgttggcaacataatactcaccgtgccaagattgtgaggagcggaggaggaggatgcagcggttgggcagcacgacggcgagcgttgccgcggcctcccgccggccaccggcgtcgagggagtggagagaatggacgtcgagcggcggcggcatgaagggagccgtgccgtcgcgcgtccctcctcctcgccgcagctcatccaatgccgccgtcgcagcgtcgtccctgacgtggatcgatcggctccccaggcggaggcgtccggcaatcctggatctgacatttggtgggtggcgcccggcaacagaattattcccggccgttgctggcgtccgggtggccagccagacctcagttccagagcccgacgactgatgggctgattacttgaggtggtgttcggacgaaaacgctaatccgcgaccggtcgcgcatcgcgcgcggagaggagcggcggacggcgcgtgtacggtattcccttttttttgttttttttttcttccggcgcgtgtacggtttcttttttttttcgttttttctgttttcttccgtatttttggtttctttttcctttgttttcgtttttttgttttcttccctatttttggtttctttttcttttttttcttttttatcgttttcagttttttcggtttttataaagtttgtatacgtgtatataaagtttgtatacgtgtacataaagtttgtatacgtgtatttttttattttttttatttacgtatacaaagtttgtatacacatatataaagtttatatacatgtatacaaagtttatatacagtacataaagtttgtatacgtgtatacgaatatacgtgatgttttttttagttttttatattttttaatatgtacgtatacaaagtttgtacacgttgtatataaagtctgtatacatcatatataaagtttagacactactttagactagtcgcgcattagccccccccccggtgtttggatccagagacttaactttagaccctgtatttagacattaatttagagtattaaatatagactacttacaaaactaattatataaatgaaagctaattcgcgagacaaattttttaagcctaattaatccataattagagaatgtttatcgtagcatcacataggctaatcatggattaattatgcttaatagattcgtctcgcgaattaatccaagattatagatgggttttattaatagtctacgtttaatatttataattagtgttcaaacatccgatgtgatagggacttaaaagttttagtcccatcaaaatagggtcttatctccaatttttttttagagagagagagagaggatttagtgaatcttttcattgaaattcagcggagtaaacagtggagtcagcaagggccgtatcttttcagcagtttcacttgcaggcggtcctacagtggagatgcaattggtggaccaactgtgggtgatcagaaggaggtgctggaagtctttagtaattcctgtttagcgtccaaactttgcctctttgtcatttggcgtgatttagagcttaacctcagttatctattgcaatcttctctttttttaaaaaaaagggcttatctaatgtaatcaattcaaactctttaaaggccatgctggtctagaagaagcacactactacataaataatctttccaaacggctaaaatgccgcctacacccagatgtctatagggataaggatttctccgtacgagcattataactgatcacgaaaatggaattttcaaaggcgggcatattatgcggcccgactaaaaaagatttttaaacaaaataaataatcataaactctaggtcccaaaggcgtcttccacgcgtcgcgtctagatccaccattgtcatcgctcgaggccgccactgccaccatcgtcgcgcccgaagccaccggtgtcattgtcgctccaaagatctccagtggcggagctgtcttcccgaggccgagagcggtggataggcctctcctgacactggcattgaccgctcccgagccattgggtccgctgtcatccctaccgaactcccacagccgctgccatccccgtgtgctcctcccaaactccccttcgttgtcgccctccccacgactggatgtacccctttcgaggccatggcggtggatctgtccttctagtggctgccgtcaccgctgctttcaccacctccggagcacctaacactgctgcggccttcaccacctcccagagcgcttgacgccgccaccgccttcgcctcctccaccacccaatgcgctgaccgctgcctccgcccgaagcaccactgcctgaaccatgaagtggaggaaggtggagtcgggggaggagaggagacgacgaggacttataatatttaagagagaggggattggcaggcagcttagtggcagacagggcctgttaagaggcccgcttgaaaaaaaattgatttttgcatacgggtttgctgccaccaaattcaggtgtttttgacttgatcagttggttggtgggcgggattgaggccatgctatcttcatttcctgacaaaaaagattatgtcaactgatgtaaacaggaaagaatggtactgtagatcagaaaaggatcatctcacactttggctgatcatcttttctagaaaaccatgtatagctatatgcagagctatgaaacaaaaataagttgtactttgcaagctaaggtatgaaataaaatgctccctatttaggccaacatgtcattgaactatactgataaaatgatctccgcaatgctatttagtatccaaaacaaagtttagctatatccatttgagtttttatctccacaagattcatccaccaacgtctagatatcatgcacgtgcacttgaatcttgcatcatgcattatttacagaggtaagtcaaattaatagctgcatcgataaatttttagcatttatgtcaattgagagtgaaagtgaaacaatacctcggagaggtactgtccccgtgtgcgagcttcatttccaaatcattctctcaagcagcttttctgcgggcagcataattttagtaagaaattaagctgagataaattgattgagcataattttgctgaaaacaggaaaacaaaaaaggaaactagctattcttgctgatttgttttcctctctcccactatagcacctgttattcaagtattatatgcctgtgaagaaaattgttactttcaagtgcatgagtatatggctatcctctaaacggaagtgatttaaaaggtacactacagcaatatataaggcatggcaactgggcagtaactggattttgactctttctttaagtaaaactagcacggtggcccgcgcagattgcgcggctagcatcattatattttctctcatataatagcatatatgttttcttattatattattaaaatatattacaatgataacataattttaaattttgcaataacttttcaaaactactaatgtgtaataactactctagtctcctcttctaatattccttatttttttaattctgaatttcagctatttctaaattgtatttctatatgtactttgctttttcttgttctctgattaatgtgagaatttctaggccatgagagcgaacgtggaggctcctttttattccgaattttagttggttttaaattccaatatgaactatatactctacttctaatattccttattttttaattccaaatttctattttttttcttaattgtatttctatatggactctatactctacttctaatatttcttatttttaattccgaatttcggttatttcctaattgtatttctatatggattctatactctatttataatatttcttatttttaattccgaactttagttatttcctaattgtatttctatatggactctagtctcctcttttaatattccttatttttaattccgaatttcaattatttctaaattgtatttctatatggactctagtctcctcttctaatattccttattttttaattctgaatttcagctatttctaaattatatttctataaggactctagtctcctcttttaatattccttattttttaattccgaatttcagctatttgtaaattgtatttctatatggactctgctttttctttttctccgactaatgtgagaatttctaggtcatgagagcg

SEQ ID NO: 9174 - DNA, 32823 bp, Oryza sativa
  unsure (1)..(32823): unsure at all n locations
tttcgcagtcctccctggcgtcctgcaacatctgaccaagatcatccgcaacgtcgttaccatcagcagctatttcctcctcgtccgtttgattttcttcaaatccaacatactgagcaaagtccagaatattgtcgtcttccacttcatcttcttccatttcaataccttgctctccgtgggatgtccaacaattatagcttggcatgaaccccgactcaaacaagtggaaatgaatagtcctagatgcagaatactccttctgattcttacacttattgcatggacaacaaataaaacccctttgcctgttagcttcggccactctcaaaaaatagtgcacgccgtcaataaactctttggaccgccggtcagcgtacatccattgccgatccatctacatgagtcaaaaaaaaaccgtacacaaataattattcttacaataatgacagtcatacaataattataagatatctttattcatacaaaaatcataaaatattacaccaaataaattcttaaaaactatttgtaaaactttaaactaattttaatgtgttttacttcttttaattttcattttagtttgttttctattatttaagattaactttcactagagttttccttctcaactattttataaaaccttgtttagcaaatgaactaaatttctatatattctttcttccccacacacattttctctctcatcaacttacaactaaattttggagaaaaaaaaagtgtgcaaaacataggtgcaaatgtagtatgacaaaaaaaacattggaggatgaagttgcaaaccttttaggcacctccgatttgtatgtaatcaccaaaataaattcaatagaaattttggcatgacctcccctcttttttgaagaaattttgaagcttgctcgggcagctagaggaggaagaagacatataaataggggtggaactttagtcctagttggtagcaccaaccggggctaaagatcaccaggatctttagccccggttggtaataccaacagggactaaagttacgatctttagtcccggttggtaataccaaccgggactaaagatcccggggagcctgacatgccctgacagcattcgaaccgggactaaagatcttagtcccggttggtgatcaaatatgcccgttacccttttgaaccgggactaaagatcatctttagccccggtttttattgcatccgggactattgtggaaatcggccaaccgacgaaagatggtttctccaccagtgatggatagcgtctaacgcagcatggcgcccgagatttaggttgggtagattagtaatgccaccgttacctaatagggaagcataatcatcaccgatggtcaaacgtgtcacaggttcagggattagatcagcatacttttcaaatgcatgccaattcccactcctgtttgcaaatgcgataacattaaggttatcagctcgtattgccagcatcgtgatgtcatcccctcttccagttagatttgtcatcttcatcgatgccggtggatggtacaacctctgtcggtcaagaatatatgtataatcaacatgtagtccacttgaggtgcgaatggtagatgcaagaagtgtttgaaggatggagcagtaagagcccctaaagaagtcatgctgcaaaatttcgaagggaggccaccaaatactgaaaacgagaaaggagaattatatgagctcataggacagacaagagacacaagaactaaattagtacatcgaatgcaaccacaagaaatgcctttatgcatacctctgaaagagttcatttggctgcaatgacgatctcacgggagaaacaaggcacgtgataaccaccaccttaatcataacaaccatgttgatatgtgccattgatgctcgttgagaagcgttgagaagagagaggattgtgctagcttgtggctatgcaaggttggactgaggaacagagaagattcaatttgtggggagaatgcaccggcatacaaggaaaacagtttacctttaagtagtcaagcaatcattgttgttgggctgccgttgtatagtgtcatttgcatgatctcgtttaagaataggcaaggcatgatattacatgcatacaatgtgggacaacattagttcgctggcaaaaaattttacaacatgtcatatcaaacgtttggatacatatatggagtattaaacatagaaaaaaaataactaattacatagtttgcgtataaattgcgagataaattttttaagcctaattagtccatagtttgacaatgtggtgctatagtaaccatttgctaatgatgaattaattaggcttaataaattcgtctcacggtttacaggcggaatctgtaatttgttttgttactacctccgtcctagaatacttgtcgctttgagtttttttcataacttttgatctttcgtcttattcaaaaaattatggaattactctctccgtcccaaaataagtgcagttttacactattcatctccaaagtttgatcgttcgttttatttgaaaaatttttagattactatttttattgttattacatgataaaacatgaatagtattttatgtgtgactaattttttaaaaaaatttcataaatttttcaaataagacggacggtcaaacgttggacacggattttcatggctgcacttattttgggacggaggtagtattatttatttttttctgtgatttgctttattatcaaaagtattttaagtatgacttctccgtttttatatttgcactaattttttaaataaaacgaatagtcaaacgttgcaagaaaaaaatcaaaacgactactaatatgagacggaggtagtattaatctacatttaatacttcaaatgtgtgtccatatatccgatgtgacacgctaaaactttacacccttggatctaaacaccccctaaccttatttgataacgtgggaatcgaagcatgacaagacattaggtttctgctgaaattaatgctaggacagcaatgtacagatgatggaacaatggacattgcactagctttgctaattgctacccttaggccctgtttagagcctgtttaggcctgctcgaaaaaattttcaccctgtcacatcgaatgtttggccacatgtatagaatattaaatataaaaaaataactaattacacagattacgtgtaaattgcgagacgaatctttcaagcctaattatgctatgatttgacaatatggtgctacagtaaacatttgctaatgacggattaattaggcttaataaatttatctcgcagtttcctgacggaatctgtaatttgttttatattagactacgtttaatactttaaatgtgtgtccgtatatccgatgtgacaaccaaaccaaaaaattttcccaactaaacaaggcctcactataaaaaacactttttcctggtnnnnnnnnnnnnnnnnnnnnnnnnnnnnnnnnnnnnnnnnccagtgaaaatacaactgggggtcctgcaggttagtaacagcttacaaaaattaattttacaagtgatcgtactaacgtagcagcttgtgaaaataacccaaacaggtattaataatagagtaatatatatgtaggaataagtatgtgcaccttttatttttagagcaatttacagacaattattcaatcgaatccctctcaataataactaatggccaagccaaagaaataagtagacccccacaggaaagagtactaagaatatcgcatataaagatgttatttacgggtaatcaaagattggttcgcatgattaaaattaattcaaaaacataatctacaagataataaattgctgatggcatgccctatatctaggtagaatgaggatatcaactcatgggaccaaataatagtcacaaatccggttctggacacctatgtgtttttcaagaaactcgttcgaaccaataaatttatttgtctagctaacgcaagggttcttagttcacactaaaattgaaagtttggttgaaattagaatgatgtgacggaaaagttggaagttttgtgtgtagaaaagttttaatgtgatagaaaagttaaaagtttgaagaattattttagaactaaacacggcgtaactattcaaatggttaggaacttgtcaggttgtcttctatatctcttcgtgcgtgcttggagaaatgaaccactatattttgctagcttttaaggtcagtcccgactagcattgatcatttataatattatattatattatattatattgtaaataaatgcatgtgtaggatggtgacaagctaaggcagccattgttgctacatctactaatgtaccaataaaataagtgtgaaagcaatattcctagcggcccacgagattttcttaactgtatcataaatgctaaatgttacggtagttattttcatgcagagtatattctacatatgtatagagtgctttattttttttacttgcttacacccgcaacaaattaataaaatagctctatatttttaacatattttttaaacatataccgccttcatatattgtatactgaagtgattatatacaattaattctggtcaagatttattgtgccaaaacaatatcatattactgtactttgtgtgtattttatatgaaatatatttgatatacaatatgaattgaattagagctcaattgtagatataatagaaaaatattatttttgctaacattaaattttaaaagttattaaaaataaatagaatagcaccatagtgtttagcagcatatttctagtttttatggttgttttgatatggtcttggcaattgttttgtagcggtgattggtgatgaaaataagaatgaggggtactgttttagatgtcttttaatcattggatttgtccctgtagaggttgtcgttctgaatcaacatatggatagaagatttgcttatcattttaatagctcaaatgttcaaatacttgggcaatacgttcctaaaattttatagtggattgcatgttcaaggcaagtatgcatctattaagaaaagttggtgagatttagcaagttgtttataattggttgagaaaagatgatagataaggaattactatggtgtgtttgattggatgaaaatagaatattggtagaaaagttattgtatttttggattaatttaaaaggttaaaggttgtcatattttagaacagatagagtatttaaaattaagtttgaaatatgtataacagtgtgacatgtaggaccgtgcatgcctcgacctgatggatctgtacgcacgtagaagtcatggcacttgcgccatgctgctttgcctgcttgctgtcgagtctcgcacgaaatcgctaaaaacagtctcgcagccctccgcgacgccgcgcccacgccaggtctcggtttgtcgaagaggtcaggtccccggaaaagctagcgcgcgggttggcggcgagcgttttcggatagtttagcctaactaagtgaagttattagtagataataatggtaattaagatatgattatttttcgaaagatttttttttgtactaaccgattgaaaactttcaagtttgatttgaaaatctttgaagtcaaattttaaaaaatttcaaaactcaatttgaaaattttcagctcaaaatttaaatgtgtaagacaaatttagaaaactttcaactcagatttaaaaacttttatctcgagatttaaaaactttaaagtacagatttgaaaatttttaagttaagatttgacaaaatatgaaaactttcgactcagatttaaaaactttcaactcaagatttgaaaacattcgactccgattcgaaaacttttgactcaagattcgaaaaatttcaactcgatatttgaatactttcaaatcagattaaaaaaatttcaagttaagatttaaaaactttgaaaaaaatattttgaaaaatataagtgtgctaaagactaaaaaaaagtaataaaaaaactaaaaaaaagaaaaaaatcgcaaaagaaaccacgaaaaaacaaatcgcgaaaaaaaaaagagcttatgggcttttctgagccagaagcagctggcgcgcggcaactagtaacgccctcgagtctcggcggcatgggcatggcacgcccatcacttattcgcagcgaccattcgctactgatcgccgcgcacgcaccgcgcgagcggacggacgacaggtcgaggctataatggatcggaatatgggaggctctggcatggagcccaacgaaaaagaaagcaaggcccatagcaccgcaccgtaaacttgaccgagagaacctggacgaaacccaaaggaaacccaaatcccggtaaactgatttgagctttctggatgaaataagttcatctgaggtcttttaacttgtcaacgaatccgatttttatccttcaaccaaaaaaatcagatacaacgtatccctcaactgtcaaaaccagtgcaatataggtcccatgacggtttggacggcggttttcgctgacgtgacgcccacgtgactattttgactcggtcttcacatgacgtggcaatgacatggcgcttacgtgacaatttgatttggaaaatattaaaaattgcagatccacatgttagtttacacaaaaaaaatagattaaaaatggtgggttctcaccctcctcttcttcctcctctctacccaactcccctgtattcactctctctcccctctcctctgtcctctccgacggccgaagagagatgcggcgcgcggcagccgggcgaggaggggcggtgccattctgctgggcatcgtgggcggagcggcgggcggctgaacaacccctaccaggacctcaatatcccctacaagcagctctatgacctccccacctccctggagttcctcttccaggagtcgctcgcccagcgctgctcatggggtgagaacctcacctactacaccagcataggctaactctcgggcgccgccgtcgacctccgcgacgccgcccgcaacgccgagcccgggacaccgctaagatccgggtgaaccgcatcctcaactcatgcggcagggccactgcatggggaacacgctcagggtcatcggcctgctctatgccgggagcccgggatcgagagtggcatggtcaccgtgcgcgaccgtgacgactggatcaacagcgtcaccgtggggctcagcactggcgcgctcttccgcgccgccgacgggtcacgctccgccgccatcactagtgccatcggtggggtcctcaccggtgccgccatgtcaggcaagcaggcggcgaagagatatgtgcccgccctctgattcgtctgcacagtattctctctgcccctcctcgcccggccgccgcccctcctcacccggcggagaggacagaggaaaggggagagagagagagtgaatacatgggagatgggtagataggaggaacaagaagagggtgagaatgacatgtgggacccatgtgggtcccatcatttttatcttttttttttgtaaactgacatgtgggtccacaatttttagtattttctaaataaaattgccacgtaagcgccacatcatttccacgtcatgtgaagaccgagtcaacatagccacatgggcgccacgttagcgaaaaccgccgtccaaacagccatggaacctatatttagacagttgagggaccggttgtatctggttttttggttgaaggacgaaaatcggattcgttcacaagttaagggacctcagatgaacttattactttctagattgggcgaggatcccatgtgaattgggccttcggggattgagcgaggatggagaaagtctattttgctccgttaactatggacgcagtaaaatcagatatgtagtcccctcaactattaaaccggatcaatttgtctatcggacggtttttattgtggttttgccgatgggtcccacctaccattaagtgttccattatctttatctttatctttgcatgtagcctagtagttgcaatgacctgagtagcaccctaagctcctgagttcatatctctatagcagcgaatttcagatttggttgtttgaggggctaagttccaaaattaagaaggttgcatacattcggttggatgtagatgttgggtaaaaaaaatccttctctaaaaaatatctttgttctctctccctcggctggacacaatcacgcaaagatgggtggcatcggagcctcgttccgaggctagtggctaacgaagaccatcggagccgagcagtgagggcatcatcaaaggggataagaacatcacgaagtagcccccaactccaaacctacggctggtgttgctttttttttcatctggcaacggctgtactttcctcttctcatcatggcggccatggacattgtacctgtggacggccccaaggtggtgcagattttgagcggcgtggtgtcgagtgtgttgtgcaccaactagaggagtggcgatggtggtgagggtaggcgcggtgtgcaacgacgagatcaggggcaggtgcgtcgcgccaacaggaggagtggcggtagggtcggtgcaggcgtcggtgctgtcgtggtcattggacggggagaggtcaaggttggagctacgatcaggtgatggttgggccgaggtagaggcagagccagtctccgaccccatcactccttccctttcctccactcttccgcaggaggggaatgacctctgctgctcttgccaatgacgaggaaccaaggaggaggatggaggggacgtcggccggcgcacatccaccactacctaggcatcttctctgttggcggcaacctctcctcaatgttgtcgttgcttgtagtaccaccgccctgcacagtgctatcgtccgtgcaatttgggagagtggaagaaggggatggctttcactgacttgtggtcctagtcaaggctatgtggcgccacgtcaaaggaaaccagtgtcaaaatcactcgggaggtagattgactggttttttttttttttgaggggcacgaatcaaactcaacctatagttgatggtggtaaattggacttaatccaaagagatcgatcccatacgaattgggcctttggaattgccacttgagctttcactgcggtatgtgggcccactgacaacaacgttgcttaaggccgttgataactttacaagaatacatcgaaggagagtggagaggaaaacaacgagctcatcagtgaccagagagccagaggtccagagcagaagataaagcgcacagctgacaacacacagatgccaaatccggcagcacgacgaagcttctacccgatcgactgaagtttagcgatagccggtaatccgccctccagattaaaataaaatcctgacgccttctagaaccccttgtcgcaagcaaaagccccatcctaatctttcccatctgcaaataagaaagaccacacatcgtcggtcggtcctactaatcattcacaccccccccccccccaccccccccgagatctctccacagacacgagaacattgagaagcacgcgcgacaggaaaaaagcactgtccgtgcgacgtcacctcgcccacgcaagacgctgtctcgccggtcgatcgtcatgtacccacgccacgcgagtactaccatcgaacagcacaaccatcgatcggcacagctcggttttacggtcgcgcgactccgaaccatccaagggaagacgccgacggcgacaaaaaagaaacccaggataccgccccgcccgcccgtcccgtccgacgtccgcgtcacgcacgcgcgcctgctcttgccgctcgatccattagagaagtttaattttatagccaactattacttttaaattatttatagtcaaatttttttataggatatttatagtcaaattaataatcaatttatacaatagttatctataaatataataaatatatgctacactattaatttctgatcccacctgtcatacacatattgtttcttaaagttcgtgctacagctgactataaatttgtagcacacgactcttctcttttctttttatcttcttaaaatatatttatggctataaatcttcttttcatctccttagagtctgctcttactgatcggttccgtctccacccaccgttgcgttgagtcgttgacccgcagttcccctttgttttccacgtgtttcttccacaaatcgcttggcgccgcgtccgtgcgagcccccagccgccgccgagcccccacacatccatccactctcgcggactctgaccagctgaccgctgcgaaacccgcccgcacgggcgcacgcgcgcgcccgcgcccgctacaaatatgctgctcccccgcacgtacgccgccgtgtctcatcacgagctcgatcgtttcccttcccccccaacctgagcgttccaacttccaattcaagcgcgcgcgcgagagccgatggatcatggcggcggcgagaggaggagcgccggcgcctacgaggcggcgctgagggcggtgcagaggccggcggcgaagccgtggcgcggcggaggaggaggaggaggcgcggggggatcggcgggtgccgcgggggcggcgccgcccaaggtgtaccgcgtggcgcccagggacttccgggagctcgtgcagaggctcaccggagccggcaccgcggcgccggcggtggccatgggcgcgagccaggctgtgcctgcgcccccgccgccttacgcgggtgtcccggcgcacgggcagagcgacgcggcggcggcggcggacatgttcgactacgcgtcgtggttctccgtgccgctgctcagcccggcctccatgccggccgccggctacgacggccagctccaccatggacatggtgctttactgtagttttagtatagtcgctgtccttgtaagatcgagccaaattttgcagttcgatcgcttcttcttcctgtcgtagaacgcttgtattagtttcttcaaaaacaacaaattcaaagaattcgatgaataaacacatgaattagttctcggcggcataaagaacacaattttcagtgtttaatgatgtgactaccctctttggtttgactattgctgacgtgtaaattattccctggttatcttgggttcatcgttagctaggcctaggcggctgtggttaatagaacttaattaagctatcgttgtcaacgttgaaacttttgttatctagatggctcaaatttagcatgtgagaattcggcttatcaaatttcgcatcttcttgtattaagtaatgtacgctcacagacaaaggtaatggcatgcagttgcttcatttcattatgggcgttcaggggatgcttgactaaccggaccaagttgagtactccatcctccgctccaaaaaataatataacgtttatcttatttaaaaaatcaacataaatatgtaaaaatataagttaaaattattttttatgatttaaacgtcacagcataaataaataatatttatatttttaacaatatgaatagtcaaacgtcgtgaaaaaaaagttaaacagtgtcgtatattttaagacggaggtacgagatagtagttgagtagggatatatttcacctgattttactttcgatggacaacataaaggataaattgtcatcaacaatatcttatcgttaaggtgatcgttgtctactacctccgtcctataatataagggattttgggtgggtgaatgtgtgtccagattcattgtactataatatgctatatccatccaaaatctcttatattataggacgaagggagtacttatctagattagagtgacatatccacccaaaatcccttatattatgggacgaatgaagtacttatctagattagagtgaaaattcgccgacacgttcaattcatcgcttgaacgggctgcggttgatggcacgaggaagtgatcacatagactcagttatatttgaattttataattaacctataggttaatttatccctccccctaaaaaagaaactctagctagagtttctttttctgttgatttatccctccccctaaaaaataatttttggattgctaatagtagaaatataaaggtttaccttaattaaaaattatttgtttgttttttttggttaataggttataaatcagccggtgagactcgaattcttacgaaagatctcagggaaccatgtcccctgaataataatgccacggtaactttctcatgctgatccattggtgaattcctaaagtctcggtacaagtttgatgaacaaccaaggaaattgaaagaaactatatttttctatatactaggtgagatccgagctttactacgaaatgcatatatagatgaattggtgttaaatattataaaataatggatggatatatattaaaatatttgtggaaataatgtgatcaaaatgatttggcatacttatacgagtcatgcttgcatgagatgagattaaaaatgctattgttttgagactattgtcatccaaacttataattaacatttaacatcatagatgagcttaaatgaaaaatttgtccactccaaaattgtatatctcgtctatatctacaactttcatataggttttatcttcatctgagattgtttagaaaatttaaatattcatttatgtaaatagatccgagacattaaaacacagtttcggatatccaaacgaccttcaatcaaaaagtcgtctactataaaattgtaggtctcatcaagctctacaaatttgatataaaatttatcttcatccgactttatatgaaaatgttagataaaaaatacacatatatgagttggtgtcatcataggtgtcatttttaattataaaccggaagaaccagcacatatgtgatgcatatatatactgattcatgataaaaatcgatacctatgacatcacacttatatgtgccggtttttgttacaaacttgtaccgagtgattataggtaccgatttattaattttatacttgaaaaaggtgaaattagttttatacttgaaaaaagtgaaaaaaaaagcttcatgggtgtccttttttggtaaaccggcatctataagaccggtctctatgtgatgttttgtagcagtgttaacttggcatatcagtaaaaccagttatctatactaccggaggacttaatttaacgcagttttataagttaggagttcaatatttctactattacggtttaaaaataccgattaaacttgatgtaaacatgaggggttgcaagtgaacttattatgtgcagaaaccacccccacaaggcgtcaaccttcaaggcctgtgacagtgtctactgtgactgctgggccgtgagctgggcctgagggaggagggagatccgtagagacaaggccacaagtggacgagatagctagttggcgataagtcgcacgcccccctccccgcgcgactagacacatgtcgcgcgtggagagggggcggcgacgcgccgcgcaggtgaggaagagcgagttttccctcttttttttgttttttttacgttttttccgtttctgttcggttagttttcattttttttccggttcggttggtttatctttctttttccggtttctcttctgtttttttccccttttttttaaattttatgaatataaagtttgtattcgtatgtatactaagtttgtatttgtatgtatgcaaagtttatatacgcgtatgcaaagtttgtatacgcgcatataaattttgtatatgttgtgtattttttagtttttttattttttaatacgtatgtatataaagtttgtatttatcgtatacaaagtttatatatgtcctatataaactttgtatacgtcatatatatatataaactttgtatatgtgtatatattttttatacattaaaaatatatttatatatatacgtatgtacttactatatacacacgtgtgtatatatagtatatacatacgtatcagccgtccccacaagtggacggtgcagcatccctggcagggcgccgaggccatggccggcacagcagttcagcagtgacagcagcgactccaattcagtgtcgtggaagacggtatacggatatcggacggagagggtaccgctaaacgattaatcggaatgcggacgattaatcagaatttggcggaaatataacgttttgaaaatatatgtacatagttgataatagttttcccttctatatatccttaaatagaataaccatatatgatatttaaataagtttataatggatagctgttactgtatatctcaattctcatgtagtgatgggttttgttcataatgcatgaaatgaattatcaagagaatgtagtacatagcataaatgaccgtaatcaaggttccaaataacatatgtatcggcttcatcaaatacaaactccaataacgtgatcatcgtcaaaatcaaggaactcatgttcaaactttagaggaagtcagttccttgtcattttacatctttctgccttgtgagaatttcggaagagcaaacttctagtcaatagtagtaaagggcacagctaatgagttggattgtggaatcgacctttgtcaccacgctgattatacggctgattagacggagacggacgatttaatcggtaataattggatttatgcgtttgttaccgactaatgatgaccgcatcggcgtgacgtgacggactgatctccgtatccgtattatcggacgtattaatggccgttaacatcgttttccacaacactgctccaattaggaaaagagaggaaatgatcacaaagaggtaattgatgaccttatttaatttgaaaaccattactcattagcaactacaaattaccccattgacaagtagtgtagcagcattgcagcatcagtaagagaacaagccaagagctagaagcagaggagtaatgcttttcttctctcctgacccacctaaattttgggtgttctctaccactgggcacaggcaagcttaggatgatgaccagcgcacaaatctcacgcaaggaagggaagtcgttttgatcctgggtatgtcccctctagtttgttgaactatttattctaaaaaattaatataaaatcttaatcttgaactcaactcacaataagataaaaaaaaggattattcatagattgaatatgtctttttctgtatgtgtagttgaatttgaacttgttttggtagagtgatagatgtcggtgtactctacatcatcaattgttttgtataactgtttgtatttaatttagaagaaaagaaaaagatgcacgagggacatcactccagtgattagaatccggttccacaatgggaactagattctctgctgttttcccaatcacctgactagcaaagatgtttacacatagctagttctctttattgattcatggcgatgtactataccacacacacgtaccacaaccagctaataaacagagaaaggaacttaaacaagaacacactgcatgcatctgatctgattatagctaattaattaaacaccagaaagcatcacctcaaacttttaaccgcacatatatatatatatatatatatatatatatatatatatatatatatatatcctcttcatcacacaccctacttgtactcttcacagaacccagtgaatccgtggtgccggcgccgatatatcgaactcggcgtttgggagattcagcagtaggcggtgcacttggtcttgcagtcgatggtgcagccgccgccgccgcccccgccgccgtagcccttgccggagctgctgtaggacgagaagcacttcttggggcacgtcaccttcttcctgtagcacgggcccttgtcggagcacaccaccgtgggcaccaccacgccgccgcgcgagtacccgccgctcggcgtgccgtaccctccgccccacccgccgcccatcccgggcacgttgaacccgcccatgccgccgcccatccccgggatgctcccgaaccccgggatggtcgggatgccgccgccaccgccgccgccgggattggtgcccgggtaacccggctgcacggacggcttcctccccgccggctgcttcttggcggatggcgcggcggacatgaggtcgcgggcggcgaggggggctgtggcggagagcccgagcaggaggaggaacagcgcggcggcgacgcgggcggtgctggccatggctaagctttagctagagctagagtgagctcccttctcgtcgatctcgtggagttaagtagggaaggaagagtgagggtgtgttaagtagtctaaagtttttgaaatatacggaacacgtatatgaagtattaaatgtaaactaataacaaaacatattatatattttacctataaactatgagataaatttattaagtttaattattatattattagtatcgcattgtcaaattatagtgtaattagacttaaaagatccgtctcgtaatttatatgtaaattatgaagttgactttttctatatttaatatcatacgtatatatttaaatatttgatgtgatatttttggctaaaattttttagatatagaaaaaggcaggatgggcaataaaggtggcaagatatggaggaggttggggaggccacaggcgcagcgcatcaccagcagtgcaatgtcagtggagtggagttatggcctctctttgaagtttgaagttttggtccggctcgccaccggcggtgctctaccttttgactcacaaatcttccatgtcatcatcatcatcaatgaaggatacattacgatttttcgtttggccgccggccaataacgcgactcacgtgaacgtccgtacttgacacgcccgcgaacgttgtgctacacctgtttttttttttcggataataaaagaagaatattttttattaagaagagtaaaagtatttacaggtgttgcaaaaccaagaatgaggaggagaaagaatacatgagaaaaggactgaagcctactctcacagaacattttgcgaccaaactgtcctcacgttatcggcgttggagctgccatatcaccgtctcttttgccattgccttcccaacctcctccagtttttctgttattgattaaatacatgattatttcgctctttccaaattgaccaagacgtaggagcagcgatagtgtcgaatccttggtgtttggatttggcaattttttttcctgttgtcgcacaaccaaccatgtaaggatcctttattcattggagagcattttgggtgatcgattgtcctgagtatcagccaccaaagctgtctcgacttaggacatgtatccagaatgcgatcgatgcttgcatcatgttgagcgcaaagaacacattggctagggtgcggcaaacccctgatgcacaatatgtccatcgtccaacatcgcttcagagcaaccaatcatacgaagtagtaacaacgcggtggtgcgagcgattttcaaatcggtgctgattgaaaggagactcttgcaaggaacaatgcttggtaagttgattgagaagggaaggaagggggaggggaagagttgggaagtttctcatcttagagagatactaggagatgcggcggcctaaggttggaccatggagatggggcgcaacgacggtatcgctcgagttgtgaggtcagcagcgggagcaaagtagaatggagatgttaggaggcgaagggaggtgctaatagatccgctcaccaaaggtggagaagggtggggcaaatcaactataagagacggatgaggaaggctaggtaggggcacctcaccaaagcatgaatgtgtggtcgaagggaggcgtcaatgtccggccgtccatggtggagatacggaggatgggggtgtataggtaggggtgggcattcggtctaaccgaaaatttcggtctcaatcttcggtctttgaaaagtaaagaccaaatttcagtgaaaaaaatgtcaggaccgacaaattcggtctcggtctcggtcctgaccgaaattcaacaacattttcatatatgcaaagaaataatagaaattttcaacacaaaaatcacaaaaaaaaaatcgtaagcacttatgagtaaagactcttattatgttacatgcctaaaaaaggtaggaatgtgaaaattagagtttaatcctattaaacatagtggattgtaggttgtatttatacattttttgataattcggtctattcggttacccgaggagactaaccgaattgaccgaacaaaattcagtctttcactacctaggaccgaattgatgaccgaatttcttggtctcggtctcggttttttcggttcggtcttttttttttgcccacccctatgtataggaataaggggtaagatctcaaccgttggattacaattgtatggtccaaaaattgccagatttgaacctaattttctatcaaattatatatataggtaatccctctatttttcacaaggaacatatgtttctctttctctatagatttaggtatgtagctaatccgattgcccacccacttagcagcaggttcgacatctactataaaatagagaatccacttcacaaccacgtctctgctaggcagcgtgtggaatggccgggaacggaccaaatggatataatccaagctgagagtggagttacgtgaacagccatatgatggaaaacaactttcatgttcatagagagcagttcttttcgttgagaataagtccttcccacatacaagtctgcaactcagggcctgtttagttcgcggaaagaaaatttttgggtgtcacatcagacgtttaaccggatattggaagaggttttcggatacgaatgaaaaaactaatttcataactcgcctggaaactgtgagacgaatcttttgagcctaattaatctatcattagcacatgttggttattgtagcatttatggctaatcatggactaattaggctcaaaagattcgtctcgcgatttcccccctaactgcgcaattagtttttttaatttatctatatttagtacttcatgcatatgttcaaagattcgatatgatgtttttgagaaaaaaaatttggaaactaagcagggcctcaatggattaacatcccagtcgtgcacgctgtttcgtcacacttgaatcggatgcatggcacgtagtacgtgtggtgtgcaacggtgtaaaaggcatccggtggagcgatcaagcaagtcgccgacagtgaacgtgggaggaattgaaggcgagggagacggcggctgatgctgcggcatcatacaggtcactttctggcaccggcgctgctcctgtgtttcaattcgttcagactttcaggtcatttgggggtgaacatttatgaggctttttatctgaacctggacagtgctgaggctgtttccagattggagaacggaacacccgaattccagatcatttctgaaccatccacattgtaaggccgagtttagttcctaactttttcttcaaactttcaattttttcatcacattaaaacttttctacatacataaacttctaacttttttcttcaaactttcaattttagtcaaacttctaattttagcgtggaattaaacacagcctaaggttggagtaggagttgtagggcctatttgggggagcttctaactgttgcagcttctcccagaattagaagcttccctaaacagtacagcttttgatccagattctaagaagctgtagttgtagaatctagaaaatgaactagaagccagaagctgggaaacccagcttttccagattctgagaagctggctaccaaccaactgtttctcagaatctcaagctcccccaaacaggcccgtaaggccatctacaatcggtatccccaggtcgtgcccctagccgacgtcgtcttgttccaaacggaaaagcaaacgaggcgtcccctcgcaggaccgcgcgacgcctcactgggggacacgcccccagctcgttctcgcgcaggcgctcggggtgaggcaacccattgcgtgggtaggttcttgaggcgacgcaccccagagcttcgatttcctcttccacccctctcccttttgtccccggcccatgtgttaagggcgaggctgaggcgccgctcgccgccggagagaagaagggagggcgaggagggaggcggcgccggcgagcgcggtgaagaaggcaacggcgccatcgtcgatgcggccaccgccggcaccgccacagtctcctcgatgtagccgctcgccgtcggagagaagaagggagggcgaggagggaggtggcggcggcgagcacggtgaagaaggcgacggcgccatcgtcgatgtggccaccgtctcctcgaagcagcgcggccggcgccgctccatccgccggggggccagatccggccacggcggcgccggatctgccgcctccagggtcgccaccgccaccttccacgggagagagagagagagaggccggatctaccgcctccggccaccggacgacgacgacgactgccgcctccaccccgtgcccttgattcggaggcggcggcgggagacggtggaggcggcgggagagagagagagagagagggagagggaggcggcaggcggcggcgagagagagggaagcagacggcgagaggaacgacaggcagagggagagaggaacgcgcgtacaaagggagaaagagagagaggggggggaagagcggggtagaattggaaatagaggaagaggatagaggattttttttggttggaacactcattggactactcagatgtggcctgcattgtagaggtgagtaccctcagttagcgagggcactatagaagtggcttatactgtagatgccctaatttagatcaagcttttaagttccttgtatgaaagtgcaaaccaactcaaaacaatttactgcaagagtctcattctcggaactcacttgctgcagaccaaaccagttgcttgcatccagcggcggtggatgttttctgccataaattgctgtatctgctcggctgaccaaccaaattactgtcctaactcatttgccatgcctctgcatcatcctgcagataggccacacaaacagcaagctgcattccattgggagaaaacagctagatgagtcattctaaggaggacccactcgaccatgctttctgcaaatatatctgtatatctctcatatctaactttcttagataatggatggataggaaatcggcaatctccatcctctgttcatatatctgtgatctaagctaagccactctgttttatagtattcctatccaatatgagctactattgtactactcctctatagtctatacacgtaatgaacaccactcaggaatcgctaacaataacatcatgtcgtcgcaccgaaagcagggggcaagtagataaactcatgagttggaacttgcaagtcacaggctaaccaaaagccaaaagcaaccacaatggcggcctaagtgccttttttcaccactgaatttacatagaagagtaactagtagactagatacaatttgtcaaggctcaggtaacataactaattaactgagtagtactaataactattgttgtggggagatggaaacaggatcaaagaacctctgttgtgttcttcccaattgccatcttctgcaggccaaaaacaccacaaaattcccaccctcctggctaaattcctcagcatggcatcatctgtagaactacaaaactagcagaatatttactgagataaatgtataacacacacacaaagaagggctttagttgcattacgaatttgcagaaggggaggaaaaaaaaagcatgtttaccttgatagcatcaggaatcatcttcatcctccccatcttgcacaaaaccccctcccatctcgcaaatccagtcccagaccttcgccggcacgggcatcaccgacagccgaggctgccggagcagcgcgaactccctcatcccctccacctcgccgccgccgccgcccgccgccttcttgatctccccgagcgccaccggccgccggaactcccccaccgcgcggacgtccaccgcgccgccgctcgctgcctccccctccccctcgtaccactccctggcgacctccacgacgccgacgacgcggcgggaggcggcgccggcgccggagtggtagaagaggcagcggtcgcccacccgcatggcgcggaggccgttgacggcctggcggttgcggacgccgtcccacggcgcgacgccgccgccgggggcgcgcgcctggtcggaccacgaccactcccccggctccgtcttgagcagccagtacttgcagttgccggcggcggcggcggcggacttgggtgctgctttcttcgccatcccgcgtggattcggagctccggcgatcgccggggtgaggcgaggcgggttgttttggcgggaaattgggcggctagggcttgtggttgcgcggggaattcccaatctcaccatcgtcttcccactcccgctgcctctcctgctcccaaaacgtagtagaaagatgcaccttggtatgagctgggccgggctatctataagcgggctttgtccagataggcccattatgggaaggcccagcaagatagatagacaggacggactttttcaacttcaaactggcaaggaaaaagtatactgtgactccctcaactatcgccagagtatgattcatatcctccaaccacaaaaccgggtatatagactcctccaattatcaaaaccggtgcaaacaatgtccctcggtggtatactttgactccctcaactatcgcccgagtatgattcatatcctccaaccacaaaaccgggtatatcgactcctccaattatcaaaaccggtgcaaacaatgtccctcggtggttttggaggcggttttggctgacgtagcgcctacgtggtggtcttgactaagtctttgtcctacgtggtgcttacgtggtggtcttgaccaagtctttatcctacgtagcgcttacgtagtattagaataaaaacaaaaataaaaaaaatatgtgcgacccatatgtcattcacacacaaaaaaaaaagcattgtgaaccgacatgtcatcctcccactaattcccttcttcctcccctctctctcccttatctctctctcaacctcccgcctttctcttcatcttggccagagcggcggcggggacggcagtggggagcggcggcggcggtggtgaggacggggtggtcggaagcggcggtggtggcggtggggacgatgacggcggggagctgcggcggctgtggcagtgggagcggcggcggcggcagtcaagagcggcaacggcggtggcggcagcggtcgggaacggcagcggtggcggtggggacgaggcggcggcggtcgggagcagccgaagcacgagctgctccccgaggatgggaggtggttcatggatgtcttccatgtcaccaaccgcctcggtggcaagctcaccaacgacaacgtcattacctacatttgagcaggttggtaggttttcttggtggtttcttgatggaataagtccatattgcctccctcaactcttgccattgtttgaatcatctccctcaaccgcaatattggctcccttggctgtttggatagtggtttcgtcctacgtggcacttatggacccacatgtcattgagaaaaataaaaaaataatcatatatgtcagccattctaatcttaattatttttcttttccctcacctctctctctcccctctctctcgatctccgacgaagcgacgatgacccacccgcctgtgtgtcctctccttcctcggctggagccagcagttcagttgttcgcccgccgccacccctgtagccctatgccggagcaggctcctacgaaggtcatgacagtgccccgggcgagggacaagcacgcggacggcctcgtctagcccgttgacctcgccatcttggtcaccgacgccgcccaaggcaccatgcccactggatttgtgcgtgacaaggccgagggaggcaaatccggtggtgtcgcgcccctccgccacccggcggcacatgtcccgtgctccctcgccgctaggagtgcttcgagcaagaagagggtggaggagtgcttgcgacaagaagtctacgagaaggcaccgacgccggcaagaggtggcaagaagtgctcacgccatccttgcgacacgattcagtcaagcgccaacgcatatgccaaattgccattcttgcaatgcgatttagctctcatcactcacctctcgtctcgccagcaagtcagcagggaaaatcaccattggcctcttcggcgacgaggtccccgccggtgcgtcccggttcttgtcgcttggtgttggctagtcaagattgtgtggggctacatgcaagcaggacggcgtgatgtcacacccggccatcccggtgactgaccggctagcggcggagatggacgccgcacgcacacgcaatgcagtggggacaggagtggcgtccacggtccacccaactcccgcggcagaaggcggcgaggcagcggtgaccgaacaactgagcttgtggcgcccgtcgaggaagaagcgaccgagcgagcaagcgagtcgtcactggacaccggaggtggagagagagagagaggaggaatagagaggtgaggaaaaagaaaaacaaataagtgtaacgtaggacatgtgggggttattattttttttctcactgacatgtgggtcccctaagtgccacgtaggacgaaaccgctatccaaacagccgaatgaccaaatttgctctggttttcaaagatggaggaggcgttatatctggtattgcggttgagggaggtgattcaatcaggggcaagagttgagggaggcaatttagacttattcctttcttgattctggctcaagtgttcgacggtgttgaggttttctgatggcatagatggcttctttgcagtctctggggacgtggaacaggccggcgcggccggcggtgctcgaggacgaggagccccacgcgtggacgcaccgcggccgcctcggttgccgaaatcgctattcagcgactggtcgcgcgcccttccccccgcgcggatggacgcgtggcgcgcgtaggagggggagggggcgcggcggccgtgtgcaggggggcccacgtgggtttttctcccggttttttgagttttggttttccttgtttttttttctttctttgttttttctggttttcatatacgtatacaaactttatatacgcatgtatatactttgtatatgtgtatacaaactttgtatacgtaattttttttctcttttttgatttttttataatatgaacgtacctatacaaagtttatatacgcgcatgcaaagtttgtatacgcgtatgtaaagtttgtatacgcgcatgcaaagtttatatacatgtatttttttatatgtcaactttttggtacatataaaaattatatatacgtatgtatatactttatatacacataaataaactttgtattttgtattgataaatacaaagtttataaatatgtatacaaagtatatacatatgtatatatacacgtagtagtacagtagtacactagtactgttgtagtagtagtactactactggtagtaggagtagttagtagtagtagtgcgccagcagaagcaatagtagtagcagcaccagcagtagtagcaccggtagtagtagcagtaggagtagtagacaagtactagaagcagcagtaggagcagactggtcgcgcgcccacgctcccgcgcgaccagtcgctagttagggccacccctcggttgcctcgtcttcctccgcaacgaggaggccgacaccgagaggatggcgcgcatcgaggcccacctcggacacctcctccacggtgactccagcagcgtcggcggcagtgccgtggccactgtccccgccgccagcgtcgcgcacgccgagcgccgcctccaccagctcatgtcgcctgaccgtgaccaggaggagcgcgcgacgacgtccccgagacccgccgtgtccgtccagagctgcgtggagcgcggctactcggtggtcaccgtgcaatgccgctaccgccccaagctgctcctcgatgtcgtctgcacgctcaccgacatggactacgttgtgttccacagcaccatcgacaccaccggcgaccaagcgcaccaggaatcccacaatactttttttgttatgtgaatgacatatgggtcccacatatttttttatttttgtttttattctaatgccatctaaacaccacgtacgataaagacttggtcaagaccgctacgtagatgacacatcagccaaaaccatctccaaaaccacagggacattgttttcaccggttttgatagttggaggagtcgatatacctggttctgtggttggaggacatgaattatacttggacgatagttgacggagtcaaagtatactttttcctcatgaccctatcatttggcttattccatgaacaaattatttgcaaacaaaaaataatttgtgaaaaaaaacgaggaaaaaaccccaaaatcaaattgttaaatgttacatttattaaaaagaacttttatataaaagttttttttttaaaaaaatcaaataaactcatttttaaaaattgtaataattaatactcaattaatcatacgtgtgctaatataaaagtttttttttaaaaaaatcaaataaactcatttttaaaaataataattaatactcaattaatcatacgtgtgctaaaccaaattccagattcaaactaggcttaatcaatactactgaactcttgggtagttgggtatgaaactaatttggagctatttacaaaacacaaaactcaatatcacaatggtgtgcccaaaatgatggtttggaatgttcctttcatctgtggatgttgcaatgttcctttcaacaactagggcatacagatacagctacctgaaactgttctaacaaaggctagagctagagcatactaatggaatagttttcacaatgttgtagcttcagcgttctgatattgggacttcttgtaagcttggcagaagttgaatcagcaaaactggcttcacttgtgtttaattatgtcgttccagtttgcccctcttttgctccctcttgctgctgctgctgctgcttctctgcccagtacttctgaagaggtggcccaaatataacattcccagagatcactccaatcctgtaattgtttgtaagacagaatgaccatgaatatcaaaataagcttgacaataacaagacatctgcttataatgcaatgaagcagttattcaatggttaagatagcaaacaaagcgctacaacgaaacagcactagctgagagcaaaatcaattaaaaaattcagagaggattccaaatagccactgagccacaatagctacaggcaatcatctgtaggatatggccagtcctaataagatgtgatcaaaggatgctaaggtaatttctttcgccacactgtttggaacagggaaagtttgccccattcctgccaggtaaatttcaggactatgattatctttattacagtgtagacagatgtagatgagcattttcaaaaataccaggatattaacagtcaaaatgacataaacaaacaatttaatgcattacaggggaaagtgggaaacaagcctatagttggacataatgtgatgtacaagttggcgcctactttagtgtagatcttttcaggcatgcaactatcatatctcatattaaagcgtactgtagcatgttagtgactttaagctgaacaaggatgtcaatttcatacaatagtttagatacagtgaaggtacgttcataacaataaaatatgtcactttttatttgcttaagcttgaagtcacggttacaagtgccgattaccatgaattatctcagccagtcagccctaacatttttaatcagagtacagaaatgtatatgcagttgttccacatatatgcagaatccctaatgcaattgccaagaaaacaggaatacatccaatatcttttctaatgaaacacaaggatgcttattcacataagaacaaggcaccattgtattttccccccacaaaaaaaaaaggtatcgcattccatcatacatggttttacttgcaaaatactactactagtagcagagcttcaagaaacactgtttttactatgacatgaaacggcaggattcgagaacaagccttccaaattcaccccatctttgatatcggtggagataatttgtccagcgtaattttgctccatatcaaattactaccgagacacccattactctttccctcgaaacactaacaagtactccctccgtccctaaatatttgacgtcattgacttttttaaacatatttgaccgttcgtcttattcaaaaacttttgtgaaatatgtaaaactatatgtatatataaaagtatatttaacgatgaatcaaatgataggaaaagaaataataattacttaaattttttgaataaagcgaatggtcaaacatgtttaaaaaagtcaattgcgtcaaatatttagggacggagggagtacttcacaatcgttggcttggccgcctgggcgagaatcaagcgtgccacctactagaatagtaatatgagatagcaagaaccagatggaacttcatattagaggtcccatcatgatcggaacgcacaacatcaggagccccgaatcaacgcggagtgaatctggttagcatcaagactggtactaggaaacagcagccgccgccgccgccgcagccgccgcggcagtagatctgagcatcagaccgatggtgcggagaggcgagaggatcggagagagagggttggagaaactcacacgacggcgccggccaccagggggaaggagagccgcatcctgaattcctgatcccccctctcgccttctccccgcgggttcttctgtttcttggccctcgctattttttccccacgatttctccggtcagagacggcgaagctgagacagaagagagagagatatttaaccatttgccacatttaaatgtgacaattaactttttgccactggacccatatgtcatagacatatgtggacccacatgtcattgagataggggtggcaaatagttatttgccaaatctaaaagtggcaaatagttaaaagccccgaagagagaacccctccaagaaaggggagagaagtatcgatcgcctcctgcgccgtccgatcaagatggccctgggttattctatatcggacggtttgaaatttacatcgaagcatttttcacgatttttacagtattatggagcactggagctaagtttctgtattgtttgattctaaaagaaaatatttgtttttttagaaaataatattttccaggctcccgtcctcccgtttcggacgggatcccctccatgtgcgcacaacgtatgctataagttagtttctcgagtgtgatcctctcatccgctttgctagcgtgcccatatgtacacaaaatttgataatttgaccctttctgaaaactaattttgcaaataaaccgtagctaaaacttatttcaaaaatgactttttttcagcgccaaattgtatggcgctgaatttagacacctcagtgccacgtcaactgccgctaaatgttgtgcaccgcgtatgggaggatgagtcggcatgacaacgtgcattcaacgccgtgctatttggtgctgatatatctaaattcagcaccatacgatttggcgttgaacaaaagagtcatttttgaaataagttttggccgcgattcatttgcggaattagtttttggaaagtgtcaaaatgtcaaatttcgtgcacataggtgaccaggtttgtagattctactcttccttgatctcgcctcctcatcttaattactactactatccatggataatagcttactgggcaggcggtacttcatgttgaccattctcctcacacccaagggaaaggtagtgcccgtccatcgaagccacgaagattgttctagaaatacagccagcttgacctgttgctagcgtcatcatggtggcccggtcatcgttgatcatccaccactgtggcaccgatggcatcttggcactcctgttgtagcttggataggcctggtgacaaaccgtgtgagtggtggtggcggtggcagccgactgtttcccctgggttgccatacccttgcgtgggcggtgaaggctgagctatggaagcttcttgactcgaggagaggggatggggaggttttggtctaaaggagtggtcgatggaggatgggaagcaccacagtcatcgtcgccgcaaccattgtgccgaagtagagtgaggagcgctactgtcgtcactccagtaatcatctccatcccttcttcttcctctctcagctcagacccccatcccttcttctctctcttctccgtttatatctaatacccatttcatctcattaatccatcccttcttctctgatacatcaactcaaatccaatacctgatgggtactagcctaatattgacaggcattgagctggtaccgacgatgtattagttgttacctgatgggtatatatcggttggtactaatgaggtatcaaccggtaataatgaggtatgataccgataatctagtacttttttggtattatctcgttcaaacgggatatcgtagtataataacccttttttcttgctcacgcacatgaaacagaattgtgcggttcaaatggatgtcctcattaggagagaattcttaagctatgtatcgtcttcaagagaattcttaagctatgtatcgtcttcaagaatgtggtaagataaacaaaagggtaagttcggccctcgtttttatcattttatactctctcattttctgtgtgcacgtttccaaacggttaatagtatgtttcttgcaaataaaaatttatgtaataaagttgctttaaaaatcattattttaagaaaggttttagctaatactttaattatatgttaatgagccatccggttttagtgacagagagaaaaaggttccgaagttttaggcttgaacgcagcctaaagttctttgaacactacagcctacatacatcttcagagattgatatgtgagcgtaaaaccagcaatgttacaagtttcgaacaacataagttcataattacctttacaaacttcatacatacatacaaacacttaaacttcatacaaactttatatatactttctccactctagaaaaaaacacaatgggtagctcagagaactgcgcctagctcagttattagcttagctggacgccttctcgcacttgattccatttccggagtgtgctcatatttcttcataattattgatatcaggctccttcctgtcttcctgatatccagcggctctattttcccatgatatataggttgtacacacattatcatctaacgtcaagcttgctcgctttcttttttctgctcggcggtttattcttgcatggattgctcattgcaaacgtgcatctactcctctgcttctaattgtgtttgccctgcgtgtagatgtagtccagatgagccacgagcaaacgctccactaggcaatcatcttcttcgcaaccttccactctaccatcgtagtttcccctctccacaacctgtgccacgatacccacaacatgatggtaaaaaatcggttaaagatacgttcaattaatcaaattacactacttcgtacatgcaaatttatcaaaggaaaacatgtcgtgatgcaacatgatatcaaatgtacaactgaaactaaatttaaaagaaagaaaaacagtttttttccttcaccttactggaagctttgctgggttcaattggcccaattctaccaccatggcttatgctgatgggaaggagaagtgctacaaggcaaatggctatgaccttcggtgacatggcgtgttatgtttgtgtaggactagtatcgaataggtcatggaacctgcatacacaatggtgtcattcagacgctttatataggactcaaagcaggggagaaacggtgtcaatcgtatcaattcttttacaaggatttttgtttcaaaccgatttgagaaaaggaatatactgtagacaagtatgggtatagttatgctgctgcggtggcaagtaagagtacagttgataggtttcctgaaaaaaaaaattgccacaaagaaaacatacaggagtatattcgttagttatggacgtgcgcattcagacaattgacaagtgacgatgcttctcgtcgtttattataccggttcatccacgaagaaaaagaaaattaatatatgctcttagctatttacaaattaatattgaagaataaactacgataaaaaatcttaaaattatcttgaaaataagttccaaactattttttttcggctgataagtcaataagcaaatgataaaactgtgtatatggactccacttgtctataaatataagtattccaggcatttagaacttgttcacaaatggattcgtgcgttgcatcaatcatcttagattcatttttttaatttactctatttgtttcaaaataaattaactattggatattttcatatttgtaaccataaattgctttccaatcttactcatttgttgcttcatcaatgggaag

SEQ ID NO: 9175 - DNA, 56459 bp, Oryza sativa
  unsure (1)..(56459): unsure at all n locations
cgatcgatctctctcggcctctctccttcgccgccactgcctacggcaaatccccgcgccccgacgccgccgtatctcgccgtcgtctcgagctcgtcgtcctcgccgccgcctccgcctcctccgccgccgcgcatctctggggtgagagccgccgccgcctctcccttcatcgatctccaatctcgatctctctctccgtcgcgccgcccgccacgagacgccgcgccacgacgacgccgcgccacgccgacgccgcgccacgctgccgccggcacgccacgccgccgccttcgccgccgctcgcgcaacgccgccgccgccacgccatgccgccgccttcgccgccgcgcaacgccgccgacgcatgcaacgccacgccgccgccgccgtcggcacgccgtcgccacgccgccgcgccaagcgccggcccaatgccgccacaccgccgttaacgaacacgtgaacgagaacgaacacgtcaacgtacgtcgagaacgtgaacgagaacgagaacgatcgaacgaacgagagcgagaacgagaacgatcgaacgaattaacgtgaacgagaacgacaacgaacgtgaacgagaatgaacgtgaatgagaacgagcgaacgaatgtgaacgtgaaatgcaatatatatatatgttacttcgcatttatcctaatacatattttttgtatcttgcagaaaagacatgttgtcggagtcgtccctcaagccggagtggaagagctagccgtagaaggaattcgtgcaggcaagtgacataataatataaatgattgttatatttgtaatgcaattaagaatattagacttgtaattagacttagcatataagattgtgtagtgttctaatattatttgagttttaatataagattattttattgcaaattagacttagtatgtaattattgactacggaattggtgcgactcctagcaattgactattgtagtcttaattagacttagcatatacgcacgaaacacttagcatacatgactattttagtcttagcatgtaatattatttgagttttaatataagattattttatttgtaattagacttagtatataattattaactacggaattggtgcgactcctagcaattgacaattttagtcttaattagacttagcatatacgacagaacacttagcatatacatgactattttagtcttagcatgtaatattatttgagttttaatataagattattttatttgtaattagacttagtatataattatttactagctagggttgtataatatacgtcacctagacttagcttatatcacgattgtaattagacttagcacgtaaggttgtgtagggttctaatgtacgacatttacacttagcatacatgacttagattgttaaaacataaatgttcgtgacttagcagatatttcttatatcaacagatggctgactgcgatgaggaacagatattgtacgatacaatcgcggagggaagcagccagtactggaatgaagaagaggggaacgaggatccaaaccagtacttgaacgaggaagggaacgtggagagggatgcggaggggaaccagcaggggcacgtggaaagggatgtggaggggaaccaggaggaggaggctagtggtagtcaaccctccgttgtacaaaagagggcacgcgggcaacgaggtgtagcgaagaagcttgagggtcggcacatcataacgtaagtgaaagaagatggacgtcctagtgccccggccgaagccgccaagaactatgtacgtcacagcggttgggttgtgcgggataacgtgactgtcaatacggtgtactggcgaagaacaagggcacgcggagatcatgagagctttgtcccagattcggagaaagagatgctgtggaccacaatgctcgagacattcacccttcccacgggtacagaggacaaagtgaaaaggtggactctgaagaaaatggcagaatagtttcagagctttaagggagagctgtacaagaaatatatcctgaaggggcagacaccgaacttcaacacattcccaaagctaagggatcactgggacgagttcgttgcatataagacaggtgaacaagggcaggcgatgatggaaagaaacaaagaaaatgccaccaagaagaagtaccatcaccacttggggtcaggaggctatagcgtcgcgatgccgaagtgggaggagatggaggctaacttgattgagaggggtatcgaaccggcaaccgccaattggccggaacgatcgaagttctggtactatgctcacggtggaacgctcaacccagctgatggctcactggtcttcggcgatcagatacgagaggctgcgcgatgactaacagatgcagtggaagcctcctctcagggcacgttccgaccggacagagatagggatgagctgacactcgccctgcagactccagagcatccaggacgaacacgagggaaaggggtgattccttggaagattggtttcaaggtggacatccacacgtacaggagtcggatgaggagtaagagagataccgaggcgaagattgcagatctagagttccgggtatcgagctacgaactcagcatgcaagaggaggtggcaaggaaggttgatgaacgcatggccgcacatcggtcccatgatccccagccgaccattcctcctgcaatggtgagcccgtcaggaaaccgtagcagctgcgcctcaacggggcaggtaggatcacagagcatggacgccatgcaaacacaggacgaatcgacctgtcccgttgatgacatcactcagcggacaccatgtgagccacatattccttacaagaacttatcaataaaggtaagctcgtagtttatatattttagatttagccattccgctagttgctgcttatatatgttgattactaataaataatctctcacaacatgaaggtggcgtcgggcatggccatcccaactaacccttcaggtacttaccactgcaggccgattccagcaggatactcgaaggtcgaagttgagttggtcgaaggcgcgtacgaggacctcgagctggattaccctggaggagacggtgagacgcatctacgagacacaagccatgccattattctatggcgcaggcggtacatcatcctccctgggcgacaagcggcgtctcgtgcaccatctcctccggctccgccatctcctcctcaggatcctgcaccgtctcctcctcatgatcctccagcaccgtctccacctcaggctccagcaccgactcctcctcaggatcctgcaccgactcctcctcgggctcctacacctactcctccgcaagcttctcttccggcaccttcaaagtcaagggccccccagctccaccgcctgcccacacaagggcaacgaagaaggcgaaagttgacgccgccaagaacaaggacccggggtacgattgcacgcaagaggagcttgacgcttacgttgcatcagaagtcaagagacaattcaagcctcgaagtccagaaaagaagattcctatagaccccagtgtcaggaacttcttcaggggtatgtctgcatctgtcaaggaggccatcaagctatcgtactatgagcgaacgctgaagaaagcatattctggaaagtccaaaacagtccctcagcttggagagcaaccaaaccaggagatcgagccgttggtgaccggtaaagaaatgacgatagaagaatttattactgacaccggtctaactacggatcaattgctaggagtcgcacaaatcgaaaaggcggaagtgaaatacatgtacgaactcggtaaaccgcttgtcaagcctgagctgctgcagtccctacccacacaaatgtacaagttccatcagctgtacatggagatgagcgccaccggtagagagatgatcggagcgaggatcagggacacagacttcttgcaaggagatgacattctctggatcaatttcaagggaatctacgaactatactagctggacgcactcgacgtctctattatgagttgctggattttgtaagtatatcgttcagttagatttcttactatacgtctcctttaattaattaggtccttgtatataagtagactatagaaaataatatactcccttttatcgttgtagaatggagatttaaagggcccgacggcggagggttttcgatactggattcatcgaccctcggagagtaaatgtcgcaatgctcgaccaatatccacaagaaacagaggacaatctcgtccatctcctgaaggcgcagcattacaagacgttcatactattgccgtacaacacagagttagtttaattttactgtcttcctacatactaaatttcattcccgtacgaacttgctaagtgtttcatatgtaatgcatcccacgcacattgcagattccactgggtgcttttactcttcgacctgtcggcctgcaccgtcaacgtatatgactcaatggataaaaaagagtctacgtttaacaaggttttcgaacttatacacaggtaccgtcataagttcctctgttaattaagaaaatcttgttatgttaattgctactacgaatcatagctttaaactccatgtagggcttggtatcggttccgtcatttggtccgcggcaaatggagagaaagacttaggcggaagttcaaatttcctgtgagtacacatgctctacatttatatttctccgatttaaatacatacaagtgtatattaattagatctctcgttgtttgtcatttatttgtagtgcgtaaagcaaaagcagggaactaacttgtgcggctattacgtgtgcgagtattgccactgccttgcagaccaaatcatcaccacaagagagctcgatgtacgtacaaataaattcaaaatttcattacgtaacgatttcttgtttaattactaatcaatttcatacattcatatagtttatcgcatgagggataacctgaccacacacaaggaatttatcgcggcggttcaagaacaactcatgggattcatcaacgaagaaatccttgatcccaagggtgaattctactatgacggaaacacaattcaccggtccttagtttctgagctagcagcgagtactactactacgtcgaaatcgtagctagctaggacatataatggattataattaatacatgactacatatgtttctatatgcatgtgtacacattttctataatgtaaatatattttggtcatatatatatatacacatatgcattggcctaacatatatatgtataaatatatatatgcatgaacatatgtgctgtatatatatatatatataaaatatgtatgcatatatatgtattgaaacatatatatgcatggtttatatatatatatatatatatatatatataaaccatgcagcaacagggccatgcaaaaaaaaaaggtcagctcgatctttagtcccggttggtgaagatcgatctttagtcccggttatttcacccgggactaaagatagcgatctttagttctggattggtactcccggtttggaaaccgggactaaagaggagttacaaaccgggactacaaagggtttctccaccagtgcatgttttatccaactacagtccatccgtagataatagagttcttggagttgcactagcaactatgattgttacgctaccggaagcgatatgacttagaaatatccgtaaccgacagctcaaaggatggttcacaggaacccgtcttacccttgatgaggcaaaggaagtacttgaatggcgaacaatgacatgtggagtccttatttgccacaagaatgggaggtggggcaacagtacaccaagagatgaggccgtggaattgttcaatgctttacagattgtaagcaataatggtgcgtttgaacgcctcggtgtaatggtttggcctagccagggtttcaaaaaccgccgggggcccggttaccgccacccggcggtacggcggttaccggcggtaaccgcggtaaccgcgcaaaaccgcgacaaatttacaaatcgaaatttgaattcaaaaattcgggcaaaccgcgcggtttggcgcggttaccgtgcggtttgacgcggtaaccacgcggtttggcgcggttaccgcgcgatgtgtaatgggttgcacagtaacgggccggcccatttttttttctttttccaattttcaaatttattctccgttttgctctcaaatttgaataaatattactcttttttgagaaatttcttcaccataaaacactataaatcaagcactaccttcactattttttttgatttttttcttttttttttaaatttttgaatttggacgaattttattaaaccgtaccgcgcggtacgggtaaccgtacccccgcggtacgggcggtaaccgtggtaaccgcgcggttaccggcggtttttcacaccctgggcctagctaccatagatgctcagaaccagttttggatgacaaacaaatcctaaaatcaaggaggatatgaacaggatggcgcaaaggagggggtgatccatattttagttttctatatttaccatttcagagtggtatctctatatatgtaataactagatttgctcttcataatttaataaaagattgttgttcctcatataatttgtacttgcatatgcatatcatgcaaagtctgttcttaagcaagagttcattctgattgcatttttcaactgtatcgccacaatgttcattctgttgtacatccgcaccttcccctcactaaatcgtcttaatttgttccttttgtgatgatgttacagtttttaattttttttccctttcctttgtactatatacttgtatgcagtgcaacaacgcttgtccatgattactagccttttaattaactagatgtcgtcattaaacaagagaataagcccttgttacaattattattttttgaataaattaatcgattggaaggaggggatgcttgttgtctaaatatagagaagggtagacacacctacaccttatactacctacatccttcaatatatggtgctagttagttcaaaattaaactaaccaacggcttaataaaatcagagggagtacatactatagaaacacactacatatggccaagctcctaccttatgttattacgcaccgacacacgtatttactctactatagaaacacattacacatggccctatctctgcaggagctcgtacgtatgtctttttctcacataaaaagagcatcggtggaaaggagagcaacatctctttccaagtccaccgcaaaatgaattggaaaaatgtgttttgtgttggctctaggaatccaagcataaaaaggagaggatcaagataacacggaatatgttttctaggtgactggtaggaataggaggcatgttgaatcctatcggaaggaagaatgcaatattcgtgtaggaaactccaagtcctcgcctagcaatctagcatgaaggaagaatttgcattattcttgtcgaccatcgcagattagcagagagggctgcgtgtaggggccctagtttgcattacttttgttgaagaaaaacagattggatgcagtaggaataaacgacagatcgcataggctacccacttaggcccctaattaatataagtgccaatgagcaagccatgaagcactaggacaatttatcgagcatcagttgttcattcattttatctacataagttttatattgaaattgccaattgattaaaaattatagtagtactaatcctgattttaggaaatttaggagctctgttcaatcgcggcctctggctgcacccgttaatctacacttaattaaaaaaaatgtaaggctcccgggtagaattttcgtccgtcaacgaaaaattcttcctcgcgtgtgcgatcgatcccgcttcaatccgtctccgatggcaaaagaaaaataaaagaaaaaaatcgtcgcggtgacaaccttgcttctggccctgcccccgtgcgccttgattcgagtccgcataaaatttggacctaaatccaagagaaaactactaaaaaaacacaataacagatttcaacaacaacaataacacaagaatatcaatcacaaggacaccaagaaaacaccgacgtcggaagaggagggtgccgctgtcgccgccgaacagccacagggacgctaggtcgccaccggctcccctcccgctggattcggcggaggggaggggtgccaccatcgctgggacgtcgggccgccaccttctcccctcccctcccgttggatccgagatgtcgtaccaccgccgcctcctctcccgctggatccggcggaggagagggcgtcgtccctgcccgccgcctcccctccggccggacgggagggcgctgctgcctaccgccgcccgccaccgtcgagccgtcccgcggccccatggcgagagagaggaggcgaaggacggagaggcgccgccgccatcgccgcctgctgccgtcaccgaggagtagctcgcgggtagagggagagggagagaggaggcggagagaatgggagaggagaggagaggagagtagaggataagggagagcagctcgtgggcggaggggcgccagtggcagctcgtctggtgctgcatctcggcgccaacgacagcggcaccggacgagcgcggaggggcgacggtggcagctcgtgggtggagggccgccggcgacgggcggagcagctgctgcatccccaagcctagcggcggcaccgggtgagcgtggaggagcaacaatagcagctcgcaggtggaggggcgacgacgacgaagcgggcgcgtatcgtggagcccgttggcaacattgggcaggagcttccagatctggtacatccctctctctcaaacctctccaccgctgttgaggactcactttcgccggcggccagcgacgatgacgatgggcggaggtcgttccgaaactccggatgggggcgggagctcgacccaaagtggcggttgcgatttggcgtggcgttcctctctcctgttttagcgatccactacttttggtgtagccgatggagtatccgctggaggccgatttttcactcccatccgctatttctcagattttaaatgctggggatgctcctagtctctgttagccaccctagttggagtagtttattcgtttttatgttcccattaatatgcctgttttttgtgctcacaagctggattctccttcaaagagggagttgtagtagaaaaccgaaaaagtggactcaatgatgactcatcgtgaaggcatgtctgatacataaaacacatacttccttcgttttataatgtaagactttttaacattgtccacattcataaagatgtgaattaatgtaaaaattcatatgtctaaattcattaactaggaagttctatattgtgaaacggatggagtagtatatacgtacctggtgtatctatatggctcccctggcggcctggcctctgagagtgtatggccttcgtgcaatcgtgctactctttgcgccggtcttcttgcactgttggatcaaaaaccaacggccgacataactccacgtgtccatggatcgccgtacaattaaatcatttctgcaccaaattcccgtcttgggcccaaattggcatgggtggaaatttccaacggatagaaatccatcagtttgcctcgcggaggcacgacgataagatcgctttcattcgtacagtgtggacctcctaccgttcaatcaattaacaaaagaagaaaatagaaaagaaatcaatgtagtgcaaatcctatatacatatgcaaatcatccccactactagaaattctctgcttcctggtgcttccacgtcaccccattttatccccaccgttcgatctcaatcaagcgatcgaccttccacctggctttcccccatcccgcatcgcacatctcctctcccgcatctcgctgcttcgccagccccacacgcatcgacccctctctcccgcatcgctcctctcctctcccgcgtctcgctcggccgcttcccaccggatctctcgccgcaccacatcgacccgagcccccaccaccacatctctcttagcaccgggttccgcttcgcctcctcctcctcctagcaccactctgcgcgccggttccgctttgcctcccccttctaccgctatcgattccctcctggcccctgccacatctccggtcgtctttgccgaaaattaatttgtttcccacggtttcttcctcccctcgaaccgtcggcctcctagcctcctccacttcaagaaattagaagggcattcgcctgcttggtcggctccaaatgggaaatagcacgctaaaatcacctcctgcagccgcaggtaatgtccacgtccaattctcctcccacagccgcaggtatggttcttcctggtctggaaccagataggtcttcatctgcttattttttcttcttatttagaaaagtattagtcacacaattttgtttgctacttaccctcacagtgacacaatatcaagtgatagatttggtttcggtattctccagcctattgcgaaaggaattttggttccctctatttggtcaggtattgaaatttacttaatttgtttacttccttgaattttttacgaggactcgaagatcaaatgtatgtaaacctaattactctaagactaggtgtattactctaagctgcactgaacctatcatttgttttgctttgccttcagattgcaagtcattaccctcggcagattatgtaccaacactgtagaatctaatggcttcggactatgttcacaggatttgcagaaatataatatctatgtccatcataagatacaagcttcataagaggtaaggcaatttctttcgtagttcaagtttcttctcacgtgaattatgacaattaagctcaaaggtcacactgtgattagttcagtgacaaacttataaggtagagaaaatcccctgtgtacccttgaaagttcactaatcccttctgtatccctgaattttgctcaatcccttacatacccctgaattttagtttggatcccttctatgccatttccgctagttgaccgttaaattcttatgagaaagtccattttgccctttggtataaagaagcatataaattaatagagtatattgttggagcatagaaatttgttatatgagactattatgtttatgagatagttatgcaccatattatttacgataaatatacttttagatatgacataaaaaattaatacttatttattagttattaaaagatttttttagcttatgtgttctgaagtaataaacaaatctgttgtattactatgaaaacacatatgctacataaaagaacttttaataactaattaataaataagtatcaactttttatatcatatgtaaaagtaaatttgtcacaaataatatggtgcatcacatactcataaatataatagtctcatccaataaatttttacattccaacaatatacttcattaatttattatgtttcttcatagcaaagggcaaaatggactttttcaaaagaatttaacggtcaactagcggaaaaggacatggaagggatccaaactaaaattcaggggtatgtaagagattgagcaaaattcaggggtatagaagggattaggtgaactttcatgggtacataggggattttctctataaggtatatattcttctctattttccattgtacattcagtcttataagctacagtttagtgattgatgttacttcattcttcaggtcggtgttcttttggattggactatggtggatgctctttgtgattgcagcattcttctatattcactcaaattttagatctaaaggttagtgcagctacttatcttcggttgtacagatttttcattccaaaatacttaaagtggtttcgtttttattaatacacactttgcaccccggatgaatgattaaatttcttatcagccggacttggattatcaatacaatgtagtgaaaattaagatgggtaggtatgttaatagcatatagatttggtgctagcggcaagcacatcatgttttttttgtcagagcacaaaagaagaccatttacaaataaacagggagtcaaggacattgtttaggtatttcacattgcccatttgcaaatctatttccataatatttctgcatatttcaagatattcaacctcatcatcttttgtcttttcaggacatgtatgtaactactttgtgtgcaggacctcttcaaacaagggaaaaatgttatgagagttatacagctcgagggtaatggcaaaacacatttcaccaagatgaaattggatctttgcttttatttaccctacctattatatatgctgcccttttttcgtactagaagcctcaagcttcaaactttgagtgatttagctcatcactgacacttggatgctaaggataaagaacaatgctattttttttgtgtttgtggcttaacatagccttttcagattaagacataattactaggctttatctaacatggtctagctaagatacaaggatcaaatttgataagaaccgctatgtgtttacttgattttcaaaatgccacaactgcttagggcatagggtgtttggttccatgaagttatcaaaaatcaattgaagtcagagccttactttttaattgaagtagaatgtacagttcaactattactttgtcatataagcagattattcaaattcgcgattgtgctttgtgttttttaccaattctctgttttttcctacttaaatcagtcaaccaatttaattttttaagtttattactataaattcccgctgcaacgcgcagggtatcatctagttacatataaagtgaaaacctcaaaactatttcctctgtttcatattataagagtttctagcattacatctatatgaatgtgggcaatgctagaaagtcgtataatctgaaacggaggtagtatcattgtatcttaaaatgaacatatatgatttggacacgtcaccaagagtgaaatatttacacctagtaaaattattactcatggttgaatcttgaagagaaacccccaaaggtctggctagcttcacaaggtgatgggctaaacgatttatgttcgaaggctcaccccttctaattatttaatattaaatcattccttaatattcacgtcatggttgaatctaggagtaaaattttactcttgataacgtgaccatatctcaagtatccatttttttaatccaacgatagtttgcaggttttcatcacacatgtggtttgcaatatactccctccgtttcaaaatatttgacaccgttaactttttaacacatgtttgaccgttcgtcttattaaaaaaatgtaaaatatgtaaaactatacatgtacataaaagtatatttaacaatgaatcaaatgatatgaaaagaataaataattacttaaattttttgaataagacaaatggtcaaacacgtacttaaaaagtcaacggtgtcaaatattttgaaatggagggagtatatatttcccgtttatcaacggccttaagcaaaagatgaacgttgttgtcagcggtcactgatcagttgtgctgaggagacagggcccacaactccacatacaaggtcaggacctattccaaaggcccaattcataaggggatactctaccaggattgggtttcgttcaggttctctcgggcaagtttacgtacggtgcgctgcgctgggccttgcttgctttctggttgggcttccgaccaaaacctcccatgcaattccggtccatcatagcccatgacatgtcgtccgtcgcagcgtgccgtcgcgatcgcggatacgcgatggcatggcttggcatgccaccacgcgcacggcctcatctcggtttcttcactcggacgcggtgttggctttaatcagcgcgcgacagtggatagctttgccagtccaagtcagacgtgtaccgtgtcgagaagtcatcatgtgatctttttttttaattattactccctccgtttcaaaatatttgacaccgttaactttttagcacatgtttgaccgttcgtcttattaaaaaaaatttgtgaaatatgtaaaactatatgtgtacatgaaactatatttaacaatgaatcaaatgatataaaaataataaataattacttaaaatttttaaataaaacgaatggttaaacatgtacttaaaaagtcaataatgtcaaatattttaaaaacggagggagtccgcagcactatattatcggttgtcaaggatgcttacgtccgcgggataatcgatatcggctgtctccgtttctctactacacgggggctgctattcttctctcgtcgtccacactcgttgtagttggagtagtttattcgtttttaaatatctttttcaaataattcttccgtctaattttaaatgtaactatgagtttctgtgttttattttagttgtccgtcttatttaatttatttttataattagtatttttgttgtaacgagatgataaaacataaataatactttatgcgttacttacgtttttatatttttttcaataatatttaaataagacggatgattaaagttgggcacggaaattcatggctgctcttaaaatgggacggattagttttttcattcttaggagggattcttcttgaaagagggagtagaagaaaaattggtcagaatgatggttctcacttcaccatcgtgaaggcatgtctcatgcacaaaacgcagatcagtatacgtagtgtatctatattgttgaatagtcccatattggttgtggaagggcaaaggacctaagatataagtgggggagcccctcacctcaatggctagcttttggggtgggaaagatcatttacgatcctacaattggtatcagaaccaggctaggttaacatctctggcttgatggacacgtgtgaaggcctgatggaccgtgggcggtagggcccggatacggtgaaggggcggtgaagagctgagagacaccaatgtgtgaagggttgtggaagggcaaaggacctaagatataagtgggggagtccctcacctaaatggctagcttttggggtggaaaacgccctttacgatcctacatatgtagcactgctccgtgagtcttatgacattcctgcgatcgtgctactcttaacgttggttttcttgcactgttggatcaaaaaccaacggcacacgtaactccacgtgtccatggatcgccatagaattcaatcatctactctttctccccttctgccccaaattcccgtgcaggccccaagttggcatggatggaaatttccaacgaatagaaatccatcagcttgcctcgccggggacacgacgataagatcaattatcaaaaaagaaaatagaaaagaaatcaatccgtttgcccattcgcacagtgtggacctcctaccgttcaatcaattatcaaaaggagaaaatagaaaataaaacaatccgtttgcccatttcaagtcaattcgaagaagaagtcttccaaacaaaattaaactacacaatgatttgcaagactaacacaagggtttaacccaactttctctcacctcatctcggaatttcactatttccattctcctccatctactattaaactagctaccactagccgtctaaaccagaagcaaagcttcgtcaaggctgcatcccagcattccggcttgcagggccatcgcccatggccacggccggcgagcggcggggcgcgcgcaagtcccgcgtcgcgggggcggccgtgctgcgcgctctgcgccgcgcccgcgacctctacgtccggggcgccaggggcttcggcaagttcgtcgtggcggcgaaccccagggcgggcgtcgtcggccggccgacgtcgagggtgttcggcgtcggcgagctcaactccgagcaggagctgcgggagctcgtgcgcggcgccggcgccatgtgggcgacgcgcggtgcggccgcggacgcgggagctggcggcaagaaggcggatgctggggctggcgcgccggcggcgtggcgcggccgcgggacggcgccgctcgggaggatcgaagaggacggcgccctcctcgtgcatggcaccaagtagctagacagatggcataggggagtggattctaatccctcgagaggatatctcctcgtatacctttttcttttaaattcgatgcaaatagttgtaaaaatttctgaaaaaaattgacaatgtagagtataatgatacctactagtccactaaaatttatattcaaattcgatctacacatcgagaaacaaaaaagataaatttagatataaacagtacgctactattcatacgctgaatttgtcttttttatatctcgacgtgtgagttgagtttggacgtaagattttgtgaagttgcatatatatgttgtataaatgttgtcaaatttttccagaacttttcataacagtttagatggtttttgagcaaatgagggtacatcccctcgagggattagaatagtttcccatggcatagatgttccgaacaaaagaaaaaaacgagaatgtttcaaatcggttatcagtgattactactgtaccatactaccatatcttcagtgatttgaggtttatacaaggagtttctttacgtttctctgtactcatgcagcctgaaagattttcgatccgggacaaacttctctgttactatcacttattataaaaagttttatcgtcactttattcaacaatattaaatttaatgaagtttttacccgttatccctagccgggctgtggctccaccctatagatggccataaaacccgagaccccgacgacacggcccgagttttattgggccgtgccttgaccatagatagacacggcccggtcaggcgtgtaggtcaggctgtgccggcctaactgaccttgtcctagaccccgtcgtgcctgagccatgctaggccggacggcctataatccagccctgatcatactactgatccaaagagtaaattctaggcgcacttggaattgattaactagagtgcagcggcaagtgatcttttcttttcggggtaatccttattatttgacgaagtaaaactaacggtgtactatgccctagtataataactgagggaataaaaaaggcctttgcaaatacatgcgtcatttttagcaggcactctccagccaaaaattaactttgttcagtaccatactatacatgcttcacaaatactaacctatacatgcatgtacacacaatgtcatgtaaaattaaaccaagaaaattatctcttaacatgtcatctgaagtaacatattttttcggttctccacacaaacttacagcaccaaaacatgctaattgtaagatgatctcctaattacgagctttcataatgctcccctgtatccaacacggtctatacataaaagatgcatacatgtcttgaatatacaaatgatcataaggttttgggaacgtactacccaaattttgaaccttcgagctattaaaatgataggcaagtcctctttgcatctcttggttcagaaagataacttctttatagggatggaatcccaagattgaaagatttctacggcatcgtacttcatttggatttgcagcgtcaagaatatatatcatcgttatcggagtcccattcaaatttatttactcgtactaccacttctttcacatctttctcgatatcaatgatttctgtacgaggcattgtcatattcatagcaatatctccgggtgatgtattccttgtaagcttcgtagtactcctcagcgccattttgactggaatgtccaaagtagttcttgtagtgcaaagtccacggaccatcattttgtatacagatttcctgacaccctagaaggaaactaagatagatccttgtcatgcttaagttcccatgtcatctgaccacatgacttgttgaggaacgaaacacgtagtcgatgctcattatctattaatgcatagtgcacacccctcattgatctcccaagaaaatagtttttatatggagatacttcattattcatgggtaacttaattacttggaacttattatctggcaaggatattatgcattaaaacaatataaatcatgaaaccattgaaaaaaaatataaagaaagaagagaaagcaatggtaattaagcacacttgtgtttggaaccccatgttcccaatccctccctatcgtttttcgtgcgcacgcttttcaagctgctattcgaaagttgcttaaaaaatcaaattaatctattttttttaaaaatagctagcacttaattaatcatgcgctaatggattactccgttttccatgaggagggaataggttcccatcccctagatatctgtctggcaaagtacaaaagaatgatgaactcgtacctcatgacaaaatctgtctggcaaagtacataaagtgctccctgccagtagactccattgtaacgatcatatagatattctgttaccatgtcggcaattgtaccggcagcatcaccttcccgtgcaaattaaccatctctcttcccattgcccagtcctcgatgagaacacctgcagtaggctttgtgatggtggccatggcatgctcttaaccagaggatatagctcgtaggatttactacggatccgtgggatttggaagatctcgtagtgtggtgatacggtggggtcgaacacgagatagttgtcaaaccggtacaaatctatccagatgtgctgaagttgaggtagatgccggcgagcgagagagggaggaggtcggcgcggagcaggcggcgggtgtcgacgatggcgcgccatgccttgcagacgcagtgggacgcggcgatcgagccagcgcggcgcgaggcgcgcgaggacgtccgcgagcacgtcgtcggataggagctgcgtcacgtcgtcgtggtgctcctccatcgaatctctctctgctcaaactgctgctcggtttttagatgtcgtctcgtcgggtaatacttgcaggcggtctgttaatctatggacgagaattcagtggcggagccagaaattatacaagactagggctaaggtagggctggactaatggagtttcagttttctgaaaaatttacatggtgaatcaacaaaatttaagcaagtttttggagacaggcctagggctcaagtcctagctgccctaggcttgtctccgcccctggacgagatggcatccgattccgcgttggttttgcattccgagagaagtgaagcgcgcgctctgttccgattctagaaagaaacgggtggagtgggagttttgcctgatacacagagttttgttactccctccatttcacaatgtaagtcattctaacatttctcacattcatattgatgttaatgaatctagacatatatatatctatatagattcattaacctcaatatgaatttgaaaaatgctataatgacttacattgtgaaacggaaggagtacatgttttgatgtcatagttgttaaaagaaaaagaaaagaaaagaaaatacatttcaaatcgattatcaattattactaccttttatcttcagtgattggaggtaattctacgagattgaaaatatacgattttcttaatttagttgggaaagtctaatttgttgctagtattggtatgagaaagaaaggacaaaagaaaccatctaaacaaaagatcctatccacatttgaaatttatgaactagagtgaaatttatgaactagagtgcatcggcaagcaattttttttccgaggcaatcctgattatttgacaaagtaagtaaatgatatatactccctccgtatcaaaatataagcatctttagactctgacatggtctccaaccaataatatctataaaataagatgttttaaataaaaaagagttgcatattagtataatagtttgtttaatgataaatctaataacatcagttatacatgattgatcttttttacttttttgctattaatagtcaaagttaaaaatgtatgacttgtcactattctaaaaatatttatattttgaaacggatggaatactatgttctggtattataataaaaataagtcctttgcaaatacatgcgccattttctatcaggcacgctccagtcaaacatcaactttggtcggtaccatatatgcttcacaaataaaacctatacatgtatacataatgtcatgtacaattaatcgagataattgtctcttaacatctcatctgaagatagcatatttatttaggtcgccacacaacttacaccaccaacacatgctaaattgtaagacaatctcctaattacatgctttcatagttctcccctagatccaacacggtgtatatataaaagatgaatacatgccttgaatatacaaatcatcataaggttttgggaacgtactacctaaattttgaactttcgagctattaaaatgataggcaagtcctctttccctcttttggttcagaaaaataacttctttataaggatggaatcccaaaattgaaagatatccatggcattctccttcgtttggatttgcagtgtcaagaatgtcatcgttgtcggagtcccactcaaaattatttactcgtactaccacatatttcttgatatcttcgcagtgatttttgtaccagacactctcatattcatagtgatatttcctaacaatgtgtttcttgtaagcttcataatagttgtccatgtcattttgtctgggatatccaaagtagttgtggtattgcaaagtccacggaccatcattttgtgtacagatttcctgacaccttagaaggaaactaagatcattgtcatgcttcagttcccatgtcatctgaatcatataactcattgaggaaccaaacccgtagtcggtgctcattatcgattaatgcatagtgcacacccctcattgatcttccgagaaaatggtttttatattgacatacttcagtattcattggtaacttaattacttggtacttgttatcagacaaggatattctgcattagaaaaaaaaacaatatatgggttataaaaccattgaaaaaaataaagaaagaagatagagcaatttaagcacattaaaagaatgatgacctcgtacctcatgacaaaatctgcctggcaacgtacataaagtgccccatgccaatagactccattataatgatcaaatggaaaagccaatgccatgtcagtaactgtgccggcagccacaccgtctcgtacaaacaatctctccccattgcctagtccttgatgagaacacttgcaacacgcacagtgagggtggccattgcaagctcttaagcataggatctagcacgcgaaatcctgtactaggaactcgtgggattttgaagatctcatagtgtgtcgatatggtagggtcgaacacgagatagctgtcgaaccggtagaagtccttcatccagacgggctgaggtggggcaggaggagaaggcacccactgtcgggtagcagggttagccacgccggactttagcagaaggagtccgttgcaatgatcctcgactaggttgtcgttgggcgtgtagtcggtgaacatgccagagatggcggggcgtgtggagctgggacgggataggaacaccgaacggtgcatctcgtggaagttgatgtagatgccggcgagcgagagagggaggaggtcggctcgcagcaggcggcgggtgtcgatgacggcgcgccatgccttgcagacgcagcgggacgcggcgggcgaggacgcccgcgagcacgtcgtccgggaggagctgcgtcacgtcgtggtgctcctccatggaatctctctctctgttcaattaattcgttgctcgaaaggttttcgggtgcgtgtacgtacgtacgcgtacctcctacctgtgggcggtctgttaatctatggacgagagatggcatccgattccgtgttaattggttttccacgcactccgagtaaagcgagcgctgggcgctggagtgggagttttgcctgatacatacggagtcgatcgagggattcttatcggttggacttggggcgcgaatccgttctgctcccagactcgggcacaagaccactgcaatactaacacccagcgtgaacaagccaacaaaagattggacgcgccgtcgataccaatggacgagccatgagcaggcggccaccgcgacaggttcggtgttggcgcgcgagctcaattccgagcaggagctcgtacgtgcgcttcatggcgcgccggctgcatgctcgggaggatcgacgagccgcggcgagagcgtacgtggttttggagtcggagcgcgcacagggcggtttgcactgcgccaatggatcgaatgtctggatggatgcattatattgcatttctagttttttttttccctttgggtggggggattactgatggtatactgtggagtagttgttaagaacaaaaagacgaaaaactcgtcacactcccaccacccgggcacccgccatctgcgccacaccgctgggccgtcgtactatacgcctttcgctgagagagagatgtgtgtctctgcggccacaaaggctgcccctcctgtgccgatcctgcctcctatcatgcacagctgctcggcaacccgtcctgaaaactagctgctgcttaattattttcacttgttcgtgaatcgtgaccaatgcaacagctaagagaatgaactagctcgttctcgtccctactctacaattatctatgtgactgtgtaggaggaaacgggcgatggagaaaccggattcctggatgccaaccagacaattagacaaacatgccgctgctgcacgagatatggatcgaggcatcgagctgctaaacgcatgcccctgccgagtgaccagctagggtttctcctgagagtcgttctggcttcgttacacggtacgttagaggcaactgttttgatcgtgcagttttcttgagccacttaatggcttccccgaattaaatggtttaactatatattttcaccacattccgcaaaagacactgcctgaaacacaaaagtccgttgtattgcaaacattgcagatagagacagacaaagatatgatggccgccgcctcgccggccaccgcttctaggtctctagacccctccctccgtgcccgtttgtcttgttgatcctttgcaagattgtgtctttgttagttgaaaagcatgctttttgcttcttctttttttttttgctgtttaaaccacttgtttactaaaattagattgtgttgcctcgtctttccctcccccagcacagggtgaggattacccggaggatcagacttgtgaagcaaacaagctggcatcacagttaattgattcttgcgggaatgggtcttctcctgatgttaggtgctgcgagacgattgtagtggtagttgatctacccaattgtctttgcctggtgtctctgcgccccaagattaaggagtcccagttttctgcttttactttgatcacctcttaccgagcatgttgaggtctccgtgccgtcaaacagaaggatgcagccctgtgctatggcttcaatggttagaatgtttctgtggttctctaatcaataaaatttcaaatgatgcgttcttttgcatgctagctagtactaaattggtactgtttttcgtgtgcagaaacagaggatgagcagccaaatcttccgcctccggctggaaatggcgttggcacagccacagtgaagcagcctaagatgatacttgatcccggggacaacttcagcaactgggatcggtacattatggcaatcttggaggtggcgactggagttcagatcatttacgcgctttttcgagagatagtaaatcgcttgccgaccatccttgcacggaataatattcctcgtcaagtgtaaggggtcaatggtcgatccatgtatctctcaattgtagctgttgcctgatgcatctgagttaatcgtaggtagcagctacatatgtatccctgtttatgtatcttggatccctggatccctgaacttgaatctggtacttattcgttgaatgactgtattaagcaatacgaagagcgtgatattgttccttttcttctctgccattcgctgttcagatggcaccaccttacatctttgcagtactcagctgtccacacaaacgattacttgattactatgcgtcgaaggtggtggcctatgaagccagctagagttggaaggtgttgactactacaagtctctaccactgatttcaaggaaacattagttatggaaaagtaacgtaataatcgactatgctgttggaaaataaacattaaaaggtggacagctaagttaaaaattgaacttaaaaatgccattggttgaagtagaagcgactgattttattgggaaataaatccactttaggtctctcaactagcatgcgccagctcaattgggccgaatagaggtattccctgttacatttatatgaacgaggagtgaatggcaaaaaattaaaaatcattatcaactctagctactgtgttgccagtgcaacgaggcaaattacaaacaaaatacatgctactataaatgatcattactcataaccaattatatcaccaagccatgtccacaacgactagggactagggagatgtgtgatatccttattatccgtacatagtcattgaatatatagcttttagttgagggtccctttgaatcacaggaattaaaaaatagaggaataggaaaaacataggattctgacaggaatgtaagtgtaaaacaggattgcaaaacataggaaaaacgtaggaatgaccgtttgattggaccacaggaaaaacacaggaatttgaggagagataaagactcaaatgattttttccatgaggttctacctcttgctaaaattcctccaaaacttgtatgggaagaggcattccataggaatttcataggattccataaggtccattcctttgattcaaagggctttgtaggaaaaattcctatagaaatgaaatcctctgaaattcctttgaatcaaagggggcctcaatcttatctgtccatgacaaactattcgagctcaccccttgtaagatgaggacacaaatgatggggatcgatgccaagtaatggcacgattattttcgatgaattttctgcactaagtaagaaatgtcaaagtcagtattacacatcaataagtgataataccatatgctaataatgcattgcaaataaaaatgatatcaatgaatagctataacagaactgaaagaataaattcatgatacaaatcatcaagcatacgcctttagccttttgcagcccgaaaagaatccttttggctatcaactattatcaagcacaccatatagcagcatcaaaagggataaaaaattagaccaacgaaatggctgcaaagtggaaaaggggataacaaattaaaatatgctttttttaatctccaaaggcacaggtggtcctaaacgaagaacaacaccatctaaatttcatgataccctaagtataaaaaggtatctaagttataaccttacaattttcacgaacagcaaaagtgatttggccttccattcctggaagtacaatgtgtgcaacattgatcgagtaactggcaataaggaagagagagaaatcaaagcaagaaaaatctttgttactgccttactggtaaggaatattttctgctggcagtcgtgcagaattgtagtgctgattttatgtaccgatgagactctcttttttttctgagttgctaaataaacatgttttcatctagaccagcatggttcgtgctagcatattataagggatatgtttctcaagttgcagttgttatgtaccatgcaaaattaatttcacttaatcaaacaaccctaagggacactgatttgattaaggtaatgaacaaccaaaaatgtgcgtggattggagaagaggatgatcgattttaattaccttagggctggaagaatctgagagcgaacttgctgtgctccaagaccggcttctggtcatcgatgagcggccagtccaccatgagtgtgtcagtggcatgcaagcgcagtcaaatgagataaagtacataaacttcttttttcagaaccaaattcgcattcttgaatgcaagaaggcgctgctggaagaacaggaatcgttcatcgtacaggttgtcatgacaaaccatcagaacatatatcaaggaagtttaccaattaaaaattatattcagaagcctagcagggaagacagacattatattcatggacattattcatcgtgataacaatatctgatcagctaaaatattcaaaattgacaaaaaaaaactattttcttgtcttccctaacctgatcattagtttttggcaaatgaaattgacaacataaatattcctactcaaaggagcctttatatttctatgcatgtgtgttttattgttgtggagtgtggatgaatataaagagctgttaagtttcttagaactggcatttggaaaaaaaaacatatcctagctatatgtttagtatgacaccaagaaaatggaaaacaaaaacaaagcattatggtcatgatctatggtagcagctaagaaccctggatgtcatgttatctgaccttaatatgctctatggtttgccaggtgatggtaaaaagtatgtcttttaaaactaatgacaatacaatgcatgtcattgatatactcatgtctcgtgttaagtgatagtatcttgaacggacgggttaaataaattgataggctaattggcaacttggcatgaaatgaagtaatgaactggagagaaatgtaagcaacataaagaagaggtaagtttatatataatagccaccggtgctacagtacaaaatcatccgttgtggcatgttatttttagatatcctaacaatgccatgatattcagcaagagggatagctatttttgttcagagcttggctttaggattcatcacgacaattgatttttgctctacctaacccgaatatgcaatctgtaaccatgttatttgggaatggtagagacaagttaaattctaattgtgctcacacaaaaaaaaaatgcagtgcggcacatctaaagagggggaaatgatagaactgaaaagcatttcagaatattcagggcattcgccatcatcgggtaaaatccatcaaacaaaaacaacaacacagtgtttagcctgcacatctcaagtctcaaccatctaattggaagcaaaacaaacgcagtgtacgattcaaggtgacctcaggcgtgcagatcgttcggtctgggcctccatggaaaccagctcctgttgctctgttgctgttgcctgttggcgctctttctggtgcggccgggtctgcagggtgaagttgggcttcgcgttgagcctgatgccgagaatgacgacggtgaggaaggaggtgaggtagcagggaagctcccagtccacccacttgcagaactcccctgctgacggcgacggccgcttgaagagagccagggggtcaaccacccgacccatgccccttgtcgtgcctgctgcagatgcgcgccgcgccgcacaaccgagctcgcaatatccatgctccttcgccggcgcaggcgcgttcgcagatgaagtgaagagggaggttctgtgggctagggtttttagggatgggaattggcgaggtgcagcggtggccaacgtcggaggcggttcgcgaatcgccggagaacgggcgagagaaggggagaatttccctagaatgaatgctaacattttcactaaacacccttggaagatcaaattttgcagttacgtcctttgaaccatctctaccgttgattcataatccaacagatgcgggtgcgaaccgagccttggaatagcacgcggccacgtggcgcgtttcaaagatatgtaaactttgctcactacaaaaaaaaatcgatttttcatggtgtttacctatttttttctctggcggctataagcaaaaaccgctagggaaaatttgacgagagatgaggtgctaagaaccgccagcaaaaaaccattttcactggcggctgggttaagaggaccgcttgcaaaaatagaggtctttttacaagcggtcctcttaagtgatcgccagcgaaagtttttcactatactaaaacaccaagtgcgcacggactcttcttatccactcactccatcttaccctattctcctcaccccacctccatcttatccactcacgcccacgcctcccctgttcttggctgccatggcgaagaagacggcggacaaggcaactgcagcgacggcggacaaggcgactgcggagacggcgacgatcggccttctcctctccttggcggcgttcgccacgcggcgagctcggggccggatccaccgccgccaacgaccggggaggccggatctgccgccgccaacgacgggtgaggccggatccaccgccgccaccgctgactagagatggcaacgggtgcatacccatcgggttctcttgccccatacccatacccacgatgtctaaatactcccacttaaatatccacacccatcacgggtacaaaattgtccccatacccacacctatgagggtaacaggtatccaacgggtacccatacccatataattgacttgtaatatttatagttttgtactataattagccatattagagttgtaaaccatcaatattttctctagcagcaatgctattaatattagtgttcaaaggcgagtaaaaaatttatacaaccacattacatactcaagagatcaaataataatttcatataactagactaagcaatgatttaagatgtgaaaggagttttatgctatgatttagtagtcgttgagagttataatgctcatagttttagactcaatcaacgggttttttctacccacgggttggtgggtacgggtgggtaaagaacggacccatacccacgtacccaatgggtaagagttttcgcccgttagtagacccatgggtataagagttagaacacgattggctcctaatagagtaaaaacccgtcgggtctcgggttatgggtacccattgcatctctaccgctgacgggagtggtcggatccgctgccgacgccgacgggggtggccggatctgccaccacgaggccttggcagctagggctggatgaaaagctcgtggctcgtgagtagcttggctcgactcgactcggctcgttacattttcttaatgagccgagctggcatctcagctcgttacacataacgagccagctcgagctagctcatgagctcaaacgagctgatggaaagtaacaggccagtggcccaaccagccggtgcagtccattttccaccaagccgtctcaaaatattaaccctagatgacacccaatcctcctctcaccctcccagccacacaagcggcggcggcggagacgaatctggtgcgcccatccccttttgttccttccttgctctctaccgccgtagcaaaccggcagcaaatccactctgtattctgtggtatctattctatggtgcgtcgtggctgcacgactatgctggcactcgtgaaatccgtttggagaatgcgccatggcatcgtttgcggagtccgcgacggacaggaaggcaaagcccaggcatcagagcctcgaagcagcacctggatggatggttcacaagtaaaaatcgtcttcctaatcaccgagagattggttctcagtgagttagtgttcttcatgtgtttgctttgttttgtggctgctctaaattccgccagcgaaaacctaaaatggccgcgtcacgaaaaatggtttacgtagtagtggctttgaggtttagccatgtggcccaatgagatggtagtgtttgcaccctgaaatcggtattctagatgttggattttgaatcgcgtccctaaaccgcaataccaaatattacacatttctcaaattacaataccgatgtaccaatgtacatgaggtcctaggaactactgtccggttttagctagcatgatggttgagtcaacgtgaaacccacctgagccccacgagtaagctccctccccctcccctctctccctcccaatgttcctcgtcctcattccccctctacctctcttcctagcctccaaggcagtgggctggcagtcgatagggagaggggtagctgagctccatcatctcatcgcgagccacaacagagcacccagtcgtttctaacaaagaagacagggttcccagcgagacaaggcggcacgacaggaagaaccggtcaaagagtgggacgagcatggcgaagtacgcgagaaggagcacctgttggggtcagtcggactcggccccaggaccacgaccatggccacaccggatgccctgaggtgcaacaacacatgatttaatttgcagcgacgacattgatgggcaggctgaacccaaacggagcctgacgcatgtctgctagtcatggaacccaggcatggacgggagccccatggagaacaccgcccgtagatcatagatcgggtgggaacgtgaatcccatctcggtatcggtgcacagttgctctgtgtcagatagccccgggagcacagccatgcgacagcactatgctcgccagcgcgtggaacgagtggagcccatggtgcggtgaggccgacatcgacaagggccccgccatgacatgcatggacaaccgccgaagctctgccaaggacaaaccggccatttgacggtccgcgtccaccattgccactatctctatatgtcgatcgtccctagaaagtggactagtaagcttcgacaatggctatggtggcgagggggcgtggtgagtggagaagaaaggcatcgcccttgagactaggaagagagggagaaggggaaagaggaagaggaacgctgggaagggagagatgggaggagaaaagctgacatgtgtggggctcacgtaagtcccacgctaactcaggcgccacgtcaaccaaaactgaggactatactttctaggaccttgggaacaccagtattatgagttgagggacgttaaagatgaggaatgtaaagtgaacttattcggatgcaatttatttttttttgtaagggttggttcatttatattccaaacatccctttttgagctcaacaagattaatcctttcggcctgtatattccaccggttttggggaaaagccagccattcgtagcggggccgccgatgcttatgcctatgatccaggtcagcgcaaaggttttggtggcataggttgaaactaaaaggaataagtctattatgcttccttcaactcttgcacctagttgaatcacatccctcaatcgcaaaaccaggtatagatagccaaaaggtccacccggcacggcccggcccaggcacggcaaggcacggcccaccagccatcgggccggcacggtctgatcggcacttcgtgccgggctgtgccggcccatcagctccacctttggcccaggcacggctagggatggcaacggggctacccccgtcgggtttagccaccccgtccccacccccgatgtgagaaaaatctcccgtcaccattcccatccccgcacacgggggaggtttttaccccgtccccgtccccatgcgggtacggcgcacccgccaggtccccacacccgacaatcgaaagaaattcatccagcagaccaacagtgcagcggtaagccatgaggcactaatccacaagcaattcaccaaatcaccataatccagcagcaacaataaattgataatggttgaatcagtgaacaatctgataattcatcattagtcattactcattacataatgtaaggtagcaactagcttgttcatcacagatgtgttagaggcggccacgtggaatgggcgacggaggcgatgctactgtgtgcgcgtggtggcgacggcaactacggcgtggagtgggctgtggctagaagacgggaagaaggcggcaagatgcgccgccgctcaccgagcccggcgcggcggctccctggcgacgtcgaccccccccccccccccccgccgattggatctaagggtgagataggggagcagaggagtgggagagagacacggtgagatgagaagacctagggttttcttgggtttatataccaacacctccgaattgggcagggcttttactttcatgtgggctaaggcctgcatatatgcctacgtcggggtcccatagggatacggggccagggagctagcgcccgcccccatactcggcccacccgacgggtgaggaaaaaggccgataacagccccacggatagtatttctctcccaactagagaccctaatagagtttttccccaccgggatcgggttacggggctccattgccatccctaggcatggcccaccagtagtcgggccgtgcagggccggctcgaaggcatgggtggcccatcatgctttttttaaataagtctattttccctcccttctctttgggaggatatatatatctacttctacttctactattttctatttaaaaagtttaaaaaatttccgtcgtccgtatatacataaaaaaaagcgaaaagaaaagatacggcaaaaaaaagtccgattgtgcaacggtaaaaaggaaagttccgtccataataaaaagcccgtaaaaagggccaaaaaaaacaaaaaggcgcggccaaaagaaacatgaaaagggtgaaaataacaaagaaaagaaaaaaaaagattttcgattctaaacgtcgccagtaaaaaaagctgaaaaggaaaaaaaaccgccatccctaataaaacggcgaaaaaaaggtaaaaaaaaaagcaaaacgccgtaagaaagatttgaccgcatatatgtctaaacgatccctcaataattttagagatcaagaaagattcaaagatttggccgcatatatatctaatcgatccctcaataattttagagattaagaaagattcgaccccatttgacggagaggattgactctgttgtcatgcgggcatggtactatgcgagctcgaccgaattaccggatttgatgggaggatcggctccgtcatggtacaggaacgagtttgttcgagctgggtctatagctccacttgtgggctgagccggtagaccgggcacgggtctgttcgagttgggcctacagttccacgtgtgtgctgagccgaagagaggtagactgagcaaatagaggtagcagactaggctaagactagaactgaaaagggaggaatgaatgaacgttcgcttcaaaaccaagcaagcattaaaatatatatagctaaataagtctattttacgtctctattctttcgactttggcataaaataggtctatttttactccctattgtttgtgtgtcgggcctggcttgcggccccatcgtgccatgccgggccggcccaacgtgccggtggaggggcccaggcacggcccggtggtcaggctgggccggtacgggcccaacccacatcgggccgtgccgtgcttgggccgggccaaaatgccgtgccgtgggatgggccgtcgggcctcaggccttttggccatctataaaaccgaggggactacctatacatttgtcgacaaatttttccccaaaaatttgacagatgtaattatagtacaatcgtagtgtaattacactgtaacttatatgtaattacactgtaacttgcatgtaactacactataacttatatgtaagtttaacataattttgaatcgttagatctattacacgatttgttttggttaggaagaaaacaaatcatagcacacacatatgtgaaagaatttgtttccacgacctccattttaccgaaataacatgttacggagagatttttgaaagttacatacaagttacatacaagttacagtgtaattacactacgattgtactgtaattacatctgtcaaatttttggggaaaaatttgtcgacaaatatatagcaaaatcgaaaccgagtataacacctcccttatttgtaaaaaccggtataaatcgcctccttaagtgatttgaaaggtggttttatctaacgtggcagctttgaccctattgactagctgactcagcttgtggaccccacccatcaaggaccacttcatcttcttcctcgcctctcccgtctctcgttcctcttcctcctccatcacctctcacagcagaacgcggggcagagctcgtcagccgaccacgacgcgcgcgtgggaaggagcttgccggccgtgtcgtgcgcgggccgcgggggagggaggtgtttccggccgggaggagctcgtcagaagcggcgcacacgggtggaggggtcgccggcgcggtgcgcacgcaggaaggaactcgccataagcggcgcgcgcgtggggagcggtcgcgggccagtcgcacgctcattaggagctcgccggccgcggcgagcccgcggggaggagcttgctggcctcgacgccagtcgatcgcgcgcgcgggagggctcaccggctggtcgcacacgcgaggagggctagccggccggtcgcacacgtgggtagggcttgccagtgttagctgctatttcagagtttttcaaagttttagagaatcacgagagagaaggaatttgtgggacaattttctaggttctttcattcaactgaattgaaaaacttacaaatggaaattttagctactgctacttatactctaataacagaaaaaacgaatccaagcctacaatcgcgccatcccacgatccggaactcctggatccaatgccgtgcaaaactcacgcccacaacgcacgcctgacgcggtcgtctactcctgcagctcgccacatctctcgtgcatgcataacaaactcaaaactgaattattcatccagccgttgcaactgccatcgcctggatcaccttggggccatagctgaaataacagtcaacaaactcccccttaattctgctacagcccaaaatcacgaacacctagcaggtgccgtgctgtcgccaatctcgctgctggcaacccttttgttaacgcatccgcccgctgctcctcaatccggacgaattcaatctgaatcttcccactttcaacacactcacgaataaaatgataccgggtatcgatgtgcttacttctcccatgaaacacagggttcttcatgagtgcaattgctgatttattatcaacatacagcttcaccggcctggcttctgcaccaatcatctcaatcaacaatcccctgagccacaaagcgtgacacgctgctgcagtggctgccatgaactcagcctcacaggacgaaagtgccactgttttctgcttttgtgaactccacgagaccaaactgccgttgaagtaaaacgccatgccgctagtactccgacgatcatcactgtcgccggccagatcactatctgtgaaaccagtaatctccactgcaccattgcctccagaaaacatgagtccacagttgattgtccccttgagatatctgagaatttgcttcaccgccttgaaatgcatcactgtcggtcgttccatgaatctgctcgccacgcctactgcgtaggacaaatccggccgagtatgcaacaagtaacgaagacaacctatcactcgcctatactccgtgggatcaactgtgcttccttgagcatctttgtgcaactgtgaacgatgttcaataggaattgaggtagaattgcaatctagcatcccaaactaggtcagaatcttccttgcataagcagcctgcttgatggcgatcccgtcagtgccttgcaacacttcaattcccaagtaataggtgagcagtccaagatcgctcatctcaaactcccccatcatctgttgtttgaatgcagtgatgtcgcttgggctttctcctgtcacgatcagatcatcaacatatactccaacaattatcccggtactccctgtacctctagtgtagactgcttgttcttgtgcacaccggctgaaaccaagctccttcatgctccgatcaagccgtgtattccacgcccgtggcgcctgtctcagcccgtagagagctttgctcagtttgtacacaagatgttcctttcccttctcaacaaaaccttctggctgagagacatatacttcttcctcaagatcaccattaaggaatgccgacttgacgtcaaggtgatgcacctgccaccttcgatcaactgcaacaggaagtatagctcgcaccgtgtccaaccttgcaaccggcgcaaacacttcatcaaaatccacaccttgccgctggacgtaccccttcgccaccagccgcgccttgtgtttgatcacctcaccggcagtgtttttctttagcttgaacacccacttgagccctattgccttgtgactggctggcagcatgcacagcgaccacgtcttgttcttctcaatagcctccagttccttgttcattgcgttcacccacgccggctcgccggctgcttcacgataggatgtcggctcctccatctctacgagcagcgcttctgtgtcgtcatcatcctccaccaggtccacccgaggtgcttcaatcatgatctccgccaagcttctgtaccgcaccggctcgtcgtcactgccggccgtgcgcggtgacgcctgcacctcggcagagtgcgttgaggatgagccgagtgtaggcgtgctaggcaaggttggtgagaacctcgccgggcttgccggaggcgttccccgctgttctgccacttctggctccttgccggctcgccttcctgccggcggcgcccggtaccacggtaccgagcctgcctgctctgctggcgccggctgctctgcgccaacgggttcttctacctcgaactcagtggaagtcacctctcctgcagcagcactccactgccaaggtgtgttttcatcaaaaacaacgtcacgacttacaatgatttgccgacgacgcggatcaaacagccgatgggccttgctcccttcttcaacccccaggtacacgaccggattgctccggtcgtccagcttcttcaagtgcggtgcagtcaccttcgcgtgcgccgtacacccgaacacccgcaggtggcccaggtgaggtttcttccccgtccatgcctcgaacggagtgcgatttcccatcgccttggtcggcagccgatttaggaggaatacggcgtgacgaactgcctcgccccacatcctgccgggcacggacatccccttgaggagagaccgcgccattgccatcaccgtcctattgcgacgctccacgacgccattctgctgcggtgaatacggtaccgtcaggtggcgctcgatgccggctgcatcgcagacgcgcgcgaactcgccggacaagaactcgccaccgcggtctgtccggagtgtcttgatcgttcgtcctgccgtgttctccgccaacggcttgaacttctcgaaggccgcgagcgcttggtccttcgacttgatcacaaacacccacatccaatgagaaaaatcatcaacgatcaacataaagtatcgattaccggtgaacgtcgatggagtgatcggcccacacagatccatgtggagcagctcgagcggcgcctctgctagatagtttgccattcctgggaacggctgccggacttgtttcgccaccagacatgcttgacacagctggtttgggtggtggactgcgggcactcctgccgccatctccttgtccaccaatagcttcaacgcatggaaattcacgtgtccgagccgggcatgccacagccacgccgggtcatcgagactagccaacaggcacaccggtgacgccagctgcagctcgatgcggtacagccgatttgaggatcgccgcaccttcatcaccaatcgccaaggatttttgtcgaacacctcgaggtcatctccatccatcacgacacggtggccagtttcagttagctgccccaaactcaccatgttgcagtagaggctggggatgtagtagacatcgtcgagcaaccactggtcaccgttcttgcatgagaaaaggatggatcccttccccattatctgcactgacgaggcgtcgccgaacctgacctgccctgtcacggtctcgtccagttcccggaatttccgatgatctcctgacatatgattgctggcaccattgtccaggtaccacagatcaccagcagctgctcccttctctgccagcatcaggcgaggccacacacgctcctcgtgcacgaccagcccgcagagcgcatcctggcgcgacgcgttctgcaccgcctctgtcacagcgagcaacaaagttgggccagcatcctccgtttgcgcaagatgagcttcagccttcttcttcttggggtgtggacactgcgtggagtagtggccaaactcctcacagttgaaacattttatgtggctcttgtcgcggccaccgctgccaccaccagagccgccaccgctgctctgcgtcccaccgcgtccgcgacccctgccacgaccacgcccggcctggccgcggttcgccccctcaccagagggcttgttcttctgtggcgacgaggtttctcccccgcctttcttgaagcgcgcctcccactcggcctgagtgaggagaacttgcccgtcagcggtcactcctccggtggtcgccttcttcttccgcatccgctcttcatacgccttgaggcgacctaccgcttcttcgaacggcatggtgtcgacgtcgtaaaattgctcgatccctgcgacgaggctgatgaacttctccgggacagtgtcgaacagcctcttcaccatggcggcatcgttcaacgtcgcgccaagagcagagtaccggacccccatcgtggtgatccggccggcgtactggtccagcgtctccccggcctccatcaccatgttggtgaactcttccttgagtgtctgcaggcgcgcatcgcgcacccgatccgccccgatgaatctcgtcttgaggcaatcccaaacctcctttgccgagcgtttctttgcaacctgcatcaagagatcctccggcagcgactggagaagatgagactttgccttcttgtccttcctcgggtcaacggccgccctagccgccggctcgattgcttctcatacgccttgatcctccatcatagcctgcacacgtattacccaactagtgtagttggttgacgtgagctgtgggtaaaggaaagcacttcctgagctccccctcgccgggtccgccgtcgccggaaccaacgccatagtgctagatccgccctcaacctgagaagctctgataccacttgttagctgctaatcacccgatcgaacactttgtgcgcacactgcacatgtccggcacggcaacagacaaaaaaaaactgaagaacataggaagaaattcagaacatagaagcagagtatttcagagtttcagagaatcacgagagagaaggaatttgtgggacaattttctgggttctttcattcaactgaattgaaaaacttacaaatggaaattttagctactgctacttatactctaataacagaaaaaacgaatccaagcctacaatcgcgccatcccacgatccggaactcctggatccaatgccgtgcaaaactcacgcccacaacgcacgcctgacgcagtcgtctactcctgcagctcgccacatctctcgtgcatgcataacaaactcaaaactgaattattcatccagccgttgcaactgccatcgcctggatcaccttggggccatagctgaaataacagtcaacagccagccggtcgcacacgcgggaggggtcgccggccgcggtgcacccactaggagggcaagctggccagtcacgcacgcggggaggagctcgctggtctcgatgccggccggttgcacgcgcgggagggctcgccggccgcgccgcgcacgcgggaaggagctcgctggcctcgacgccggcaggtcgcgcgcgctggaggtctcgctagccggtcgcgagggcggggagggctcgccggccacggcgcgcgcgggaggagcggtcgctggccggccgcgacgcgtgcgcggggaggaactcggtttgtcctccagaacctcgcgagaactccgcggtgccaccgccgtgtccgcgaactctcagtattccttcctccttcaccttccgcaccgaggcctagtcgccaccacgcatcgcctcttcgcgcgtgtcagctcgccgggacgacgccgcatctggcgctgcgtgaacggcacgcgtgtagggcggagagatgcgcgaactcagccgccaatgccggattgctgagaggtggtcggccctacatccttttttccatgctccctgacatttgggaccactgtatatggttttccacatctcattgacatgtgggccctagatgcaaaaaccacttttgaaaccaccaaggagtctatatttaccggttttggaagacagaggatgcgctatacccgatctcgtgaatgagggatgtgattcaatcagtaacaagatatgagggaggcaaaatagtcttattccaaactaaaaacatgggtcttaacataaaacaaattagttacaaaccttaaatccatctagaatcagtatttatatgatttttgatagatataatatcttaaattttcttcctatatttctggatgaaaagttattgaccatggtatcaataccaatatcatccaacaatttcttcttcattgccccatttttattctctcaatttattcacttgtccttttttttttttgctgcttttctctcaacaaaaatgatgtcaaggatatgcaaaaaattgaaaaagaatatttaacatctgaactcatatttttacctattataaaaattgaagatgattccatactcaccataattgtataaaattttcgtccgtcctagttgttgggatacttttatttgactgtttgactagcaactgaaccagtcaaaccgctcaacctgtgaattgaatttggtgtataactataataattgaatttggtgtataacttgtaatttttttctaggaaaaaaaatccaagcaaattcttagaatgagtttcaccttaactaaacagtataataataataagattaaaatagtcttcaccaattgcaacgcacggatattttttctagcataaatataaagtacaaacataactagaaaagcaccagatttattcaaacaaatctaaatctcactgatttgttgatcgcgggtgtgcaaggcaacacgcacgacggctgcttcgtccaagctgagaacctcccacaaggaatataaataaacttgattaagccaaatgtgtatgtcactcacaacatatgtcaatggtcatttggcaacgagctgttgctgctcctggttacctcctagatatttcacaggccgatgagcagatcggcgagtagtcaacgtgtcttgcagttgcggagccgcggcggctgttctgacgaagcggcctgccggccggggaacagtggtcggtgctagcgtcgacggttgattatagacgcaaatcgctagtcgcctagtactcgtctcggcggaggaagggttgcgtcgtcgtcaatgtgctctctgctctcctttctgtctgagaaccatagaaagaggcgcttaagtcttaactccgtgtcgcctactactccgactctccggtatatgattcgtggttttttttcttttttcttttttttgaagttggttgcctcttccgcttcgcggcaacgcaagagaacagccgcactctcctactcggggtcggagttgagaacacagacggaatcggatgccatatcctctataaaattaatcacggaacacaccgaacaccaccaaagaacagatcaggaacggccggagcagagagagatggaaaagcaggacgacgcaacgcagctcctaccagacgacctgctcgccgaaatcctcggccgcctcgcgccgcgttggctcgccgcgtcccgctgtgtctgcaaggcatggcaagccatcatcgacagccgtcgccttctccgcgcggatctcctcccgctctcgctcagcggcatctacttcaacttccatgatgaacggcattcggtgttcttctcccacccctcgacgcgccccatcatctccggcatgttcaccgactacacgcccaatgcggaccgcgtggaggatcactgcaacggccttgttctactctggggtggcgtagctaaccccaccacccgacaatgggcgcctttccctgagcccccacctccatgcaccgagattaagggcgtctgccagcttagtaactatctcatgtatgaccctaccatatcatcgcactacgaaattttccaaatcccacgtgcgcttgatagatatcacgacgagcttgatcctatggatgacacctcgcaatggccaccgtcaccaagcgtgttgaatgtgttttcgtcaaggaccggagaatgggaaaagagatcgtacgtacgggagggtgaggctgccggtacagttgccgacatggcattgtcttttccatacgatcatttcaatggagtctattggcagggagcactttatgtacattgtgaagcagattttgtcatgaggtaagtggctatccactcttagcattataattgctttctttctccatttaaagattgcttggtgatctgatggtgtccacaacgtcgctttttacttttgcagaatatccttatctgacaagacatatcaggtcattatgctgcctataactacggaagtatctgaatataaatcgcattttttcgggagatcgaagaatggggtgcactatgcattaatggatagggaccaacgactacgaatttggtttctcaacgagtcatgtggtcagaaaatgtgggaattgaagcatgacaagaacattagctttctactgaaaaggcatgacaaatatggacaaaatgatggaccctggacactgcactattttgactattgtgaaaattatgaccagaatgacattgatgcccattatgaaggttacataaatgaagattataacgaagagtacatcgccgcccaagattgcaagcattttgaagctgcctcctatgaagatcgtaatggaaatagcatcagaaacgtgatagtaccaataaataaatttgagtgggactctgacaatgatagcattcttgacattgaaaatatgaatgacgaacatcgcgatacatttttttcaatccttggatttcatccctacaaagaggttatatttctgaaccgacaaatggagagaggattggcttatcatttcaatagctcaaagattcaatacttgggaaaaacgttcccagaatgttatcattcggaagttcatgagatgtatgcgtcttttgtgtacactccctgctggataggggagctttctgaaagcacataatttatgatatcatcttacagctctccaaagaaccgaataaattgatgttacagctaggatgcatatcctcttcttctgttacaacaaagagacactgttacagcagtgtcttgactcaactgcagtagcttgctgtggttcactgtacaaacaataaccttgcgtgtacggtaggttagacagggtactatatcacattttactatagaagccgatcctggaggcgcacgacaatgtttgtttggatttaataggtgcaaggtaacgcatgcataggaacgataataattggttactcatgtactcccttcgtttctaaatatttgataccgttgactttttagcacatgtttgaccgttcgctttattaaaaaacttttgtgaaatatgtaaaattatatgtatacatataagtatatatttaataatgaatcaaattataggaaaagaattaataataataacttaaaatttttaaataagacgaacggtcaaacgtatttaaaaaaatcaacagcgtcaaatatttagaaacggagggagtatatattactagatgaatacccgtcacgttgctgcggaaaattaagttgcataatatgtacgaataagatgcaatttgaataacaaaactaaaacaatttattacaattttaagtcaaaaaataattgagattgcgtgtttttaagagagaagaaagaagagacaatttggaccatagatctatcatccaaaggctagaaataattgaggtgatgtggcttaataagagaagagagaaataacattaactacgtttagtggggatgaactatataagtatataggatgtacgaataagatgcaatttgaataacaaaactaaaacaatttaatacaattttaagtctaaaaataattgagattgcatgtttttaagagagaagaaagaggagacaatttggaccacagatctatcatccaaaggctagaaataattgaggtgatgtgacttaataagagaagagagaaatatataacattaactatatttagtggggatgaactatataagtatataggagcttgaaatcacataagtgaaaaatgaatatcaaaagaaccgatttcttccataaatagaaacaatacatttttaaatctacaatataatattacagttacaatataaatagaagctgttatatcatccgaccacaaaagaagaaacaaatatagcttgttcagtcatacaaaagaagaaataaatgtatccgcattaatccttgtagcttgtcagcagcatcacatggatcaaggtatcttctcctcaacaaaatgtaggaaaaaaattagtgatatcatttagggttgaacaatcgagtatatgaaataacaaatagtaggacacaccagaattcaaactggctaaatgttgggcaaacaatttctttctgcacagtgtataaatatccaaagtttagtagctgcctagctggttatatgaaatatgtgaaataagctactgaacagtaaagacagattttcctctcccctaattgtcatttcatataatgcactataaaaaataaaacaaaaaaaaaacaaatgacgatgtagtgagtatagttattagaaccggaccggaccggcagtccgacggtgtcatggttatggataccacatacctaatagtagttgattaagctcgatagggcctaccatataccgtgtcttatatggaatcatatctcgtgtatagaaggggttccggataagtaatgataagtagagttctatgtcatggcggcctcccggctcacgcactcactttgacttccattctatgccccgacgccgacgcctgcggccacggcatcgtcttcttcgtcgccagccagtacatcggcctcttcaacgacatcagcaacggcgacgccacgaaccacctcgtcggcgttgagctcgacattgactagaacaacaagttccgcgacatcgatggcaaccatgtcggcgtcgacatcaccagcgccggctactacgacgatagcggcaactccggcgaccatggcttccataacctgacactggcgagccacggcaaggctatgcaagtatgggtcgattacaacggcacggccaagcagatcactgtcgccatggctcccctcaagatggccaagccttccatgccatattgccattgctatcttctacctacgacctctcccgggagggagaaacgggacatgccgtcgatacggcgtcgtcatcctcgatggctcgatctccccttcctctgccgcctctcccggaccgcctcgacggcagccatcggtgacgccaccgccgccgcatcggccctcggccctcggcacattgctgttcatgatgtagtgggagagtgttggtatttcttaacgacattactataaataaaattcccagcaagggtgcaaaaatactcctgatatattatggttacagagttcatccacaagcgcacggatatatcattgtagcatttcacccgagagtattccaagggtatcgtatttatttaatcccgtgagaagatcatagtagagagaaccggactaataatttatatgttacttgtaataatcatagtctaagcagggattaagataaatcaaagggtagagtgacacacaagcagggagcttctcattctcatactaaaatatctaagctaagtggaaagaaaatagaaagagaatctattcctatatttctagtatacataatatatatatatatatatatatatatatatatatatatatatatatatatatatatatatatatatatatatatatatatatatatattatagttatctgattaactagctaataccctctatgcgatgccctctggtacttcgagaagccacccctaactgccgagttccttacaacaggccgtcatgaccatacaaccgaggctaaatacggaggagtaccttactcaggaaattcacttaggactatatacacgcgtggaggaatacccatactgagctgtcaccatcagcggcacacctctcatccgcagcatataaccccaaataacaatatcccgtaatctagacaccacgcctaaactaccagatactactctaatgtcattgtcatgacatatagtaattgcataagcaaacattatacccataccaatgcatctaccagataagctagcagtatgatcaatataacatgaacataatgtaaagttggcattcatatactcgaaaagtatttcaatatcataaatgtataaagaagagtattctaataaaagtacaaagcttacaaaagaggaaaggagagctactagagccatacccgaactcttccgaatgtttccggactccgatttctactatattcctactccactagcttaagaacactaaactaaacttgagagaatataagagagctttgcttgaggtgtgtgttgaaatggagagagtgaggggtttatgtagcctcctagtgacggttggaatggtcggaaataccctccaaccgtcattgggagctaatccacatcgtccagccgcaaccctgcatccaacagngcgaggangggnnnggcngaaccccntggntaggccgacacatgggttgggccatcccgacccatcttcggctgacggcctcttggacttctcttctccgcagacttgtgaattttggctcaattggtcgtgtcatttctgagttcttggcccattcatacataagtctaattctcgacatcgtccgattgatttatcgtctggtttgatatatgtcgattctcctccactttatggttattctctgcaaaaggttagtaaacctaatactagtataatattattattctaacataaatatgtattgcaagcataactagctctcctctattttggtaatattgacggtcgaaactgatcgctaacgaccgtcaacagggagaatgcgcacgggcgggcgacgccagcgctggcgttagcgtggggccgtgacgcgatcccgtgcccgccgtccgctgccgtcgacccgctccccgccccgacggagctctgcctccagtacctcaccatggacatctcgccgccgccttgctcccctgcgcccgcgtcgtctccgccgccaccgccgccacgttgccgaccgccggaccttctctcccacctcgcaccgtcggtctcctccccacccgtcggccggcggcgccgacctgcctagagccccagagagaagagtgagagagagaaagagaagggagagaagaggggaaagaaagagaggctaactggacaggctgacatgtgggggcccacgtcggtcccacactgactcagcagacacgaaagataaaaccgggatcaaaaccaccgagggatctattgtgaccggttttatatagttaagggaccctgtatatctggttttgtagttcgaggatgttttgtatcccgatgacaagttgagggaccttcggtgtactttttcctttcgtggactgccgccatgggcttggcagtgtctgtttgtgcaacactttatggaactgcctattcatttgtccggtgatttctaacaaaaaaaaatcatctagattttttctaccgttcgatttacatccaacggactaaaaaaaataacaaatacatatttacttacgatatttttatcaaaattacagtgcacttacatgtcatatcaattgaatttacaaatgtaattttagttatatatggctgtaattttatattttttaaaaaataacaaatacatatttacttacaaaatatttttactaaaattacagtgcacttatatgtcatatcaactgaatttaataatgtaattttagttatatagaactataatttcctgcactaatcttggtgcatgcctctacggccaaaaaaacatcaaatatcagagaaaaaaaatcacgtttagcaaaatcgacaccttacacctaaccaaaccgagctgcacaacatgggaaccagatcctctaacgtagcgctggctacgtcagagggacgtccaacggctctcgtccgttcattcggcatcggacggagtcgagcgagcatagcgattagactcagcccatatgttgcagaaaaatcggcccacgcgacctacagccaatcagccatcgacgccgcctccgagccacaaccgccggcgccgctaggaagcaagtcgtcgccgtcggcgtcaccgccgcagcctgcgcctcccagcgaggtcccttcattgccaccctcctcttccccatccccgtcccccacccgcctccgtgtcctccctcgagcggaagcctccgctgcgtccggcgtcccgtcgtggaggtcgcggaccgtgcgcgtcgacgaaaccatgactcctggttggaggtcaacatgtcatggaagatacagcaggaaagaagcaacttgtccaaagcaacaatgcattgttgtgagatttattgttaagagcatcttgagtgctgcaatttctgttggagttaatttatttctagaacataccagcctactctctaactctctctactactccctccgtcccaagaaaagacaaacactgatttccgtgccaaacgtttgaccgtccgtcttatttgaaaaaaatatgaaaaaaattaaaaagacaagtcacgtataaaatataaataatgttttatcatctaacaacaattaaaatacgaattataaaaaaaattcatataagacggacagttaaaattagacacgaaaacccaagatttattattatttttttttacggagggagtactcatgaaacacaaaagtcaagcagcaagtcgtgtagacacataagactcgccacgtgcaccgacctgtctgcatttccgctcacccgcgtcgtctcactcgacagcgacttctgtatcagtgtcactggtccgctgcatagggtggcgctgttgttccacagcgccatgcccccggcccccgctgccttgccaaattctgactgccacgcgccctcgctgcaacggggtggcggacgcagtttaaaatatataggtgagatgaagaacgaagatattcgctcaactagagcaatcaaaatataacctactttgtatttatagtttaatcgtataactaccatacctcgatcatagtttgtgttatgcgtgcgttttgcagagacgtattaatctgttggtcattctcacaccttaatttatctaattttgttgacccatgactactataatgggtaagagatcttaaggggtgggacggcacgggtcgtaacggagtcggtcgacccaccctgcccccggtaccgtaaatcaatattgtatataaatatgctttacgtcgtaaatatagtaaactattgattcgaaaaatacaataagcatatataaaatactacatacccgccgaatatgtgtacgaaattatagtagattaattcaaataaactaatatactaactatcttaatcagctgtgctagcaggctcggattgtgctccagatatatctgaggaaaaagtacaccgaaggtccctcaacttgtcatcgagttacaaaatcgtccctaaactacaaaaccagatatctggcgtcccttaactaatcaaaaccagtcacagcaggtccttcggtggttttggccccgattttgtcctacgtggcagctgagtcagcgtgggacccacatggacccatgtcccggtgtccacgtcaccaccctctctcttaatctctttcccctcttctgcccaggaccgccgcgcctccctcccggtgctcggcgctcctcctcaacttccgcgtcctcgccgccgtcgcagggtcccacttctcccccgcggtctcccgcctcgcggcccgcctccgcctctccccgtccatggccgccgtcacgctcctcgcgctcggcaacgacgcgcccgacgtcgcgggcgaacgacgacgcgggagggacggcgaacggcacggcgatgagcgcgacggccccgacgacgaacgcggagatgaacgggcgtcggcggccagcgacgggcgatgcggcggcggagacggcggcgaccagcgggtcgggaggaggtcggcgtggcgaggagggagaggagaaggtccggcggctgactcgccccgccgccgctccgctccactccgcctgccgccgcgcgctcgcgggcctgctccggccgttcgcttgccgccgctccgctccgctggcagcgcgctcgtctgccgccgccggtgctccgctccgccggccgcgcgctctctgcacgctcgtcgctgccaatactggctcagcatcgtccacaaccacaagaacaggctcttctacctgctacgctgttagcacacaagaaaacactcttagaccgagacgtactcacacctggtgaatacacatgcaggagagtaggcaaagaacacaaggtatttgtgctgcacaaccgcaaccttttctggcactgcacaccgcagtgttttttttcaatgcacataatcaacctcaaagtacatgcttaaatagaccagctagcagcccaagttatgcatacataagaaaacatgcaaaagcaaaatactaagtctagattatttctaacatacgctattgcggctccatcttctcacctcaccgccgatggcggcggcggcgtcgtcgtcgtcgtcgtctccgtctccggtagcgcgaaccatcttgcgctcgccgccgcatgcagccgcagccgcatcactcctctcctctgatcccaaacccacacagtacctcgccgtcacgccgcgcagcgagctcctgcgtgtgacacggcggtggcacgagacgacgatcatcactccagcggacgcatccaacaacagggcgcacctgaagcacgtcgtcttcacgacgagcgttaaggtcgaggaggcttcttcgccttcgcgaggcccgagagcaaaaccaggtcgagtgttgctatcgcgtcctcctctgccaccaacgccgccgcggcttacacgtcttcttcgccgccgccgccgccgaccgccgtcgtggcgccgccctcctctcccgcctcgcctcgccccgccccgccgacaggtctacaggcagagagagagagagacgaggaatcgaggaagagaaggggagagatactcagcctaacatgtggggcccacgtgggtcccacgctgacttagccgccacgtaggataaaaccggggtcaaaaccaccgaaggacctattgtgaccggttttgattagttaaaggacgccggatatctgttttgcggtttggggatgattttgtaactcaatgacaaatcgagggaccttcgatgtactttttcctatatctgatcagcgtgcatatatagcccatagatatgtgtgtgcatatgtacttatagataacttaactatgtgtacgtgtactatcgtgtataggtttcggtgcataccgatgcatatgatgtacgcttagatacaatagattaattttaaaaaaattaatccattagctacataactaattaaaaggctctcatgcgaagattgtggttgggccgacaacatacgaaaatggtgatctttaaataccttttcgtacaggcgggtgacataatcgcatacgaatatcggttttaagcttttggcaacctgcaaaaaccatttattagtagtatacattagctcataggtttgatgaagagttcttttttttaaaaaaagaaatagagggcaaaagttttgtgtagtatgtattgatatagtagggggtttgatgaagaacttttaccaccgataattataacaatatgttaccaactaattaccaaaatcctctatattcatatgtttcttacattcaacctactcattaccaactaattaccaaaatcctctatattaatttgtttttttacattcaaactactcaataccaactaattattcaaactactcactaccaactaattaacaatatctaattattaccaactaattagctaaatcaccaggtaaagactatataagatgagctagttattagtgttaattgcacaaaccatgtctacctctactgtcattacagcggtgtttctgttataccttgttttccccgtgcaatcagtagagttcttcaagaggtacgtcggaatgtataagaattatgttgtttgcattctactccctccatccataaaagttacacctattttacatttaagattttctaaataagttgtttctatttatagtctttatgcattcaaaacttaaatgaggagataaattaaatgtttaattagaacccagggagtcatctaaatactcattggttacatccttgcattcacttcttgattttgtaacatccaagatagtttaatttctccttatcttggtggcaaaagtaataggtgtaacttttgtggatgaagggagtaatataattcttatgtcttagctccatttgtttttttttctgatttcttttctccttttcagtgttgggtgggctccatatcatgttttggattacgacttcttcagaaacagttactatgtcaatttttacatgtttcgagacgatgtaattgctacctcaagtcagctacagattgataataggtatatccttagcgaacaaactcccaatcgtgcgccagtagattggaagatgggacatctgattgggagaggggatgacaatgcaatgttgtcaatccgagcagataacttgtatgtaaccggatttgccaacagaaccggtcattggcatgtatatccaaagtttgcagatcaaattcccgaacccaaaacactcctgacttttggagacgactaccattctcttctaggtgatggttccagccaaaatctacccaaaataaatctcggactgcatgccacattaaatgccatcgagactttgtccaactaccagccatcctcagataacacggccatcaaaatagcattaaccacgctaattgttaccctgccagaagccgtacgtttccggcctatccgataccggttattggatggatggtttacagggactcgtcttactagtcatttggcaaaggaagtggttagctggcgagacatgtcctgtgctgtccttatttttgacaagtatggaaggtggtgggcaagtgcagaggccggaatattgcaggggaagttccagattcgaagcaaatttgataccctccaataccttgatgtggtgctttggcctagacctaagaaatgctccctaccaatcttagatgaccaacatattcagcagattagggcacggatggataggagggggcaaggaagaggttaatttgtagcccctgattaactgctatctatatggaatagcttgttgagaaatttccttttcatatacaataatgttggtgaatgaatcttctcatatcagttgcattttctgtgtttgtgcatgtatatttttcattcattttcaaagactctgcattctacaatgatatactaccctttaaacaaaaaaacactaacctttggattcgctaaatcacgcattcaacgccccccaaccccttctcctcgatcttccttctcccgacctcaccgccggcaaggccgcccccagctgctactgcgccacctcaatccccagcgacatgggacggatggtactgcacgagtcgctcgacggcgcggggggcgcgaccccgggagggaacgaagcagcagcatgtcgggcgggcggctcgacaccagcgtcgccaacaacccaaccggtgaccggacctcgcatgcgccgcgctctgcgtcgccgcagccgcaggccgcagcggacgactggctcgctcgtctcccgatcctgcgtgctgctcccccatcggacaactacccttcttgtttgcgcccaccggtgcgccgcctgatcacgtcttcttcgaccacctcggctgttccatctacatccacaaggtacgttactataaagcacaattaacaacatttgcaacaagcacagataattcttttcatcgtttgacttcagactcactctgttacttcgcttccttgattgaatttggaagaattgcagcaagcacatatattctttgtattgtttcacttcagactctgttagtttaaattctcaagaatttcttcttgtcctggtttgcttggtggctaggttttaacatgcgatctgctttaatgcttttgttgatattttcagatacactgaagatgaagatgatatgattggctttactggtttttacaatgtggatattttcttttcacatgatcccaacagccttcctaggggttatgagaaacacaaaaacaagttgggcaaagaaccacatattatgacatcaaagtcacttcaggtagaggtttttttgatcatcagtatccatgttctatatttaactgtcaatgtgtttttatctgctcaatagctgtttatatctcaggaaaggtagttaccacaaattactcaattcgtagcattaagccagccatcctttgggccccttcccctacagagaactttataccaatttctcctcttttccccctacagtgtctgatgtcaaattttaagatttgtcagcgcacagggattatgcttatactttttcatatactttgaggaataaaaattcatttaagccattttgacctcttcatatgatccagaatgaacataaatagttttagttaaacctttaggtatcatatactgttaatactgtggtttacaatattctatttattattttccaagtgcacagtcagcttttgggtcgtggactcatggattttttttcattgattgtttcagagctctgtatatcagtatgtccttatctcagattaaatctgctgccactattttgaaaagtaagctatggtaccagcatatctatattgctagcgaagcctttttgtttacatgattgaatttttgttcttattagtcatctaactgaatattttagttcctctttggccagagtgagtcctagatgaaacccagggaaaatatctttaatatattatatatttaacataaatgttggtttatccctgtctctctgttcataggtagaatctattatataattaaaggaatagaaaaaggagcctccacgttcgctctcatggcctagaaattctcacattaatcggagaaaaagtaaaaaacagagttcatatataaatacaatttagaaatagctgaaattcggaattaaaaaataaggaatattagaagaggagactagtctatatagaaatacaatttagaaatagttgaaattcggaatttaaaaataaggaatattagaagaggagtatagagtccatatagaaatacaattaggaaataatagaaattcgaattaaaaataaggaatattagaagtagagtatagagtccatatagaaatacaattaggaaataatagaaattctgaattaaaaataagaaatattagaagtagagtacagagtccatatagaaatacaattaagaaaaaaaagaaattcagaattaaaaaataagaaatattagaagtagggtatagattccatataggaatttaaactaactaaaattcggaaaaaaagagcctccacgttcgctctaatgacctagaaattctcacattaatcggagaaaaagaaaaagcagagtccatatagaaatacactttagaaatagttgaaattcggaattaaaaaataagaaatattaaaagaggag

SEQ ID NO: 9176 - DNA, 60745 bp, Oryza sativa
tttgaagataatttcgtaacacttggggctagaaagtctggttagtacgaaggattttttttttttgttatgttcttgatttgtcctgttacattgctgacatatgtgttgttcaaacttgaaatttggaaataaaattaagatattaccagtaaacataaatgctaaaagcctaaaactaagaatggtttcctgtacttgtggttgtgtattcatctagttgcatgggtctcttcaatagctggagggtgaatactctttggaactgtatcttccataggtcatttcattaatggaatactggacttgtgtcagggaagctgaaaactaacaagaatctcaaactaaccacggtagttggttctttatattatacatatgaaataaggaggccgctagtaatatttcttaatgttaatggatgtttcttcttaatattctctgttaatggatgtttctcagttttgacaaagagatataacatacttaggttctcttaatgtttttggtcggagattgataactcaatatcactatttgtgaactgatgccaattttgattaaggttcctaatgcaataccagaaaacctatagtagaaagcataaatccacactgcactatgccactatgtactggttatcttctttgcttgaagctcaatggtctggtctgcagttggctatccatttctttcatgtgaagacagagcaccagatttttatatgaccttgaactaaccaaaatgcttctgtgttcttctatattttgagcttacttcatgtttgtttaggtgtgctagatactgcctatttattagaactgatcttggagtgattctgtccttccaagtatccaattgagaagtattcgcgggtgatgtgtttctgttttgtcctgaaattacagcttgatgatagaataggatggtcctggccttccagagcctggagacgattgcaggagaggtagtgccacactgtctgcttgggtggtgtgtgttctggtgttggagatgggagtgtgtgtgattgtgattgaattgatttgcaggtgtcgatagcgcccattccaggtaaaagggttgagcaccaaggtgtcaagattgagcttctgggtcagataggtatgatatgcgcccttgatctggtagattctgaatatgagtgccctaatgcctatggtgactgcatcaaattggtggtgtattataagacatgttagttcaggttgctgaaaatgtgatttgtttgtagacaaacaaatgtgaacggacaggttctttgttccgctgaaaattcattagagtatttacccagccaatgttgtttcaaattctcataaccatgataaagtataggatttaattgcttgagaaactggaaaaagtactcacatgagcacttcttttcttctaccattatcagcagcattgatcttcaatagttcaggtacttccaagttctaacattattattacctgtgatcttttatattgcagagctgtaccatgagagaggccacttctatgacttcacttcgttaggtagctctctcaagtgattttgaagagtcaaggaaaaagagctctctattaaggtagtcttgatctttttgcatctcttcttgtatgtcattgttcccttcaggttctttgcactcttcatatcttgataaattttgatgctttacattgttgattgaccccaagagcactatcttgcaagtttagcaggaaaattgaaccctctgaaaactttcctatctacaaataatggaatatgacttagagcttgctgttcagttgtaagccagtaaagctgttcagtatcttaagtatttttctccttttttttgtctgtgtagtgcgagaattagatgtcgctggtgaaatctatgaaaggaagacttatccatttgagttctctactgttgagatgccttatgattcgtataacggaacaaatgtcagattgaggtaagaaggccaagatgcttccgttatgcattgcacaggtcataacaagaacagcttgcatgacttgtagcatcgacgactttaataacactatcttaaagatcagccccccttggattttaggttcttaactaccgagcgaagaaaaggctggatcaagaaaagggggtactacgagccctctgccccacgcatctaaccagctcgcgtggttcaccggttccaccgacgtcacccttagatagagttattttgtcgatacagagatgcgcttgaaaagatcaaactgattattgatcaaaatttagggtttgaaacttaggtaattaacttcttctgcgtaacccaagaagaaattggatcgatttttgagaaatcgaattcagttaagacaagggaaattaagatagcaatttctgagccgtatgaggtaggaaactctcaagtacggttctaggggaaggaactacctattccaaaaagtcgtgtgtaatgcttgcaggtacatcctaaaagttaggattggcagaccatatgctactattgttgtggaatatcgagatttctgtgtaagtctgtaactcctacaatttcatttggcggaccatatgctacttctaaaagtcatgcttcatttcgctacctttatatatgttgataatctgtaactccagaaatttttgccattctagttggtcttggtaaaattagatgtatgttggcagtctcatatgcatccattgttctattttatcctttcttgttattaataggtttgaatggaattcgtttcagatttcatcattgaaaacatacaagggttaattagtttatgtttcttttttttttcaggtaagtaattacactcctcttccttcaattaatactccaatagcatcaagctgagtgctagtaattggatggctgtgttagatgtcagtttcggttatatttctttatttgtaaaggggttttctgcatatttgtatgcacctgtacatgtatgcacatatttgggcctttgccctgggatgaatacaagtgctattcacagcatggtatcaagagccaaactagggttagactcctcttgccttagatgatccaattttttcggcacttccgtgcatcgatttttctatcgagtacctgggttactgttgctgcctcattgtcggcgttgctcgtcacagccgccgtccgtggctagctctgctgctaccgtcgctcgtcgtcgccggccgcccgtcgccagccgttgctggccgtcggggcctcgtgggggcgggggctcgtcgccggctgtcgctggtcgttgcccgtcgccgagggccgctggccgtcgcccgtcgtcggcagccactcgccaccggctgcgcaagttcgcggctgctcgccttcgtgcgcggcttcgatctgtacggcttcgagccttcgacgtttcgttttcattttttttcttcttttgaccgatctggataagatccttaaaaaaaataaaagccacgcctctccggaaaggctaagggcgggcggcgggcgatcgcttcctggcctggcgcggtccccgcaccctccacctggttttttttttccaccgtattacttttctattttctattttagtgaaatgcacctaaagttctaaaagttctattttagagactaaaaatttataagtcaaaagtttatatatctgattcaaatttaattttgaattcaaatatttttatatatagtatttctatacatctaaagtttatacacctaaaatttatatacctaaagtttataagtcaaaagtttatatacccgtttcaaatttgaatttgaattatatctgattcaaatttgaatttgaattcaaatattttttatatatatagtatttctatgcatctaaagtttataacctaaagtctaaagtttatagacccaaagtttataagtgaaaagtttacataaccgattcaaatttgaatttgaattcaaatattagtttatagatctaaagtttataagtcaaaagtttacatacccgtttcaaatttaaatttaaattctaatattagtttatagacccaaagtttataagtcaaaagtttacatacccgtttcaaatttgaatttgaattcaaatattttttatagtatttctatacataaattttttctaactttatttttttctttttattttttgtggtgtactgtataggaagagaaggaggggaggaggaaggggagaaagcgcataggggggaggggaatgagggcgcgcattagcaacacccacgcctctcctagtcttttctgtgaccgaggcttaaaaaaacaaaacagaaaaaacatagccgcctctcctgatcttttctgtgaccgaggctataaaaaaagaaaagaaaaggaaaaagaaagaaaagaaagaatttcccgcttctctgcttgctaccgccgctttacttttgcgctctcgtcgtcagccattgctctttgatgatgtcatctttgtcggacatagtttcagtttcttgttgcccggttatttttgatggtgtcaactataatcattggactcagcatatgcgtcttcacatgcgtggtcagcgtctttgggatgttatttctggtgagctactttttctggcttgccccgaggttccttctgcctgttctttcgggttagcctactgatgaggacagagcaaaggtgcgaaagacttatgctgatgttatggagacttatcagagtcaatatgctatgtacaaggcttggttagatgaggatgctcgtgcttctgctattcttgtggctagtatggaggttcatcttactggcgatgtggtcatccttgcttctgctcatcttgtgtggacacaccttcgtgatcgttatgtgtctatcggtgatgctctttatcttgctatggtgcgtcaagagcagtctttacagcagagggatgctttagtggatgagttctatacacagactacacagctatcctctatttggtgccagcttgattctttggtccctgatgtttgtcgtacctgtaagtgttgtcagcgtcagcgttctcacatggatcttcgtcgcatctatgactttctcactcgtcttcgctccgagtatgaatcgactcgtgcacagttgcttgctcgacaccctcgtgttactttgatggaagctcttccggagattcgtcttcgtgaagcgggtgctctagtgcttccttctggctgttcgtactacagcttcggtaccttcatcaccgacagccgcttcctttactttgccatcacgtacttcttcaccagttgtgctatctaccagtagtcatctttattacacttattatgataaggatggacatgtggaatcgttttgcttttggaagaaggatttgcgacgtggtcgttcttcacaggttaccagaggttcttctccgaagagtactccgaagagtactggtagttcttcttagaggagtgtactggaagctcagatacataggagaaccttacgttgctacgtcgcctcactgcctctgcttcgactggttcagttggttcagttgctttgccttctacacactcgggctctgttgtttctggttctcaccgttccactgagggatcaccatctgcttcattgttgcccttttcgcctggttcattggcgcgttcctgttgaacttgatatggtctccaagtcttagagatgtgctgctggctgcatgttgatttttcacccaaaatatccagcatggcttggtccaataaacactgtaaggatgtcgactctggctgtgttcagtggtgggtgttgggaatctatcacccacgcatggaaaacggagcagtccattagcgcgtgattaattaagtattagctaatttttttaaaaaaatgcatcaatatgatttttaagcaactttcgtatataattttttttttgcaaaaaacacaccgtttagtagtttgaaaaacgtgcacgtggaaaacgagaagagagagttgggaactcgtgataccgaacacagcctgaatgtttgcatgtgtatggtgagctatactgtgtttaagtcaatctgaggaacagcagcatagctgctttgggttaatcattcttcagaagagtccaaccatgacgagcacatgtttgaatcagtttgaactgaatatgtggatgtgtgattgaacaggtgttttgttggaatcagtacaaccatgatgagcgcagtattgttgactaaaattagatttgtgtttgtataatcaaaccctgttgcaattaattaagtcaagttagtgagaattgggcgtacggctatatataacggttctgtttcgtagcgtatcgattagagaaatggatcatgcgcacctcataaaaaaaaggggaaaaacgggatcctgctgccatgatgaacctcgtccccccgcacgtcttctcataaaaaagtctacctgttgctgtatacttggaaagtatttcaatatcagaaatgtataaagaagagtattctaaataaagtataaagcttacaaaagagaagagaagagctactagagccatacccaagctcttctgaagtcttctggactttgatttctactctattcctattccattagcttaagaacactaaactaaactttagagaatatgaaagagttttgcttgaggtgtgtgaagagagctcttctgaagtcttctggactttgatttctactctattcctattccattagcttaagaacactaaactaaactttagagaatatgaaagagctttgcttgaggtgtgtgaagagagtgaggaggtaaagtccttttatagctgctaatgacggttgtggcagttggaaatgtcctaattgccctgcaaccgttcatggggatgaatcctggacgtccacacaaaaccccaagatggacggcactaatgggggttcggccgaaccaccaggggctaggccaaaccagcccatccttggctggcgacctcctccactgcttctctccgtagacttgtgaatttttggcccaattggtcgtatcatttctgagttcttggcacattcatacataagtctggttttcgacatcgttcaattgatttattgtctgattcgatgtcaattctccttcactttatggttattctctgcaaaaaggttagtaaacataatactaatggaatattattattctaaattgaatatgcattgcaagaataactagttctcctctattttggtaatattgacggtcgaaactgatcgctaacgaccatcaacagtgggtcagctcccgccttgcccaccccttgacgaaggggacgtggggtggcttcgtgattgagcggtggagttgggcttgcctcaacggggattaggaaagcggcgagtttccgaacctcggtgaaaaatctcttgtctccttgtctcatttatttatcgcatttatatttgtgcaatttacattgatagagacatacttgagatcatatcaccctaggattgctaaactgaacttaggagtgtaatttactttcctagagatataattgagccactatcaccctaggtttgtaaaacataacttagttgcttagttagacttgaccctcaccgagcctagtaacttaggttagttttgattaggtgtcatttagttttaaatcgcctatgcaccccctctagtcgaaatctcgatcctacaccctaaaccgaaatactaatataaagcatccctgattttgcaaaactaggtcaagttaggtcccaaggaaacattgctcctcggttttggtgacgtggacgattgagtcagcgtgggccaatatgggccccacatgttagccgataatcttcttccacctatctcctgtctcttcccatctcaacccaaaactccagggcagccggcaacatgtgaggagaaaagtggtggctaacggccgcgtcatgcacatgcgcgtgcaaagagcggccgagctcggtgaagagtgcggagaagcgaagtaggaagggctcccggcacgtcgtcccctcagggcacaccgccacgccgttgtgcggcagctcgcgcgcatctgcgtcttggtcacgtgtcagccacaccatcgggattggtgagaggatctcctaagagacgggagatggagtacattgagatgcctgagcacggtcacgagcaccaccggctccatgagtgtccgtgcgtgcacatgaagaggacgtcgaatgttgaatcaagggagagctactcggtggccggcggcggtaggtagaagctcgacagcgacgaccaacgatgggcggggagaaggctggcagctgtcgagaagcttgatagtggcgggcgacagggagaagggcgtaggcatcgaggatgatgtaaccacatcgtggtgtaaatggagttgatctcgaagatgatgcggcggagccgcgcgtgctcctccgcggaggagaggcagagctcggggacacctgaacacatcgacttttgagtagctcagcagggatggccctgagctcgagggataggagcttggccagcgtgacgaggcggaagccctagccctcgcgcacataggtgaagacgacgttgctgttgtagttgggacctgcccgtaccacgcgtgcacaagtccatgacgcgagcgctccaggccgttgggagcttttccccaccggctaacaccattctccccaccgattcacggctgccctagaggtttgggttgagatgggaagaaaggggagtgaggtggaagaaaattgccggctgacatgtggtgtccacgtgggtaccatactgactcagccgtcacgttaacaaaaccggagagcataccttgagatcaaatgtgacccgttttacaatattagggatacattacatctggtcttccggttagggacagttttaaaactcgacgacaagataagggaccttaggtgaacttcttccgagatgaaaaatttccagcctcatgggcctgtgcatatgatatgacccataggcaagcgggcactgcggcagcagagcgctgcacaatcgacctccgcctccccaatccatcccgtctcgtcgcccgccgccgtcgacgactcccgtctcctccgcctgccgccggcgccgatctccatcctgctagcagaggtggcgccggcgttctcctgctcccgccgcatcatcgctcaccggtgagcatcctaatccatcccgtccggcctcgaatttcggtctcctcgcccgccgcttgtgccgaaccaccccaatccggcgagcagaggtcggcgcccgtggtcctcctgcagtcctgcttccgccgcatcgtcgctcgcctgtgagcatccttcataaggtattttgtgtttttctcgagacatcgaaccagcctcgtcgtcgccggcgaccgccgccgaggatgccggtgagggtggtagacaccgcaaccccttcctcccagccctcatcaggttcgtccacctcccctaccttctctatgctaatgcacccaacccctaatttgctgtgtaatccaagtttttttggatctgatatagcctaatcaggtatcttctagggtttgatttagtgcgattttaaggtctattggtaatctagattggtctgagttgtactggggtatatgtgttttgatccttttggaatactcaattgttataattttggccactgacgcaatgcattatttggggagagctcggatggttttgtagctaagttgccaactgcttgtaatgtattgtatgtttttaaggcgttgcaatgcttgtggttttgtgtcaagtgttttctgtttcaggaggccttctaaataaataaaccaattgttgttttagttcacctgcaattgaaattcattagttattttgtatgaatttctggcaatagatagcccaccatgccaatgtgccatactgattaaaatgttgcaggtcaagatgcaaatgctgggcatccgtctcctcctagctgttccctcttaagtgctggaagagtaagtctttttgtgttgttatttggaacttgaccaaggatcaaatcttcttatcggtgtggtttatggaactgaccatatgcttgtaccatctttcagtgttatgctggaacccagaatgtctctaatatacaaaaagaagaagcttggaaagttaatgtgcggatccatggctgtgatcttgaacagggttatttatgtggaacaatggaagcacttaatgttcccttagctgatacccctgtgagcaacctacttcattttccactttgactctgatctttatgttccaaaattgttcaactttgttttccactttgactctgatctttatgttccaaaattgttcattaagaatacatttgtatactaattcagtaggcaaacagtttgtccgataaaattttaaaatatgctatgctttacttcttgttcccattatctgatttgcatagcaatttgcaaataatttccataggtggtaacgttctgggagggggagatagtggatgctaaaaattatacatttttcactggcaagtgggaagcatcgtgagtatttaactatttacgttttatccttgatactatcatctacttgttttattaatagatgcccaagtgtatggtaacagtccaaacttactcatgaaacattactcctgcttctgcttttgcagcccagaggatgatattagacactggtccaagttcccatcatttacgcctcttctggtattctgttgcctatcttcgtgttgttagttgccacgatttttttggatacatttctcacttatgtttttccacagagtcagattgagacagatggtggcaagtccgtggacctcagcaactatgcttacatattcatggtactgcaccatctgacctttcatgtatgtgcaccatttattgaattacaaagccataacaacttagcattattctgatgctacatgtagagatggaaagagcagtactttgtcaatgttggagtggactgtgggttgaccatagctggtttctactatgtctgcttttcatgtagcgacggttccattagcgggtattattatgatccaaacagcaggtaatgtatattttgctggcactttttattgcgatgttacaactaaattctatcgaggaattgaagtgatataaatatttcctgctctctcaatttacagtccgtttcagaagcttgaactgaagtgtaccaatgagaaagattctggatttaccttttcgtcctacgagctgcagtgagagactgacaggcctgctgtcattatagtatgtgcggatgttaatatacacaatgtatgtactgaactcataattctgaatggtgtcccattaaaagggctgagatggcatgtttgtaacagtgatttggagcaagatgtattttattttctttgtaatatgaatataagctggtaaactttctagtttgaactacttgtgtgttctttttgtgctaatcatggcatggttatgtccaaaataaataagacaagaatgtgagggctagttgctcgttcaaagaaatatatacttctttccagagtaattgtagttctgcagttggaggattttcgttttgtttcaatatttctgttctgcctacattgtggaatttgtggtcactgattgtgaatctaatctctggtactgagctttatctgaagagacacttaagattgcaatcttgtacattagtttctggtacacagccacataaacctccttttggtttcacatgcagcctgccattgtaaggtatgatgtaattctatgaacaaagtatacttggggcaaacactctgtcttcgcctccggtcttcggacattgtaaggtaaacatctctctctacttatgttgtttcatagagtcttgatctcgtgcttcaagccgtagtcaattctctaatgagaattcttctgcatcttcattgcacaggcttcaagttattgctaaaccctataataatattctgcagataggactacccttgcatacttggtgaaacttaccttcataaacacaaggatgggtggacagtgcaacaggatggaggtaactcttctctcctttctggcagaaaccaagaaaacacttctttgccctctgtaccaaaggcctctcaacattcacacaccaggcataaaacatatcgagggcagcctcagtaatgacttttgagagtactttatcaccttctccaggtgccagcttcagcatcaggtatctattgaacgatatgatcttctctaacatttgccttctgccaatattatatgataacattgcgtcttggattatagagaccatcctgaggactgcctcatagactatagcatatgcatgactgaatatctcggttgctgtttcccacagttcttttctgtgccaatcattttttacagtttctgccccctgttctaagattggcgcaaatgttacagtcttcggtttggttgtgttgacacgcagctgcttcgattccctcagcatggcttccttcatttctgacttaaacctgctgctgatcttgaagtattgttgttcattgtgtgcagttgggctcgggagtggtgaattttgccttggtgatgcttccatgtatacctcaggtgcacatgctgattcacacgctacaattcacatggaaaacacatgtattactcttcatcataacaaaattatactggaattgatatcttgactgaatttaactggagaagaggtggtgctcttcttttttttttttcatttcaattaacagattgtccaatgtatgcaatattgtgaagtctggcagacatacaggaatggggatggatgtcgagctgtgcttggggatccgtagtctgcattgttgtgctcattgctgctgctgccgtctgcactgggtcctgcatgtcctcttgcggcttcttcttgtgatgcagtaggtgcatccatttcttagccttgctcttcaccttgccgagaaccggcttcttctggctcccatttggggtccgcggtgatcccatcggactctccggctgctgttgatttggatgacgtggatgaaccacagtacaggaaattgagttagtggggatcacttgtaaagtattataggataaaaaaagaaatagcagtcaaaactttcagtcttttttatgggccttctggctttagatcggcctgaacaagggccatgaaagtccccgaggactggcctagtaatcaacattcttgaagacccatatggcaagtatcagcccaacagggcgactggacatgaagctttttacattgaaaaaagttcacttttacggcgagtttgaatcgcgtttctcaaccataaaaccaaggtataactcatctcttatctcctaaaatcaatgaaaatgaggtcctaaggcggtactgaggtaggttttactgacatggtgcctgggtgacagtttgacttggcacttatcccatgtaacattgatgtgatagtggaaacaaaattatttgtttcaaaaaaaaatatgtggggcctatatatcaatcaaacaaaaagattataacccacatgccattgacatccacttcttcctattctacccctaccatcttttctctccaccagcgagcagaacgagtcgatgacgacggtaggctgggaaacgtgctcatcactgatgctggtgacaaggacggtggaagcttccacgcagtacaacatggtaattatatatagcctagagatccctcctccctctccccttttctctccctttatcccattatcccagtgaagagagagagagaaagagaggcagacgacggcaaggaggaatggagatttggggtgggggtgcattgttgatgtgacacaactcttctcgggccgatgttcctgttgagatcccacacggttggtgccctcatggaacaaggataggaggtggtgggatcacactgtggtcgatgggcccaaatccatgccgtgagcccatgacccacaagcctagtggacacaggatggtggcgctagcgttcggagaaggtggaggaagctcgtcggcctccccgctagtccctcagcagcgcttcctttatatgctggcctctcgtcagtgtcgtccttcatcgttgccaactccagcttgtttagcgcaccgaggtggatgccaccaccaagctcctccttctcgccccacctcatgccttcctcccgcagtggcaaggcttggggttctaggacaatggagtcctgtcgcgcgcccgatctaaggcctgctgccctccaccaccacgggcagtgctggggaacgagcttcacgcaacatagtctgccacttgccttgaacgtcgacgagagggggtctgataggctggcacctgcacctccaccatagggaagccatgagttgtgttgtcattgttgacatcaacgccaatgagcgccccatcaaacatgggcgaaatgtgtccaggcaatggtggtgatcctcctccaacgcaactcatgaggaggctgatgtatcgccggtgttggcgtcgacgccgacgagcacctctcgttgagctcaccaccttgaatacaacatgtgtaagaagagagggagaagtagatgaaggatatctcggtgacatgtaggtcccgaattagggattttatttttattttcgcatgtaatgccttgtaggataaagactaagtcaacaaaccatatagatgtcacgtgagttgaaactgaccttaataccgtttggaatctcgtttgcattgatttcgagagagaaaggatattaagggacacgattcaaactaaacacttagacaaagaacttaaaagtgaacttttccttttacgttaaccgggatcttatctgctgatcacacagaatacgtaagcacttacaacttgcaagttggaactctcacatctcacaatgtgacaccgaataaacattgcatgtctctctcaatctcaaaaaaggaaaaaaaacagcactgaatattaatataagtgcaaagaaaacgaagtgcatatttgcaagcaacttttttcttttgcttctcctttttttgcaagaagtgtgtatcttcttgttatcctagtgaagttaacagcacgatcccgcgcatgtacgtacgtactgcatctagtgataatccactcgccaaaggatctgcagcgtcccaagccaaatccaacatcacgcaagcaacttacctgctgcttttttttggccatggcataattttctaagataataaaaaatattaaaccccatcaattatataagatgatataatatcgtactaagaatactactagcctctctgtaactaagatgcacgcataaccaaactacttccttcgtacttgtaaaggaaattgtttagaaccatgtttaagtcaaaccttaggaatataaatcatgaataactcttaagttgttaagtttgaaaatgtaaaaattatatgaatagatttgtcttgatggaatgcgcaaatttaattccaacaacctagaacaatgtataaaacacaaaaatcccaacttgcacaaatcctttccatacttttcgaaaaactgtcgcattaatcctttccatagagcgtgacacttggggtgcgggcgtgtggctagcactgatgagacatgaccaagctatgcaaaaatggagtacacacttggaacattctgtcaaaggattaaaactcgttcccctattgtgaccacgcattgggagctggccatccgcagcatgcgagtaccctccatctcctagttgcagccataacagcgaatcattagctaatttggtctcgttgttttctgattaagatacatgttttctgattaagatacatatttgattcttgttagcacgttcttcaaactaaactgtatgtttcatattaaaactttttatataggttgctttaaaataccatataaatccaattctcaagcttaaaaatattaaaacttaattaatcatacgctaatggttttcttatgttacgtatatcggtatatgtatttaatttttatccattatccattgcaggtttgagccgggcgcaagtcgaagaaaagatcataaaacgatggatcgatcgacatcaatcttggggaggaggagaggagattggatcagtaggagtggagatgccaccgcaaatcaaaatatcaaatcgggaaaaaagatgatcgatcgatgagctatacaaagatagatagatagatagatagatagatactaggctgagagatgcacataatggcctccaaaagtgcaggcctaacggtgtacacggccccggtcgaaacggcgccatcgctgcacatacccccggatggattaattgttggattgtcaccaactcgatcgacggcgcaatcatgtcggggggtccaaagcaagccccggaacagtgcccggatcagcttgggcacaaaacctttttaagcgccaattagaaactggcctaaaagaataggaaatggagaaaagggcacacaagttaaagtttggttgctactttatactgttcatttttgggtacagatttgcatcggtaaagagtggactaggtttttttatggggttatgtagatactttcttcatgctaaaataaaataatctaggatgtcactctcattttattattgtaaatctggacagatagaatatgtataatctcatcttcttttgccatattctgtttagattcgtaataataagacgagtctattttttttttttggattttgttatattttgggacgaaggtattatatagtttgatccaaattttaatgtatgcaacaaactgaaactgttcaattgttgtcaggccaggacaactggaaagattgtaagcggcatatttaaaatttgtcaaatgcagtaaaacagccctccgaattaattcaaaaggcgacgcactgaagcagccattttttttaatttgaagaggaatcaaaccatccttttacacctcacatttctctaattttcttggttcctgattatttgaattttctaaacacaacattaatgcatacactcgtctctacaagcattatcaagattaaatcaacatatgttaagattaataaattcatcacatccattttgttatcgacgagtacatcactatcaatagatggaaaaataattagctataaatacaaacaggcatataaaaaattgaatacaatgaatatgttctacccccaaagaatctaacatgccgagctaactcagttcgtggaatttttattttcttggttctgaaatccacggtggccacatggatgctgttccaaatccaattgtatatctagctaataaagtgtgtgtgaatataattagctcggcgtgggagcacaaagataaaaagcacataaaaataaaacaaaaggcaaatgggcgcggtcgcatcagttaatccgacaatcactcttcacccattatgctaaaaacgagctttcgccactaatcaagcccaaaattagtgggaggcacaaaagaacataggctttaattaaaggaagagcagctcgttgttaaagtgtttaaaaattggccaaattgattgaaaacaacaagaaaaatgtttgaaatagacacatgcacaatcgccataattaaaagatcaggccaaagtaggcaactgagtgcaaaccttgccccgtagtatatatagtagcaaccattaattatttacactaattggcaccattatatatatagctagctaggagaaatgtagacaaaaataaaatttttaaaaaccaacaatgcatgcatgccaaacgaagaacacaacatccacaagggcacacacaaaagcttaagaaattcaaatctaataaaaactcgaaactttagatcaaaaaagttggcatcatcactgttcattcctctaaacaatatttacacttggcataaacatctctgatgatctatgaacaaccaaagaaccaacacattctttcttcttctaaaaaaacaaaaaaaaggcgagcagctcagtcgatctcacgaggtctcgatcgccgccgccggccggagcaggtcgtacttggcccagacggcgtcgagcgggcacggcttgccggcgtcgagcctgtcccatggcttccccttgccgctccagtgcaggaggctgacggcgccggcgtgcaggccgcggcagagcccccggtagttgtcgccgccgaggccgtgctggttccagcggtggtcgacggcggcgatgcggccggcgaacacgaggaggaacggcggcagcgagcccagctcgtagatgcgcacccgtctctgcagctccatccactcctcgatctgcgccgtgtaccccgcgcgccgccaccggggcaggtcgagcaccatcacccccgtgttgaagtagcacgcgcgccgccccgcgaacgccgcctccgacagcgcccgcgacgcccagaaccccggcgtgaagtaggccgtgaagttggcgccgcagtactcgggcgccgccacggccgcctcccccgggagcggcgtcgcggcgagcgccgcgatgtcgtcggtgaccacgacgtcggagtcgaggtagacgacgcggcggacgcaggcgggagcgtggtggcgaggtaggagcgggcgtagttgagcgggcggtcgagcgcgccgcggatggaggtggagatgagccccgcgacgcggactcgtcgaacgggtacacccggaacgccagcgacgggaacgacgcccgcacggtgtccctcagctcccgcaccgccgccgccgcctccggcgacgaggaggaggaggcgaggaagtggaagtggacggactccgggcaggaggcgtggcggaggacggagagcaccgcggccatggtgcccctcaggtacggcgcgtccagcgtcatggccacgtgcaccgccgcgtgcggcgagcacgccgcgtccgcgtccgtcgccggcagcggcggcgggcaccgcgccgccgccgagttggtgaagtgcggcgcctccctgtactccggcacggccaccgccgcgccgacccccagcatcagcagcaggacgagcagaggagcgcgcggcatctgagctagcttggccatgtcgtccatgtcctcgcgtgttcgcgtttgcgtgtgagagactgagaggagagcgcgcgcgcgcgcgttttatatacggcgcggcgcggcgtggcgtggcgtggcgtggcgtggcgtggcgtggcgcggcgcgtggagaggcgcgtcaaactggggggtcaaactgtcaaaggctttttgggaggggggaaagcgtgttcagacttcagacacgtgacgcgtacaggagtggtactaaacgggtttgagagaggacgcgtgattaatggaagggggttaaatgcttaacttcgcgtgaggatgggattaccggcacgtttggcgtttttactacaagtagcgcatagtatgctattttagggtaaaaaagaaagatttgcaagtggtgatgctattggaagggagtgtaattaatcatgcctaggatggttctcttctttttttaagtatagcttttacatgtttacctcatgttggtttgtttaattgggattgagaccatctgataaggagtggcacttgggttaactgtgagtaactcaacagaaattatgttagttccaaggttgtcaggatcgggatactaagtagtactccctccatctacttttgatagtcatatttcatcttgatacacagaccaatgataagtaattctacttatcattcatttaagcatgctactagtcattcctcgtaaacaagcgattcattaatatttacatttctcaaagcccatatagccaatcatgtgtggaagaatggagagtcacgcattaaattcgagaaaatcattaagatgataggttgttggattgaaatatgcctatcaaaaataaaattttcagatttggaaatatgactatcaaaaatagatggtgggagtatcattttgctcaaagtaatatcgaatcgtaggatcgtatcgtagtatcgggatactatgagattttttttaattttaattaatatttatattaattatatatagccattctatataaaaaatatagtaatgatatatgtcatgcaaataaagacatttatcaagagaaaccacgttggttttgatatattgaactgattttcatataaatttgagtatatttagttacattattttttaaaccatgttattttaaataatattgtagtattgtagggatcgtagaatcgggataccatataagattttgtaggatcgtgtagtaatgaatagtaggatcgcgatattataaaaattaggatactaggtgggatcggtatcgtttcgtctcggtaggatcataatatcgtaagatactagatacgaatcgggataatgacaaccttggttagttctaaaaaacagaaattatgttctgtttaaatttcgcatgaagttttgtcactaataaaaaaagacgtgaatattagggcatgacctaatattaaataattagaagaggtgagacatcgaactcaggttgtctagccaaccaccttgcgaagctagtcggaaaacccctaaatgtttctcgagttttgttcctagtaaatggtttaattttttcacatgactattttgttcttcgttgccctcaattataaggaacaacatcacacattttgccatcggttctcttcctgcgcttctagggcttctttaccacagttgcaacatagaacatacctgttctcatgttttttttactttgaatcaggtaaacttgcaatccctttgtctctagttaggctacatttgtcctttttgtcatcactatttcaagccaaccaacgaccaccattgcaagctacctgccacaaccttaggccttgtttagtttatgaaatttttttgggtttggttatcatatcggatatacaaacacacatttaaagtattaaacgtagcctaataacaaaacaaattacagatttcaccagaaaaccgcgagacggatttgttaagcctaattaatccgtcattagtaaatgtttaccgtagcactatattgtcaaatcatggcgcaattaagcttaaaagatttgtctcgtaatttacacacaaactgtgtaattggttttttttttctaaatttaatactctatgcatgtgtccaaacattcgatgtgatggttgaaaagtttttgtttttttttcctccaaatcaggcagaaccctatatttgaggacgatctcactgccatgctcttccaaacttccacaagcttgggcgcaatgccgcgaccttagtgataattccttcaaatcaggttgaaccccaagctctttctctccttcacatggttgcccctaatccgcatctttagcgctagccatggtggccgataagctcgatctctacttccacgagggccacttataaagaaatagaagctggtataatgtgcaatttattctttggaaagataggaatagaaaaggaacaatattgaaatatatgtgctcgcagatcccaaaggaatctaaaaacatagatgcaatccaaatgaattcggctatccttaatgctatcttccaaacaacctggataattagaaaaaaagaaaaaaagtacaaattacgtcccgaactatgacgacaatatgaattacccctgaaccacaaaatcagacattttatatcctgaaatatctatactggacgaataacccccctcgacccaatccaaatcggtattgtcctacataacgttcacgtggtaatctagtcatcatttttttaaaatgctggggcccacctgtcatactctcccacctctctcttcccctcttcctctcaatctctctctatctctgtctcagatatcgttgggagcgacaagttggtggccggcgatgggcgtgccaggggcgcggcaggcggtgggcgtggctgagcccgtgtccccctgctgccgcgccgccttgctgcccccctgtcgcgatggagggcggcgaagtggcgagggtggaggcggaggtcgtctccgcccttctgctccgagcccccggcgaccgccgccatcaccaccaccccgtctgagttcgtcatcatcatcttcaacctggggtcatcggtctctctctctctctctcacccctctctcgggccgtcgggtggtcagcgtgcacagcagcgggtcgacatggccgtgtctctcttcatcctcggcttctccctccgcgtgtggtgggcggcagcgacgggtcgacatggcctcatctctctttgtcctcagcttctccctccgcgtgtcgtcacctggctccgagtggtgggcggcgtcgaccagcgtggcggcagctgtcgacgtttgatgtcacgattccggtatttgcatagtatggggatcattgataccaggatatatgcgagattgaggtaaaagagacggagacgaggatttttatacaggttcgggccccctgaattgtcaggtaataacccttcatcctattggccgaagccggtattgctcttattcaccataatcacactcgtacaatatttggggtagcctatctaagtgttgtcgacatggcggtctgaatgtctgactcgtagtcgacaacagggtagccttcctcctcgaatccgcatccggcgagatcagagacaacgctatatctctcctgacggtatccgtaggcaccgtaggggactagtcatgcctatctctgaagtcgatatctagtgtcttgtcttggcgtatgttggcttgtatgttgtggcttctgttgttccgtgttcactctcctcctagggggctttgtatttatacccataggtgtcctcttgtccaagtagaactagggaaaccaatatggatacaatccgagtagtccttgtcattttcatgtagaactctagttatccttccttatgcggaactcctcctatattcgaatattgtttccgtataagacatggtatgtggtgggtcctgccgagatttagtcaactactattaagtatgtggtatccataaccctgacagcagcggcggcgacgttcttgatagggtttgggtcgtccagtgcaggtcgagcacacggcgttgcgcgcgggcgggggtgggggggggtgggcggagggagggtgcgggacgcggaccgcgggctacgggcgtcggcgaggagggcgctagaggcgatggggctatagtgttgcggactcacggagagggcgcgagaggcggcgggttgcggcgaggagggcgctccctcgctggtgcatcctccaacctcatctgcccctctccccacgacgatgacaacgaagcccgcctcctccaacgccctcctcaccgcttgccgcccgcgtgccattctcgcgctttgtcgccaccccccgcatgccaaccgcccgttcgcgcgccgccgccgccgcccatagcccgtccacgcacgcccgagggagtgaggggggaggggaagagaggtaatgataggtgggccctatattttcttttatttctttttgctgattggatttccacgtcgacgtcatgtgtatgccacgtaggagaaaaacagctcaggattgagtcggaggggggaggggggcgggggagttcatccggtatcaatagtttaaggtgtaatatgtctggttttgtggtttatgtggtaattcgtactgtcgcaatagttaggggggaggggggtaattcgtacattttttttcttagagaaacaaacatctaaggatttgaattctttgaaactcctgtgaaaaccttcaaatcgaaaggtacattcaggaggccattattcatgtgccaaaaaaaggcgaccattattcgtttcatttcgtagcattcgtcggtgaggaattgggatcaggtgcagtgaggggaggcatactgcacagcagctgtaggtgggaccctgtaagaacgtgccacgtggtcatctgatacatccatatgaagtctacagtcagatgccttgacttcagctgcatagaaagtcgttttgaacagcgatgcgatctctaaaacataattttaattttttgtttctataaaaatatttattgaaaagtggcatatatatttttatgaaagctaaatctattcatatagtttttatattttcagactcaataatttaaaaactattcatgatttatatttttaagattttacttaaatattatcttaaacgacttcctttaatagtacgagaggagtatgtatactagtaccagtacccctgtacagtagtagtaatgaaattcttaaaaaaaaagaaagaattgatcgagaagcaatcatgagccaagatcaacgttggatcgtgagggacgacaacgtggcgttttcagatgccaaagcactgtcccaattcttcgtgtgcattgcaagcaaaatggcctgtcggtgtgcacatgtcaaaagacttccttttttttgaaagtctcgtcgtctgattattgtcttacaaatcacaccaatttcaaatttagaacctacatttttttttaaaaaaaacttataaatttgttctcttcatttttctacggcttattagtcgttgctcgtaatttaacacataacttgatcagagctggaataatccatatatttgctgaaacttctctggccctgtcaaacatgtttttttaaaaaagaagaagaacttgaaaattttatgataatctaaatgctgtcattaactcctcgtgacatggccgcgtagttcaacaggtaatgtgaaatcttcaatgccacaccgtttataccagtatggctctccatgccctgcaaaaacatctatccattcacatcagccttcattatgtgccggctctagttaatgcctcctccctacttaatctcaaattcacacaggcaaattaatcggtgaaatgagattaattaacctaaatgcatggttaaaaaaagaaaaccatactggctgctgcaccgacacaagcgtagctacaaggagacgagatgacgaacacatcacacaactatacacaaagcatcttcattatgaggtgacagtgagaggaagctgctgctcccttggaaagctctacagatctgaatgatctcgtgaaaaactgaaaatgatgtggagattttaaaaaaaaaagaaagcaaaggcaaaagtaataagatcgaatcagaggtggagaggtgctaaacagagtaaaaaatggtggctttttcacatggaagatcagcaagttcaggaaggaatggtaaatatatcgttttcaggtggatcaagtcgatctctcgatgatatctccgtcgatgctcaactaaattaagcaagaaagcaaagtcaagatctctcctcactcttcatcctcggtaaaaaaataaaaataaattacaggaagtcaaagacatctaaaaccgtgtaaaacatgaaacaagtaattaaaaagaatgaattacaggaagtcaaagatctctcgaaaggtgtaaaacacaaagcaagtaaattaatcatccccaccgtcaattgtcataaaaactactccctccgtctcagaatatagcaacctagaatcggatggaacgtattctaaatcggatgaaatatgaatacgttccatccgattctaggttgctatattttgggagggagggagtaattgattataaaaactgaacggtatcagtatcagtagagataacggtaaaacactggtaggaatgttcatgagctaataactcatccctgttcgcattcaaaaaataaaactcaaccgtgttaatgtgtactatgtacaaccgggttcaaatattaggtctgtgcgaattgtgcatgactcaactggttatgttttctttaatcaacccacatgtatttaagttttagacttgatacggatgctcttatttacggttaattatttttttcagtggtaagtaacgtacccatcaatagcgaaatgttcatgatgactaggtcaattttaagatataacgacccatcattttgaaggcgctcataggggtaaggtgcggggatgtgcgtttataggggtgatcatgcccgtgttataagcgactacgcttgtactgtgttactgaaaaaatattgggtctatggtcatatggataatgcagaggtcaaatatacttttatatatacggtattgctagatttcaaaatttcagtaaaaaaaaattacacatccataagccgaaattacattggtatgtaatatacaattttacttaattttgtggttacatatatggttttactttattttatctgagtttgaatacttgtttacatctagtaatattgtaaatctgtataaattgtaagtttctttcatgtagtttggtgttttttttaaaaaactttttgtatgttagactagtttattgcttaacttgttatctaagaaagagctaggtgtgatgagaaccattagattaaataagaaaagtgactgaaatttaattcaggttgcccatctcttgaagatcaccttccttgcaaagcttctgtttaatttgccccgttcactctacaaattcagattgatttagagattgtccccttccctctacaatttcctattgaattcgagattgtctacaactgaagataatcaattatccccaaaaagttgtccaactcgttaatcacaaagacgcttaacaaactaactaactaaccagctccgtctaaaaccgatcgagtttttcatgtacagctaggtcatagcatgccaaatttctgtgcatcaccgcactaaccaaagcacacctaccaaaaccatttcctagtacacgaacgacgtcgcggtctccgcaacttgtctcccattactgtgacctgtacctgaaccagctgctgctgctgccgccgcctacaattccaaacccaattccaacacatgaatgtctcaccaagagcaagcagcaatgcaaccagggttcgcaacagggacggatctagcgtggaacggcgagggttcaaacttcgaacccttcactatcaacaccgtgaccaggagagccctctgaaattttctgtcatacgtaccttaaaagaagtgttggagttttaactaatttattcagtctctcttgctatctttctgaatccgcctctagttcacaatctcaatactagataaaaatcacttgcaagcggtatctccattaataaaccaataaagacagataaaatccagacatatcttgtcaaaagttttaaatctacttcgatttttctttaacttaataaaaaattaagccgatcccaaaaaataataatccggatttcgtggtttctagatagatcgtaaacctgaatgcaactatgcaaactaaagccaatgagtccaaagatggctttgacgggcaggtcaaacaggtaaactcgccgtcaactattaggctcggaattaggtacgtgcaccaccactgtgtgattaggatctcaggatgatctgctaaaattagtcgcccatttgtaaattcgaagtcagagttggggtcagaggctggacgatggtgcgaccacgagcctgagaaactggacagttttttttgccttttgaagcgtctaattttggagccgtcgtttgcagaaaagaaagttcacaggtaagccagctgttagaccggactagcatacatctcaccgtcaagaaagctctgttcgtcaactgatttcagttcatcaaccacgaagctgattgacccgacaagctgcagaaaaagggaccaaagcagtcgtaaaatcatgctggtaaaccaaagtaatgtagtagttatattacttacatatgcagctggattacttgctgataagttttatatacgattcaccgtgttgatctggcatcacgcacagctaggattagcggctgatcagatccttccaaactgactaggataattaaagctggtattgttgtccactaagcacacatcaacttaatctatttctatgattagtaagagttgatatcgccggactgataaggctgtgtttcggcgcattaggtttctaacatccactccctcgttgtccacacatgcttctgaaactgataagcggtgttttttttaaaaaaaaaaactatatgaaaaagttgtttttaaaaattatattattttttaattttttaactaatgtttaataattatgcgttaatggatttttcataagggaaagcggagtttccaacctcaacctctaaatgcagaattaatgcagttataggcccagtttagttccaaaatttttcttcaaacttttaactttttcatcgcatcaaaactttcctacacacacaaacatctaatttttctgttacatcgtttcaatttcaacaaaacttttaattttgacgtgaaaaacacacccatagtcttgtagtactacaaggaagcaaaacgcagacagcccagtcacgcagcatagcaaagcaaagcagaggtagtcgatgagttggtcacaaggaaggcaggcagaggcagtggcgtctccactaaacccaagcccagccaaggctatagttgcccaacccacttgcccattgcagatttgcaggtccaaaccccgtacgtacttacccgcgtccgtctcgtctcgccttccctttccaagaagcttcccgccgcgacgcgcagccgcgcccgcgccatcgttgctgccttgctggctttgctgctgcgtggacgtcgctttttccttgctcagttcagccctttcaaccgattgaccaaaaactcttcgcggtatttgtaaatttgccaccgattttttcaatattacaagtatgtcactcgaacgatagttctagtagcatttttgcaattttctagtgacagtcttgtaataacgattcaaaatagtggtaaatttgtaattgcctcaaactctttataaggggaagctatgggtgtaaagttttagcgtgtcatattaggttattatatatggtgttgtttagggtgctgggcaattatgggcctgtttagtttccaccccaaaatttttcaccccgttacatcgaacgtttgaacacctgcatgaagtaaatataggctaaaaaagtagctaattgcacatattgcaactaatttacgagacgaatttttaagcctaattgctccattatttgacaatgtggtactacagtaaatattgctaatgatggattaattaggcttaataaatttgtctcgcggtttattgacggattctgtaattagtttttttactagtgcccaaacaccccatgcgacaccctatataatatccgatgtgacacgccaaaactttacacctctggatctaaacaccctctatgacacgaaagtactactgtgttcttagcgacttaggttgcgttagtttccctaggttgggaacgctatcttctggcacagaaaacggaacggtccattaacctgtgattgattaaatatttactatttttttaaaaaaaatgtgtcaatatgattttttttaaactttcgtatataaactttttacaaaacacacaccatttagcagtttgcgtgtgtgcggaaaacaagagagaggggttgggaaccagctggatcgaacgcaaccttagaaatcaatgaaaattattatattaaaattattattaaattagctacaaaattaagttttagaatttaaattttggcttcggctgattcttaacgctcttcagcttgtattgcgatcggtggcgtggtttctgcagtggtagcagcggcagctttcctcagtagctttacggtcacaatcaagaattccagatatggcaggctgctgttccatccatcggtggtttttggggatcggccgaattttcaacgcccttcacatccaaacggatgcgcacaggaacaaacaatgctctgcttgcttttctggagggagaagaattgtctcgactgctcttcttctttgcagatttggaccattttggtgcttcaaaagtttgtggcatcgaggtcaaactggctggccctatgattgtcaaaaagtttcagaatcgtctataaataaatacgcactcagacagttccaagcctctcgttaagaaaatactagtactaatattagataatcttcttagagcaagtttaatagtatagcccactactagctccaattcatttatagccaattcatacaatagttgcttactatactattaatatatggtcctacctgtcatatatacagtgtgtcttgtagtccgtgctgcagctggctatagatctgtagcccgctgctcttctctctcatcatttatctcattaaaatatgtttatagttagctaatagtttgctattgtacctgctcttagctaagggcacaagttgtgatttgggaatgacctagatggaggcgactaacatttttggaaataggaggaactgactgatacatgatgctttggatccaatccaagcacactagcacagagcacattcatgtgctaccaacacagcgtttcttctcctctcgaacaaacaaccgtctcattcgatacgagtttaatgagcttagagattcatcattgaccctcgtcttttagcatgctaggaggccacattcgagagtgtgtgttttgtaacatgtaactgcgaaaaaaaaaagaacaatctcactcccaatcacaaaaaattgcagactgaaacggtaccagaagagttgttttgactgtttgagagagctgccgagcatgtcactgacactgttagtagtattctcttgacacatggccactccatgatggacgtcacattgtcactacctgattggtagtactcctttgccagacgtactgcgactcttcctctgtgcacattttgaggtcttaaaatatccggtatttatcttttcgtttatacttatatttattagctaaaatttaatttttaaccttaaatttgtagtcgatcttgaaattttttcatcgtaatttattttcagcctttacttctagatcattaaaaacacacatataaaagttttattcataaattattcttcgtttacggcgggggcttcaagcatgcaagcaagcaaaattggccagatcacttaggccttgtttagataaaaaaattttagcaaaaaagatcacatcaaatgtttggacacatgcataaggcattaaatgtggggaaaaaaaaccaatagcatagtttgtatgtaaattgtgaaacaaatctttttagcctaattacgccatgatttgacaatgtgatgctatagtaaatatttactaataacagataaattaggcttaataaattcgtctcgcagtttacaggtgaaatctgtaatttgttttcttattagtctacgttaatttgttttgttattagtctatgtttaatacttcaaatttccgtctgtatacttcaaaaactttaggcctgttcactttgattgaaaaaaaaaccttaccaaaatttggcattgccaaaattgctaaaattttgataagatttcttatatagttactaaaatttggcaacaaactaaatgtagccacttttttgataattttaacaaaatttggtaaggttgaaaataacatcaaagtgaacatcaaagtgaaaaataacatcaaagtgaacagaccctttacacccaaataaaactaaacacaccctcactcccgtacaagggtagtacaacccattttctgagagagccgtactacacgttacatgattgagagaggatcgaaaccgactccaaatgagtagtcgaccattcattttttttgcgaatctctcctgttgataatcttatgagagggcacaaactgcaaatgatctgtccacgtacattctggataaagaaggcgatcaacatttttttggataggcatccaagcgcagagccagtgcacatcctgcgtgacaaaatatctcatttcctgatcacagattgcgggcagaaacatcccagaatagtttgtcatttccagatcacagattgcgagcagaaacatcccagaatagtttggagaaaacagccgaggggcaacaatccaaactcaaacctgatcggccatcatattttcttaccattcttcaaatattcaactgacattggcactccctgacataatgacatatatcaaataactcttaccaagaattatattgtatcttctgttcaagactataataatatcagcacactgactgtcaagcatcaatgtatataaactggaaattggtgcaaattgcaagcaagagtttgggaagaactattcttacatgtatacaacacatggagacaacatcccaataattgtacatcatatccatcaaaacagtcaaaactaaaaaaagaaaagaaaataaaatggctcctcctaattatagtactacatatgaggctataaaaagccagatgcttatcctacatctacatgcaaatattctatgaacacttcatgtaaatacgcaaaataacttatgccacatttggcaggaagaaactgcacgcaccacaacgccacagggatatgctggcaattcttttaccatcttctatcaccaggtgaatctgttaacaatcttaaaatgcaagaaggcttgcaaccacaagaaatccaaccatgattagcagggccttcaggtagatgtctgcctgctgcggttgctccagtggtccttgtcgagggacaccgtgggcggcatgacccatatgtccgccatggaatccatgaccatggccatacccatagtgaaacccagcaggctgtgcataaggatttgcatctggaaatccatgcacttggaagctaagcatagggaataggcctccaaacgcagctgagaatgcataattcccccaccgtgcattagccaatggtactccagtgcccatgaaccatggattggcattagcattaggattggcatgggcaaaattgttgttaggatcggcctgtggagctgtggcaggcctctggccagttgggcggttaggaatgtcagcctcgggtatgttctttgaccttggatcgacgcggtccttgccacgcccataaaggggaacgagcttatcctcttcaacgacagctttgcacaccgggcactctggagagtgtgcgtggatgtgcaaccacctgtaaatacatggccagcagaagaggtggccacagagagtaactattggttcttgtggcaattcaaagcagatattgcattcaaagctccccccagctgcatcgccattggtgccgctgcttgtagattccccaacattggctgccatcttgctgtttcttcaaagtgcaagaagctgcaattgccaatgaaactacaatcaccaacaatgctagaaatagctatgcaaaactgatagaatatattaggagtactatgtaatataatggctactagcaacaattacgaagttgctccgccagctactagcatgtggtcatacataaggatccagcattaaacgataaaaatctcatgagtttgagcaaaacataaaaaaggtataagccaacaagaacacaaccaagaaagattccccaaattcgtgccggtaaagaggacagctgatgatcagaaaccctcccaacaacctcaattttgtttcacacaattatataggatcatctagaataagatgctgacgatccacaaggatggaatcaacaatctaagcataaataaacaacacaaggaaataaaacatctaggaatatctcccacgttggaggataaaatcacacgctagaagaagacgggattatccataagcccgatctatttctaccgtaatcgcagaacaattaaaaaaaatcccaattctctaggaaaaccaacccgcgtatgaacaactagcaaacaacagatcgccataaacaaacaaaccaaatctacgcctgaatcggccagtgccccctccgaatcgaccaccggccccgaacccaaatccgaatcgcacaaacccagcatacaagcacccaagcaaccgcgagacgagaggagagggtgggggcaagcgggaagcggcatcacctcctcctcctctcggcgagcgtggggatccgcgacgcggcggcggcggcggcgtggctcgatccgacggcgaggccacgcgggggaaggcgaggcgaggcgaggcgacgacgatgacctggacgcggccgcgtggggggaggacgaggagtataaagttaggggtcgcgcggggggcccacatggaagaatctagaatccggggacgctttcgcggcggttcacccccgctttaccctgcgaaattccggggcgggaggcgttttccgtgaagggaaacggaaactctcccccgctggatcgaagaaagtacagtacttgttgaaagttgaaactgccttcacactcgctcacgcaaggtatcacgctgatcgtgcttttcgaatgctggaagcgtgtgttgcaagggatatgatgctctgtcgatggtactaatattcagccccaccgtttgccttattctaagaaataaatccaaatcaatatatttgcaaacgtaaaataatttataaataaaatttttatacacatgttcttagcgatttaaaacaaagactgaaaaataaactacgatgaaaaaactctaaaattaactcccaatttaaaatgaaaactttaaattatagctgataagtataaatataagcgaaaagatgagatcgattgttacccatcaatgttattagaaaaacaaacattatatactccctttatatcttctttttaacgttatatacatttagaaattaccgtagtattttcggtactcatcggttgcctatattttttaataagtcaaaatggtttattagaaaataaaaattaatttacatgtacaatttttatatatgtgttattagtgcgacttaaaagtcaatgtagaaaataaaccacattgaaattatcttaaaattaactttaaaaattaaatttaaaaatttaaaatttgactttcactttaacttattagggcaatccatggagctctcaataattctatgaatttatccgttgtccaacttatatatatcggacacgaaaactatcgcacccctcccatcgctacgagcacgagttatattgtgaactattttattaacaaccatgttagtctcccattacttttacagcagattgttattagtatataccagttataaaagaaaagattaattgttactataccagactatttaacggcacaaactttgatataatctctaatatgtttgatatatacctatgaacattattagtttcatcgagtattttccagctagcaatagcatgccgcatcacattcttgggcagaactaggctcaatctcatcatcttgcaagcaattccaaatgcctcccgttcatatgtactatagactataattttgttgtcatttgatagatttgatatgtctatcaaatgacaacaaacaaagagcagtactgccgttaacaattcaatacttgaagaaaaataattcttcaacaaacaaagagcagggcgcgttcgttgttggctctctgtgtgatatcagtctataaatttaaccaaaagttgggcaactaccatgtacttgtcaaggaccttcgttataagttcttggcaattggtccgtgtgaccattaagtatttccttgtccaatgtcaaagactatcgctttttacctgtcttaatttcctaaaaaacattagttgattatatctcatgacccaagtacaaattccttgctgctctgtaatgctcaagagggaataaacacatgcattgctggtgaacaaaatattcagaagttaaaaaaatgatatatgcagacagatggtaataataaattaatgataattatttaattaaaatcgtatattacaatgcacgagtgatatgctaagtataatttaaaacattgtaggcttatgacaaaagcaccggtgatatctactgcaatatttcctaaatatgactagcgagatttttttttctcaacagcatcaaaacaaatatgtcccgccgttaagttttcgatcgtttcacctgtgtctagggtgataaaggacctaacaaagttagtatataaaatttaagagctaatctaaaatagaataggctgaattttaattaatttttgaccttaaaaatattcgagagcctggtacatgggtcttgacccattgccaccgctacctgtgtggctgtcatggaagcataggggcatttgattttaaggaaacttgtaaaaacaccacaaatatcaccttgagtttgttgcaaatacccctctcgtaagtcatttttgtttgagattacccccaagtgccgttactcgtccattcttggggccacaaacccacgaccgtggtggtcattgtgtctagcgtggacgatgacatgatcgtggaatccctacttatggtgtctagcatgtagttggacggtgatagtccagagtcttcgctcttaagcattgagattgctggaagatgagctattacacttgtctcatgggattcaacagtgacttgtttctttggttagattcaaaatgagaaagatgagctcagtatagcacacattattgggaaagaaaatgtatatgtccatcgaaaagtgcgctgagtcatgtaacacacatgaaaagatgcaagactgcgagatctgccttcaaccaatccatttggaaagcgtggcccccaccaaaatgcaaattcttttcctggctcgtcacccaaaatagactttggacaactgacagactcaagaaaagaggttggcaaaatcagaagatttgtccgctgtgctacataatcaatgaatcatcggtccaccttctgacacactgtagagttaccaagagggtatggatagaaatacaaaggtggaccaaactgacctccaaatgagcaaatggagtgactacgactcggtggaacaatggtggagccttgtggtagactcccttaacaattcccgcattcctttgcgaatattggtgatcttggtttcctaggaaatttggtgcaaacgaaacacaaaaatcttccaaaacaccgcctcaacgccgatttccatcatcgccaagatcaaggaggaagctcgagcttgggtcaaggctggagcctcaaagcttcaagagtttggaatttttcgcggattcttgcgggtttagctttcgaggcttgccctgtacatattactttgatctattttttctccatctctattaatatacgaggcaaagcttttgccctcctttaaaaaaaacaaagaaaagatgcaagaaaaaacacaaaaaatggtaattgcttattgggaaggaacatcaaaccaaaatagattgaaaggggctgtttgcaacaaatcgttttataataagaatctcaaactcaagctgatatttggggtgttttttttttcaaatttcccttgatttcatgccttcctcatcttaagctggcactgaaggtgtttgatgagctgcttgatgtggtcgtactggtcgctgcaaacacttcaggagttgctcttgtcgatggatccttctttccacactccacagcaagcagcgaggcgaaacgtggcacaccatcgtccttctcagagcctcccattcccgcagcttagctatcttgtggtcatcaagcacagagaacaagtttggaccaaagcaaatgcgtcaaaagtgtagttcactcaacctctctgctcaagctaatgttgagtcgtgtttctttcaaaattttgggcttgggcttacaggtttccattacttggaaccaatactcctagtgtttccttcatcttgtattggatgtatcatgtatggctgacaaaattttggggcatttataacaaagtaaatttaagtagcatgtactgtatatggactgaaagagacaattacaacgatgtacttttgtaatatataattcatttgttgtaaaacatacatgaattttgaaaaatttatgatcaaagataaaagtatatgacataggacaaaactagaatgagaagtaatgtgaaatggaaggaatatatgatacttgattttctttcaaactttgaccaataatattgatggtggcgctaatactcgcaatgcgcgcataatattagtttgagcgttgcacaacgtttccttcttctggtttttccctttttttaccacccaccttaatttcctctgtcgcgtttcttttgttttttaccaccccaccttccatgtttcttttttttttacttttccatctcatccgtgctccatcaaagggcccggtaaaatattaaccatccagatttttccctctttcattccttctttctggttcttctgttttcacgttttagtaaaatatttaccgtctattttttctttggaaattttctgttttcctagtgtctccccacgtttaaaaagtaatgaatttactttgtggagttttccatttactctcagcctcccacatctgcccattaaaaagtaacaaatttactcgcatgaatgtcccattcaaaagtaacaaatttacttgcatgaatgccccccattgtacaacaccattcctagacggcagtaaaagaattactaccagcttacaatactagtaattcttttaccagtattataaatatttagacttcgtggtctgtgagtaaaacaattaccactttcctctcgatatagcccatgatctcgtagccaccgtgtagtaatatgtttattgatgtgttcaatatatagtataagagcaaaaactgatactaagagtattgttaatctgttcacaaaatggtcgtacgaatgaaaaaaattacaggctcaattacacacgagtgataaaattactcacaggtgaatcaaactagaaaagaagaaaaatgattcagccaaaaatccatggtgaagttgggatcctggtggctttgcttgatcttgctataaggatgtaaatgctggtgtgtgtcttgtgactggtactggagattggagagggcaaccgagtggcgagcggtagtcgacgatggaatcatggaaggatgtagcggcatggtatagacatgagctcgacgttatgcagtagcagccatctatcatctagcaagcacgaaaaaaatgtaaaaacattcttgttcatgtcatacagacgacgagaaaaagaaaaatagctaacaaccttcatcacaggcagactccaccctatcctttgcaaccagccacatggagcacgatgtgcaaatgtaggacttgtgcagcccatcagttcagatcgggtaatattggagattgcacgttaatttgatttgcaaaaagaaatttgggcttcatgcgtgaaggtgaaggagagtatgcagatgcaaattggagtttcgtttccttacttgcttgttttgtcaatgtcgccgacgtggaacagccgccggttgttgctcttggcccaggtgaacacctccttgctggttaaggtgttgtccggtgttcggtagcgaggcccgaagtagcgccttcgcctcaaccgccgctggccaccgccatcaaccgccatggtgatgtcctcctcctccatggtgcgtcaccaatctgtgggttgtgatggtgggtcgattcagatccaagaaaaaggaaaaaatgaagtgggggcaagagtggttggtttgtacggaaaaaatagaatatatactggaaacagggaagttgtttttatcaaagtaaatcgtttacttcgataatggtgggagcgggatgacgggacgtggcgtaggatcggaagcatggaaattgtttttatcgtagtaaatcgtttattctgataactgtgggagcgggatgacgggacgtggggtgaggtggacctgagctgatacatgtttggcgctcggaatactgcgctcctagtagtatctctataatatttatccaattacttagttaactaaattgaaaatagtaccactagatctatcatcaaaattactttcaccatgtctagtatgttagtctatttatacaaatatttctaaaaaaggacgaatactcaaataattttaaaaagtcaatttcatgatatattaaaaaacaaagggtgtgtgggcatgttatcgttaagctatactacaacgaggttcccttacaaaaactttaccactagaaattaacatgctagttgttaagtcaaatattattatgtaaaagaaattaagttgtttagtcaaatatcggttcttcctttgaagaggcatgtacattcctccgcttttgatcagcataagcacctaacaacgagtttgaaaaccgagtaatatgcagtgagccagtgaggctacccatgcatgccggtgatactaaactcccgtgtgcctcccatttccatcagtgttctgaacatttgaaactagcaaccacatccgcatgacaaatcaaaccatggaaccttttgaggaaacggccatgagtgaagctctgaaggagaaacaaacttaagctagtacaggtgtacatcaatcgatcagtttcttcttgttcttgtataaatatattatttttgaaaccaaagctaggctaagctggtgttatattcagaagaggatcagaaagtatttaaagttcaccaaacaatgatggaaacagaaggaaggggaagaacaaaacaagaacagaaacacgctaatacagaaatttaagccgatattctcacgatggttcttttataaatatatatcatgctggctgtgtatatcgtggccaccttaattaattatttcaagtaggtggctacctttaaattaagattgtctctctgctactaggggattcacgtagtacatattggtgtatgcagctgtaaagaagagtttgtggaagatattgtggtacaacaaatgagagctgtgtgctacatcggaggaaaaagatctatcgtttgtagcgaaaacgggtaaatgtgtctctcaactgtagaggatgcctctgcttgtgctctttccctattcagatgagccttaatcttgtctcatccccgttttttctctcacatctatactttctataaagttaaagcccagtaaatctaaagctcaatatgcaaccatgccacatcatcaccaactagcaataattgcatatttaatctcatgcaagtaaacaacatcatctataatttatttaattttataaatcaaaatgcaagcatatccaatcatcaccccttatatcatttgcacagtattttaacaaatctatatatcactttttacaatatttaacatatatttatcaatatgtttcacactaaagcacaggtatcatttgactgataaaccctaatgttttattttttttctttttacacctaaattgattgtcaaaaaaaatatattaagaattgcttagtaatttctgcagcaaagcgcggggaatcacctagtattatgaattacagtggacatgcttcctaagtttatgttttttgaaaaaaaatatctatatataaattacttagagtacattttagaataacttttgagcttcataataattaattcactcaattgtaccctcaaatatttctactatcttacaagtggagtcatccttctccttccaacccctactcccaatgctcagcgtgtccatacacgaaatgtaagtaccattccttcctagttttatgggcccgacccatcaacgtacgggctccaagtctattcctaattatatggacctgatccgtgataacgcatggcataaaactagttataaaaagaaaatcaaataatcctcacccattcatccgttcagcccttctgaaccggacaacactatctgctgagttgttccactatgttgtctgttgcctattgcccactttgttgtgcgttgcccacaatagaaggagcactgccaatggaaggaacatatgtcttcttcgcaggtggtgctaggtaacttgctcggccttctcgccagcgatcgttgcctcgcaccatggaagttcacagcagctgtcgtcggcacaatcggcacgaagaattcctgtatgcctcccatttccaatggtgccctcaacacaacagatcaattaatgttatttatggattcctttgaagaaatgggagggactgtaaaacaagcttatacaaggaaccgactgctgattgctcgctgcattttttttattgcacttccattgcattgtttgatcttcttttcttgttttcacttccacatgtgtgtaggaagagttctgttagacagtgccaccggcatatggcaatggtgtaaattgtgccatacgggctagtaattgtaagtggtagttgtggtgataaatgatggctaactcaacatgaacagataactgatctgtcatattttggtcatccatacaaatctatttattttgtgccaaaatataacaatttaggtatgaattagactctttcttgtactacgaatctgggcaggaggtctatccacattcgttgtagtaggatgtatctaatttatgcctaaattgttatattttagaacaaagggaataacaaattgtagcatcttataattacaatgtttcatttgttttgtgtatcaaatggtggatgtctcaaatgtttttgctgaacatgccacttatacaacaattggaaagctgaccgtgttctctctttctctttttttttttcactgtatctcctcgtattgtcttgtataaggattttccatgcgtgttcatctattctaccgtgcaaatacaaacagcatgaaagcaaaaaaattgctactcctatgtcccatctggggtttcattgtgtgtgtgtgtaatacaccagaggaagcttaggttaggtttgtagtgactgtcccatttccccatttgggaattgatcaccacctacacctatcttgtggctccaaacacggaaaacgaattgaagcaacagatcatatagttgatttttccagtacaagtgcgtcaaaagtatagagtttcattgtgcgtctcttgcacttatgcaaatgttgtgctggtttgtcagcctttgtcttactacatccgtttcatattataagactttctagccgtaacaaaaaaaattctgacaaatttttgcctttaaaactgtcatatttttttacttttttttgctacggctaaaatgtaatgaatttaaatatgagactttgtcgatatgtgtagtactattaagagcaaatgtccaaccttttgtggaatttttcgtgatatttgctagttggtgtgtatggagtgtgcacgagaagtttgtgtgtataggatatgttcccttttaaaagagtatagaaagtgacaaacttaggtatacttggcatttgccataattaagtgccaggccataggtaaagaaatattgaagtaactgcctagtactccacatgtctttttcttaggtcaaagtctctaaattgtactacttcaacaataatttatactacaatatatttacagcatccaacaagtttgtaatatatggtgaatgtatgtttagggatgaatctcgtaacatgactttcatgtgtgcaatcaaataatttagaaatatatttaatctcaatcttttacagatatgttcgaaggtatgtctaaaagatatttaatctcaatgttttttttggtttacaaaacataactttctgctgaacctagagcttcccatcagtaatatggaaaatcacaactgtacatagaacacaaccaagcaaaaactaatagtggtctttcttttgttttccccaataaaaaggagatctggaaactgaagttatcgtcaaccacgtaggtaaagtcagcacttaaattggtgcgagtgcagtacatgagtgtttcttgcaaattttaccaccgagaaaaagctacacccaacgtcccaaccttagagaagtttgttaagtcaaagatggagtatcgagaacagcacctagctcacctagcatgctggcctaagttcgacttcgtttgaaagcaagttttctcaccattttcttctctatcaataccggatgctaggttcctcctttgtattccaaacattttttttcttttttttttaaaaaagatggagtatcaaacttgcgatataacgcatacatcttcttggcttaaagcctaccgttccagctattaccagatggaacctcagaatccggagtagtgatgaattaatgtgcacatcgataccatgaactcccaatttacctcctatttccataagtgttttcaagtcgacaccgaacattgcaaccataaccacatgagaaatcaacaacggatccaagttctcttagaagaatggggctattgaagttaatgtcatgaaggagaaatgagcttaagctagtaaaagaaacctcctcctttcctagacccttctgggtgcatatatatcttggccaccttctgtgccattgggccaaatctttggagtaataagaagattcattattatgagctataagaaagagttggcgagaaatatgtttagagtatggacatgtgggcaatagctcgatctttgattgcatttatttttctagagaaaaatggttgatcacaattaataagtgataagcaggtgcaattatagatggccaaatgggttgcttggcccgggcacaaccgggctcgggcctgagatcagtcgggccagcacggctccacctacacgctgggggtgggccaggcctacccacctgcagcaccaacggcctagacatggccctataaggcttgggccatgtcgggccagcctgaaggcacgcatgtgtactgtgctcctcattgaaaaaagtctgttttgcctcccttatttctttgggccctctaatatgcctaataagtctattttgcttccgtcaactatttgcctccttggtctttggaccgtgccgttccaggcaacccaccgtgccgaggcagaggccctggcacgggcttgacaccagtcaggcggtgccatgcctgggtcgggccaaaaccttatgccatgggctaggccatcgggcctcacgccttttggccaactatgggtgcaaaatggtagatgacagacaactcaaaattacaacttagcatgtagctgtccagtgtctgttgtacttgcctcttgcacgtagtagaattaatttttatggtactaggccatccaaactgaaataaaagaataaaatcacagagtgcatgagtaaccattacatctccctgaggaagagatcgagatcagagtactgataacttaatttttgcatgttgtctaatccaaatatttcactcataatctcatccaaaaggggacagagatagaatgagccaagtcaaaaacttataatcttttcctaatctttcctatggaatgagcatggcggccactacggttctccctgtttctttctaattcatctttcatttttcttcggaatttccgctttagatgattttctgtccttcggtgttagcatttcgtgttgtccttcttcgaaattattattgattttctatttcttaggtaactgtacatacttttttctggaattacttttgttggtttctaccttctagttagcacggtgatacatggccgtggcccgcgggtacggggtacgatagtcgacggaagagcccacagatatccaatcacctgctgtcgcactcgaacggctgtcaatttcttgtgggattgtagaatggaccttttgagcagcctatggggaattttttacatgacggattcccatatgcctcctatttccattgctgctctcactcaacatgctatggggattaaccacacagaagatcagcaatggatccaattgctctttcaagaaacaggagtgaatgtaaatcgaggtaacacaagaatccttgcagagtcgctcgctgtattatgtctccactgccaggagactagaagcttaggtttgcaagtatatataagaggagttggtcagacattgccagtgtcaatagcacaatcatgcatcttatacttctcccgtacacaaatacaacaaattaaacgaagggtttaaattttttccataattaccaggaatcccatggagtactacttccacccaactattcctcatttaggtgttgtttgaatcttctgaagatgaagatgaagattaactgtttcacgcaaaacgaggtggtaatagcgtgtgctcaattgagttttaattattataaacttgaaaaacggattaatctgatattttagaacaatttttatatagaaaattttcgcacgacgaaacgcacagtttaacagtttgaaaagtgtgccatgaaaatccaaaacttcatccagtgtttgcagtggaaacaaacggggccttaattgttcatctatttttatccctaaacaccctttcgctccccatcatgggttctgtcaaggggatttcgcgagatggccgagcaatgatgtgatttgcccgcaacacttccgtaatcatgattatggagtaatacacatgataaatgatgaaactatccttgataaatgacgtttagtccattaagtagcttctaaatggggtctcccatattctttaaagtccgtgtagaaatttttgaagagtatagagcacacatcatataaacttgtactgctggtaaactccatcataaaacttgtcccatattaaacattagaaactgaatttgtcttgattgaacgttaacagagacggaggaccccatacgacagggtgggccagctggccagctagccaccagcccaaatccccaccccccaaatgtgtgtactccctcccataaaaaaatacgaatcctacaagcccgaggtaaatttagaacagatagcgaaaaattaaaatgtcctcaccaaagtacaaagtatacccattaattaacactaaaaaagacaacaaggaaattcaaagtggctctgcttccatcgccgaccctctccctccgccgcagctgcattgcatctgagcaagttctatccatccgcgcatacaaggctgcttcagttgcatacaacagcatgcatgcaaggccgcttcccacagcaatgaagccgcacaggcacactgtctcgtgcatcacatcctcccctgctatgtcgtgtgccagtagaaactccgatggctccgctgcatccggctgcatccgggccgtctccatctgtcgccgtcgctggaagcggatcaaccgtcccaaaacactgccaccgcggcaccgccacggccacatccgagcttatggctgtgtttagattggtccaaagtttaaaatttggttaaaattgaagacgatgtgaccgaaaagttgtgtatgtatgaaaggtttgatgtgatggaaagttggaagtttggaaaaaaattttggctgtgtttagttcaatccaaagtttggattttggttaaaattggagatgatgtgactgaaaagttgtgtgtgtatgacaggttgatgtgatgaaaaagtactgaagtttggatctaaattttgaatctaaacacagcctttacaactaaacacaccctatgcatccaggtcgtcgtgcaaggtcgtgaggagggtgggagggactctggctgggaacttaaccacatagcaaacaaccagctctagatttctcccattgtatctttcacggtgaacacaaaccgaggcttttcgaaacagatggtacgaatagcaaagaaataacacatggaacaaaaaattaagttaatcaaccaaaaaatttagttcccacaatatactctccatgcagccacatttgaatgagctaataggggcaaattatcgcgattactatttgtgcaacgaagatttcttttaaaaacacattattcatcactatttcctagataactgttttccaaactatctgttaactttataatatattagtttgtccctataaacaattaactatccctgacaagctgcattgtctaacaagaacaggtcccctattcagccaacgatttgatcagaaccatcgagtcatagctagtaatattttttgatcaaaagctcaatgcttgcacaagcacaagtggcactgtacgcacggtgcccatctagagacagtgtgactggatcttccaaaggggcacccactcgtgtgggagaccaattgagatcccctactgtagacgacctacatccgtgggagaccgctcggcgtggcagaggtaattcacgagagagtccgtccgcaacaatgagccttttctccttggccagcaggcacagatgtgacttgtgagccaccggaatcgtttccagagcctcccgttccgatgtactttttctgtcctaaaaaaataaaatatattagacgtaacacattctagtaatacgaatctcattctataatagattttgttttttctttgtgagatgcaagtctatcccataaaaaaatctaacttatggtaacgcagattgcgagcagagagcaccggctgccacgatactggtctatatgatctttttgtgggcagcaaactgaagcgttggacagtgttgatttgattattgtgctgaaggctaacaatgtgtttggtttttaagcgcccaccttctaggtttgcgctccctagagccaaaacatacagccttttcccttcattttatagtgaaggatgcgcttatatgcttttgcaatgaaaaaactgcatggatattaaacctcatgagtggcccatattaaaagttacgttttatacttataagttatttttgactttttcttaagtctagcttaaaagtacttcctccgtcccaaaaaaaaagacaaaccctggtttccgtgcccaacgtttgaccgtccgtcttatttgaaaaaaatatgaaaaaaattaaaaagacaagtcacgcacaaagtattaatcatgttttatcatctaacaataataaaaatatgaattataaaaaaatttcatataagacggacaatcaaagttggacacggaaatccaaggtttgtcttttttttgggacggagggagtaagtttataaaaaaacatagaaacatttttatacaaaataaacataatattaaaatatattcaacattatatttaatgaaattaatttgatgctataactattgctacattttttttatatactttatcaaatttagagaagtttgatttataaaataatcaaatcgactgaaatggagataatccttagcaaattaattatcgttaggaaggggcaattttgtccttaagaaagttatccagttactccgtctctcgatggaagcttatcccttcgccggctcggtgcaccaaatcgcgatagcagcgtcatcggcttcctccgccgcgccaaggatgtgaagcaatgatggcattctcagccttggcccttggggaaacaattggcttcaagaaggtgtgtttttacgttaaaattgaaagtttggttgaaattgaaatgatgtgacagaaaattggaagtttatgtgtgtagaaaagttttgacgtgataaaaaagttgaaagtttgaaaaaatgtttggaactaaactcggcctcaattaatgtctgctttctacaaaaggattaaattcggcccagcgttcggcagttggagccgcgcgtgggcgcggggctggcggcgctgcctcgcgtcgcgacctcaacctcccacattgatcaatcgcggccccatcttttccggaataaaacaaaccggcatattcataaataaaaaataatttgtgaaatttttttatatacgtaccaaaagtaaatgctgaaaaataaacaacgatgaagaaaatcctaaaatttaagattgaaaatttgagttttgacagataagtataaacataaagcggaaatatgtctccaaaagaacaacattgagttactatcggccaaattaacttttacttcagaccactcgtgagctttaatatccgtgcattttttttctctaagaagtatagaagcataacttttaaacaatatcataaaaaaatcaaatataaaaatattttacactaatcgtattgattagaaactcggtaaacgtgtgcatttattcattcatcaaccttcagcaatcatttcaccaaataatcttttcagttgtcactcatttagactttaatttatgaaagtattttgaacccactatcatattacaaacaaggttttaattgttatatattattatgtctcgttttcttttctcttccgattgtctcatttaaagtaatccaaatgttatattatatttttttctccaatccatttgttttcctattctccaaatcctgcattaccttggctatctgttttggcattaggaaagcacgagggaccacctggggacgtggtgcaacaggttggtcattagagaagcctaagaaggagcctcttattttggaggacgagacttctctgatcgtaaaataagaagtacatgaccattggcgtgtgagcctatgaatgtgggccccacctatcagggacccatgttcctttaactttacgtcagatgagctcggtccctcttataaaggttgcacaaaacaagttccagactcctcctgttcccatattcacacacctgttcgtcaggggttaactcttaactgaaggcagcatggcagaccagaagctggactcacatctcacaatgtgaatggagaacactattcttctcaaagtcatagggccaccatattgcgctcaatctcacgatattttgtttctaggagtagctagcacgggaaccaccattgcccggttgctcgctccatatgatattttaattttttggatgagagctcactccatatgtttgcaaggccaacctttatttatggcagtcaagtagtttgtttgttgttttcttgagagctcggtcatagtagtttgatgtactcaatgactatagatgaagaggaaatgtctggtgctctattttacagtgataatatttaaagttgtattagaataaatgtcgaatatattagccctaatagatccattacaattggacttagagttataatagatggtaggcttaacaatagaagactttttctgtccttttcccaatgttatgcttagcagtcacagatctctgctagtaacctaaacccacactagcgccacagagcaatcacgcatatgacggtgctaattaattcgttaaattcatcgcgatatttttatctgctgcagttgtgctgtgagtttgatcaaccatcattgctgggactcgtcgtaccagctctccaccatccggtgacccctgcctggctgctgctcgtcggcgccgatcctcagatgatcgccgcagccattttacgacgcatgtatcgctgctcgacgggattcgccgttcctcctcgagcagcaggcgtccaggagagcgacacgacggtatcggatgatttccaaaggcagcgtcccattcccatcgatctgaggcacgagcatcagttgccggccgtgctacctagctaagtagtcggtcgatcggacagtgtgtgttgaggcgatcgatggctagctagctccagaatgaatgcatgcgtcagatgaggagcaaacgatcgagtgtgtgtttcttctgccgttttgttctaaccttccaggcctgcactgcctgtacagtactcctggaaacaacacacagctagctagcttgtgtgttacattcattttatagtgaaggagttatatcatcttgaaacagagtaatgcgtgaaactgctcctacatctgagtacatggggccttgggctcttgcacccaatatatgattgattatatataggccacgtttggtataattctggatcccagatttcttagagctgatcagtattcccagttttataaatctatatatttgaatatacgactaagttgataacatttagatgattcattttgtttttaatttaaatgaaatataaaattttaaaccactgtagtttgcgtacaaacttcaaatcctacgtggatttaggatctggagctatgccataatctgggctttcactgatggagaagtggtttttactcccagttcgtaatcccctatagtcctggttttccaaccgggactaaatatcgctatctttagtcccgggtgaaataactgggagtaaaaatacatttttagtcccgaaagataaagccaggctagatccggttgctcatttattttttttcttcattgtttttaatatattaatttcactccatccccgtccccaaaatcacaaatcaattatccccgaatcgtaaaatctcaaatcgattagggatcgattatcacctccaaattctcaaatcgatcatctccaaatacatcacaaaatctttaaaaaattacatcacaacttctaaaaaattcatcataaatacatcacacacaaatcaaatacatcttagatccgaatcacaaattctcaaaaaaaaagaaaataacctaaatacggtgcctacgccctctgccgcgtcggccgccccctcgccggctgctagcgcgccgcccgccgccacgccgccgcctgcagatcagaagtggggaggagggggagggagaggagaaggagagaaagagatagggtgtgaggagaggagatagaaccgggaagaaggaggagatatgtacctcgatccgatccgcgcgcacgcctctccgcgtatgtcgatcttttttcggtaacaccaatcagaactacaaataaatctttagtcatggttggtaacaccaacaaggagtaaagaaaatatagggggtctgacaccgcctgtcctcttttgaactgggactaaaaatgatcttgactaaagatcaaaaagtacccctgaacttataagccgggactaaaggtgctttttagtcccggtttttaatacaaccaggactattgtgaaatctggtcgaccgaccaaagatggtctactcagcaattttctttctccttttttttttgttgcataatacaaccgtttacctactgatttgttttttaataatgaaagtgtgttgcatccctggcttatatgtcatagggcacctaaccacctagcgactgaacaatgaaaaaggtatattctgacttcaatgatcaggatgcaaattggaaagttaaattgccgggtagcattagaatggggcccagacgcccagtactattgaaaattcatccgatccgcttcagcatattttcatcagtttgcccagtagtactattgaaatttgtgactcatatatacatgttttaatttagcctggtttaataattcacaatcgatggtgtatgagcaatgaacgcgtgcttagaggcttggtcacttaatgctcccgaatcaaacattccatgaatccatgccaaagaaccgagtgctggcctaattaaaagtcatggatacattgctccatggtcagtacatgtgaaaaacttgcagactaaaactttagttcaaaaaacgactgaacgataaaagagtccacatcattgtgctttgattttgttttctcctcatgctatcctagctacaattcatctttccttaaatttgtaaacaatacgaagtttgctccacttagaactcaaccactgaaacgtctgtaaattaaattagcgatcttgacaaattcacgagtatatgtgtccatcaatggcgagctccatggactaattcccatgggagacaaagtcggcgcagcatgtggaactccggcaaccgtcccgtgcgtgggagtggcagagactccggcctccggctcgatccaggtattacaactggagctggtacttgatcgagaatgctgtactcgtccatggcaagaataatcagcgcggggggcactatcagttcgtcacacaggtgagaaaaaatgcttgttgaaatgcacttgatagtgcagtggtaaggggtgtgtgattttaaccccgaggttacatgtttagttctcaacatatttacaatttttttttaaaaaatatttggaaagatgtctctccctccaaatctcgattttttgagaagaaactacttgtcagggagaccagttcgttcccaccatcatcattcccagtgcttctcattctcacatacatagccgcggcgttaatatttggtagaaaagtaagagaataaccaaagcgttaacatttggtgaaattcgaaagaacatttggagcgagcaccaacacatggagctgatgagatgtagacatctgcacacttgtgcttttatgccaatgttgtgtcgtgaatgcctctgtatttaatttccactcctcattcctcgcagcccttttgcttcatttaatttagggtgtgtttagttcacaccaaaattgaaaatttggttgaaattagaacaatgttcaacaaaccaataaagctactatgagtaataggaccggtggccccttacctaaagctttattgaaaatttggttgaaattattgtgggtccgattaatgtgagaatttctaggctatgagagcgaatgtgtaggctcctttttctattcctttaataatataatagatagatggaatataacatcccggcctttgctaaaaaaagctacaacccaatattacagtctagcactcaaaataagtgtagtccaaaaataatatcaaccagcatataaagataaaaatatccaataaaatatatggagaacacattattgaagtctatttatgaatctccatccataattggtaaaaagctacataaccatcgactcaagctttctgcatgcaacttttaaaagatctatcagatccattttgtttaataccaaacttgtcttgccattttttctagttgcttcaacaatacttgctagctactatagccgttggcttttcacataacatttgatcattcattttattttaaaatttattataatatgtaaaaatatatgttaagattatagtttcttttatgataaaaaaattcacaaaaaataaatgatatttctatatttttaataagatgaatgatcaaacgtcacatcaaaagttaacggtgtcatacattaaaaaacagagtgtatatttgtattacaaccaatactaaaccataccaatatggttgatacaaaccggcccttagcactctttttttagttttgtcccaagtcaagtttgaccatttttatagagaaatatcaacgtttacaatattaaattagttttattaaatgcatcattaaatatgtattttatagtatatttgtttttaatttagaaatattgctaactcctataaatttaatcgaacttaaagaatttaacttaaaacaaacccaacatgttagaaaggaggaaagcacacaaaacttgttacgtgatacacatatacaagtttttagccaagctatatatgacctattccaacctttgatccaggctccaatccaaacaaatgtagtggctccaatcgatccctcagtcaatattgggctggtgcaggaagatgcagacggccccaagtagcctcttgatgctactccaatcaatgctatggcaattcacaaaagaacgttgcaaagcctaactctacagtcgatcggactgcgctcagatcattcccaaagtctcccaatctcaaaacagaaaaatattgatcaaaagcccgggtaatgtttaacagaatataatgccaaagagcgagcaacagatcgatgctggtgatgatatatcttacagtgcttcacttctgcttttatgcttaggatgtgttgtttggtgttgcttcatatcttctactcttttggagccaggacatcctctagttgcttaatctctcctctaatcaaaggtcctatacttctatttatggagatatatatggagtaactagctagatagttgtactttgagcatacatttgattgattattgacactagcagatttttagatgagactcatgcatatataggagggtaggattggttgtggtattaattaattcctaaatatacagattaacatatgttgaagttttgaatatttcgcatgaaacattttcatacatatatacatacactactgatccatcttatctaaagaaaatacactactgatgcatatttccttttaattttgaaacatttttgcaatggttgtatttgaaaaaatttgcaacccgaagtgcatgttcaacagtagcgagctctctatagtgttaaattatctatagtctacaccatacatgtccaggctgaacagagtcagcacggaggagaaactaatcctgctcggaccttgcgagccagcactccgtgcaaggttgcaggctacgccaggtgcaagaacgattggaaggtagatgttgcaattcagcaaaaagttttgtttaagacttcggcaaactgcagtttgccatgatgtccttcctgcagatgatcattctcaaagcttttcattctcacatatacttgtcagcattgacttagtgggtgatatatatgtatggagcgaggcagcgagcaacacgtctagcttgatggtaatgttatgtggtgaatgcctttatattttgcacgagtttccccgcctgaatagctttcattcagctttgtagaaaaggtaaattacacatggtagtactgctagggaagtaggaacacaacattcagagagtttgtagaggggtggaaattagatatctttcaattatgatatacaatataacattctccaggctttaggagctcagttacctaggttgagtcttctatacattgttctaagatacgtcgtagtgagggtgccaccgtccaaaagacaacatcatgtttgtgattggaaagcctccaaaaagtagaatcgtatgagtgatatgaaacgttttgctgaatttgtaggagaaatggttaccattgcaatttttctattgaggggattcccttaatgttttgttgtcatctgtgtcttgtcgagtctttctggagggtttgttttctaagcctatcaggctggcgcaaatttcttgtatatactttgcttatgatttttttctttttaatgatttgacataactcctttcttatgttaaagaaaatgttgagggcttgttatttctctcctcgaatatatgaaatggcagagctcctgtctgttccctcgaaaaaaaagaaagacatgatgaacagatgatttgcattttcttaaccttgtatgcaaattggacaatataaatgatattttgctgccatgatgtgatgatgtccttttactaaaggtcctattacatttatatatggagaaacaaagtcacgcgtatataaaatgtacttttgtaaaatttaagagtaacgagctctaaatattttgttcaaaacattttggtattcttgaacccttgtagccttctagttttgcagtgatcatggcaacacatattttcagcggcactgaatgattttttttttgaataaatcgaagagcatcaatttcattgaatggagcaggaaacggcactgaaatatcaagaacactggaactttttttggtgctggtaccctggttgagattccacatgcttcccatttctacagccacttgagtaatagtatgggtcctctcttcctcttcttattttcattcccaaatatggagtgaaggaaaatagcaaggaactgagcagcttgccggtatatatgatattgatatatataactcaccatgcatcatgtaggtagtgatagccatagactataaatgacataccaacaagaaacataaagagcattcccaaatcaggaacacacatgacatgattttgatggttagcacttaactttgtagtaagcatagttaacagtaaccaagttatgtaatgtcgttgggctagactatgaggctagtgggcctgttcgtctgcctgtgctgcggctgcggtgcagccggcaccaacggtgccacacacacatggcgcagccgcagccgccgcagatagacagccgaataggcccagtatttgttatcttaaaaataaataaaagaagataggtgctacggagttgtgttgctttggatagacgtgtgatagtgcgagcctagctttgccttgctagttttccggcagctggtaggtcttgccttcgttacaacttgactatgaagtcatacaaccagcggtggagcgaggcccagcaaatcctaggttgatgcgacactgctcaagcgggtggtagaatatgcaagcccctttcaacgcaagaagtagaaggtgagggcttcgttcttgatgccagtgcaatcgatactcctggtccatggctgtagcaatttaccacacaatgttgcaaatcctacacctacaactacccgttctgcattggaattattcccgaagccttccattctcatgctcgtcgaagaatttgactttcatactagtgggaagagaaggagaagaacaatcaaaagggctaggtaatatttcacaggatgtctggagtgagaaccgtatatataatacaacacaacccatctgcagtatagtatgtctatatatatcctactacattttctcacttatgtaatgtgctaattaaagatgtgttgttggtgttgccttatatcttccactctgtagagccaagattatccccgtttacttcttttattgtacaaaagtaactgcatcattgtacaaaagtaactgcatcgtttggttcttgccagtcctcgaggtggtaccattcgcttggccagctcttgccactccttctagcgagacaactatatttccgtgtttttgtttttaaaaagggtatattcttgcaaaacacgtgagaaaataatatattttcagaaaaaaaaaagtgctacataccaaacatccatgtatgatgcatgagtaaaattttactccctgtgtgtttgtaaaactgaatatatccacaagtacagtttgactaagacatgatatactacagcataatagcacacgatacatgtggtttagcactatgtaccatgcatttaacgcttgcttctaggaaagtactacaagaccattcactccgagcaagtgtaccaatttactatttagctaacaagctagtttcaaacaaattaatagagctaaatcaagtaagaaaattctataaagtttttatattccaagtaaggacctctaagaattctcaagttttgaatggagcacaatcaaccagtgaccctatgtcacggaagatggcacgccatgttccaacctttgactgtggctccaatcaataatgcagttagtggttccaatcaattcctcagtcaacaaaccagtttcaggaaggagaagagggcgccaagtagcttcttgattccagtcttatcaatgctatggctattcactaaagaatgatgcaaagcctatatatacaactatccaaccagcactgaaaccattcccaaagccttccattctcatgttcgtcagagaactagaatttcaaaattagtgggaagagaaggataagatcataacaaccaaaagggctaggtaatatttgataggatgtatggagtgagcaacatgtacgggagatgacatcctaggtattgtactttcacttattctttttgctaacgttgtgttggtggtgttgccttcatatctttcactccatggagccaagacaatcccctttttcttcatttattgtacaacaatagctgcacccttttgttgctcaccattatttcctcaatattaaaaggcatatactcctaaccatagaaaaataaaggcatgcataaactctgtggttgtgcaggtagctaggcccattggttcttggtagtaactaaaacataatgaagccacacattgcaagtgttacatgccttcgtatgcgtgtctttcactagcagattattaggacaaggataatacatatatagtacggtaggattggctagcacggtgtattaattcctaatagtatacatgctaacacatattaagaatagtttgctcgaaatatttgaataaacattgatcctgattgccttttaattttgaattggacaacggttgtaaagtgtacttggggaagaaagttcaatggcacaggaagtcgtccgacactaaggagcggtagggacaaattggtgcccctcgtgccgttgaatgagagggaaatctccatcgaagctgaacagaagtgagaaatggctgccgctctgacctccatgtttgctagctcttagctgcggtcacactgaacaagatcgaggaagagatcaaggagcttgccattaagattgattagtatccaataggcatcacaattggagaatccaatattacaaaattttcttccatgtttaatgcttgtaattctgttgagattccacatgcctcctatttcccattggccacgttgagaaatagtactctgtgttatcttccactacctaagcaatgagtacaactatacacaagatgatataaatgtaagtcattgtgcatatcttgtagttgtagccagtgatgggtggagtcatggaaacgataaataaacgtaccg

SEQ ID NO: 9177 - DNA, 2672 bp, Oryza sativa
ctaaataagggcctttaaacaactctacttttcttaaacaaaatgcacgggaacttacgttcactaactggatactaaaacggacaaaggaagtggagatcaggcgatgtagactcgaaatgacagcttctcgcacggtttgcaaggccgaaacaacatgagttttactattatcgtcatcattagaagtatgttcctttacctgtcgctgctagttgttttctattttaatgtaatctactgtatagcttatcgctcacatgtttagtacgtaatgctatgaaatgctggacagattgttgatattctcaagatggactcggaatcactatcaacaaaatactgctctggacccaacactgcagctgatgctggtctaaaaccagatgtgtatgaacttattcataggttattgttgcatatacaccaaaatgagccagacattgggaagagtattttggtgttccttcctacatactatgctttggagcagcaatggattcgtctgctatctgctagttcaatgttcaaagtacacattctccatcgcagcattgacaccgatgaagctcttcaaactatgaaggtctcaaagtcctgtcgtaaggtacaattttctgcattgaaattcagctttgtgttttagttaaatgtttctgaactgttaagattttctcctatgaacagacacaatgatagacattatatagacagtgcatagaattattgctgtcctgttatcactatccttgttttctacttgcaggtacatagctgcaagcctgcaatactcttcagcataaattgcaaatttatttaaaacccattgcatgtttttaattacctttaaagttgtgttctgaatatattaatgaggtttgccactttgccatcatctgcaaaaagcaagttctgatttattttcctttccaacattgttttccactagcactagctttagaacacaggattcagtccccggctacaggggctctgtccactgcatcctcccacagcaacagatccagagaccaggagtaccaagtgaccctgataatcatataatttgcacttaaaaataatgtaacattgatttggcctgtaatgttcaaaatttacatgattgaatattctcctctgtctaattggtttcgattgaactcactcaaatgcgattgaactataatcttcttgtttgtatctttgttgcaggttatactggcaacaaacattgcagaatcatcagtcactattccaggagttgcttatgttattgactcctgtagatcactgcaagtttattgggatccaatcaggaaaacagactcagctgagcttgtatgggtttccaaatctcaggtatatctcacaaatatactgatgtttttcgtttgcaactaaagtttgaccctaaagattgtacgttacaatttttttgtaattatttctaggctgaacagcggaaaggcaggacagggcgaacctgtgatggtcaaatttatcgcttggtaactgggccattttataacagtttaactgatcatgagtatcctgccattttaagattgtccttaagagagcaagtactcatgatttgttgtgcagagtccagagctatgaacgatcctcatggtaattcttttcatgcatatatttcattcgtgtcttttttctgacaagttcagcctttgttacatttgcataaatttatgctccatgttttttaatgttttgtgatggagcaccattagcattatttatattcttgagaagctacaattgattttccttcttttatttactaaggttctgtccactcttttttacttgtcatctaggatatcgatagtcttagcacatgtttttatcattagtttaatactttttttttctaattgagtgtttataaaaaatatcgatactatagctaaatgaagtatttttcatgaaaaatctactaatatcatgtacatatttaatatatatttgttttgcatatattagtgatttaagatgaaggtttgcctgcatgcattttagaacagcatctttttgtaaatgcaggatactaagttatgataaaatcatgtcctgtagtataattaagcactgtacagttggttaactatttttctttcaatgataattgtttgtatcatgcattcgatactttccagtgaaaatagttctagtgtctatgcagccagttctaggaagttaagggtttgcatctaaacttggttatcttgcatttagtctggactctggacacatgtaaatgatagtatatttgttctacaaacacaaatctggtgaaccgtacataagtatcttagccactgttgcactattttattctaaaaaactgagtgcaagtagtttctggtgttttggcataacatgtcaaggttaatttatagtaattagaaattactattctttctgtatttgtacattttcccttttatttaattttcaggattccatattactttctcatcatattaaaactttacattgtattgtttatatttggtgtacttaattgttcctttttaactttcaatggccttccatacacaaatttgatcacttcacttaaaaatcaagccaattttgttacgattcaattgcattatatttatgaaagtatagaaaaatataataccatg

SEQ ID NO: 9178 - DNA, 18390 bp, Oryza sativa
gctttcctcgcatccggaaaagggctaagtgtatcatgaaaacataggactttaatcctgttactgcttcggttaatctagcattttcgtatatattttatttagttgtaatattatactccctccatcccataatataagggattattcctttttgggtaagattaaggatagcatgcaaatactagaatacctctattaaatgaggtttgcttatggtgagtgggtagtggggggttaaagtaggtagaaatttgaattggagttgatagacatgacaagtagtataccaaaatcccttatattgtgggataactagaaggggcaaatcccttatattatgggacgaagggagtatgtactgatgaacccatgatagtcttattgaactcaacatgataataggtggcaaatctcaaactgatgcccatcggagtatttgaacatgacatactagtttaattttacaagctgtgttaattttcaagtgtttctactttctaattgactccagtaacatgagagaaatcctaccttccatcgcttctcaaaccttgtaggaggttaaaattttcccttagtaaattggatttgttaaatagaagagagttagcatccagccatccgtagacatgacgggtggaattgttcattatattttatcttttatccttagctgacacttatctgccatcttgtttgctattgtggagcgtgtacataccatttttgtaaaccatggatagttttagtctttgccgactatctagatggcctcaacttctcaaggcttgtgtgatatgaaataccacagtgtaactagtccggtctgttatggattagtttggttcctgttggttaatctataagaaaaagaaaaggtggggtctcagtttctatggctcatgatccgaggggttagcctccaaagcttgtattattctctggaattcattgaccttatggcttatgcttgcttggtaatgaaaagccaagatgaaaaacactataatggaattgaattcactttttatcctattcctttggttggtttatgggagatgtgatcatgggagttggctgacttctcagcatgattgggaaaacctaagtacctaactgctgaaattgtagaacacttaacttaaaactgagctatttttccattcttcctatttctattatgtcattgtattataagccgtcttcagtaggtttgtggtgcattcaggtatttaatgttgctatggtgtgtcgatttctgaaatggttggcaaatataaatctgtactcaactactttatctgatctcctggtttctctgttctctctaagatgctcttgtatgcaaccaattccaaaaggacaaaatatccttgatctgaaacagctccatttcgctggttacataatctacttcacaactttagtaatgaatttatgcccttgtttccatttgatgcgtattgaatgttatgccctgcaatttcacccaagcctttttgcctggtgcagggtcctacgtaacacacgagacgaactactttgtgtatttttacatcgattctaaagccgtcttgctattcaaatctgggtgattggcgtagctaatatcccctgcgcttgttgtcttgtatgcctctttcctccgcgttgtctgcaaccaaagctggaagcctggaattctgagagcctgcatgttgttgatgtatcagccgcggatcttttccatattccagcaaatgtgagattagattgtgtgtctattttacgtctgatacatctaggtggtgtcctgacattgccttattgtaatctgattgccggaaagtcagacagaggttgtcatcaacaaggtaaaacttgtgctgatctgcttatattatgcattctctggccaccgggttgcagaaattgcaatgatttcaatgaatgataccctacatgaactgcctatatatgatatgccaatgtggattaagttacaaaaagggaaaatactttttgcattgttgcatcatgtgaaattctactagaccataacatggccattttttgctgagcaatccctgtgaaaatcgtactaaattattattgatggatgcctatgataaatccatggtatcacttaaatttctggttaagcttaattgtatgtgtgattatggatagtaggaattgaatttggtgggtgcactatactgatctgcttaaattatgactgtctggaaagaggttttcattctctggcatggtttccatgaatgacatgaactgcctacatatgatttgtctcgtgggttaggttccacagaggaaaaaaaaaatactacgtatccttttggttgcatcatttgaaattgctacaataaatctatgatgtcagtattttctgcaatttatgggtatcaggaattgacctatacaatcacgactctaccgctacactgtactgtttgtgttaaagtcaagttgtactgttcattcgtgtacaaccagaaacatagcgcattctcagaatttttattatttttaaaacctttttaatttcacaaaataaatcatcttaaacttatttctgaaatctaaactttttagccatgccccgcatgatgtggtaaaataatatagctatgtcaaccatgctggcatggcaaaataacactgttacgttagtctatgtcagcattgtttcgccacataaatttggctggtgtggttgaaaggttcatatttgaatataaaaaatttaaaagttttagaaaacttaaaaaagatcgcattctcatccttgcaaaagccaaagtttgcgactttgcgttcgtcttacgacaaagaatacggaattccctagtactttccacgattccatcctccatcaattttgtagagcaagtatcatgtgcgcatatataaacaacctgtccctggattctttgcctacaatcatatcgtactgactcctctagggaattgagccctccccctaccctaaaattattcatgacctacccacacaaaagatggccgtccccatcacccgcgcggatgacgatggccttgtaaagagaagaaaaaaaaaacgaagcgaaggtgataaggctcgttcatggacggcgacagcttgacctaacttcgcgccgtgatgcgcccacatgctggagccctccgccgtccacgtgtccagatcactagcaacgtggcaccaggatcacgcgcgagggtgcactggtttactagtggttactagtggccccggcggcccagctgagccgagagagaagaaaacgagttcaagtttgcagctcgaaatgaaatctcctcgtgccaaagctcaagatggcgattgcgaaatgttacatcgacaccgcaaaatgtccagattcaggcatcgtttgatatatgcacagtaatgtccgtaatgtttaaaatgattcaacacaaatttgacgtgaagcagatgaaattgaaaggaaattaaactgatttattacttgttccattaaaaccatcacactcgggtacgtggtgaaaccgtgaaagttaaaaaacaaaaacagtagtagtagagtgaggccctgctcgctgttacatgagaggtgcacgaagaaccagcacacgagcagagcatccagcccacacgcagcaaggaaacggtagggatgccgccgccgccgccggccgatccgccgcccggcgatgatgcgtcgtcgtcgtcgttcaggtgcacgcggaggcggagcggcgtgcggcgcggcgcggtcgagaggtgatgagtagttgacgcggagcagatatatatggatggatggcgtcgtcgtcggtcggacgacggcgaggtcgcgcgcatcacgcgcgggcgtagctgcgggcgaggtgggcggcgcggaggtcggcggcgtcggcgccgccggcgaagttggagggccggtagtggcccgtcacggggtcgggcacccacgacacctccctcgccgccgacgacgacgacccgtccttcgcctgcgtcatccccgcagcgcccttcccttccaccgccgccgccgcccgcctcatcgccgacgacgccgccgacgcggcgtaacccctcgtcgtcgtcaccctcgccgcgagcgcccgcgccgcggcggcagcggcagcagcagcagaggtggagagagcgagagccatcggatcactcgatcggacggctgatggcgctccgctcctctccttctctactctgcttcggtgcgacgcgacttgggcttgtgagctctgtgtggggaggagggaggcggaggcggacgcgcatttaaagaggcgagaccgggggggagggggctcgattttattattttttataaaatattttttggtggggtgccacgtggcgtgggaaagcacgtgacgggtcgagggaaacgtcgccgcgggttcgggctgtcggcgacgcgacgcgccgcggagacggtggacgggtcgagtcgtggtctggctatgcagcggtttgcgggtcggtggacgtggtccaccacgccaacgtgagtaaaccgatgatgatgagcgtctctggtttgtctttgtccactgtgaggaagtgagggcatcacattgtgatccataggtaaattataatattttattcacgttgtgtaattagttcctataaaaaacaaccaaagatacctatatacatatattgaataaaaaaaatagtagtattatctatgtctacttctctcttcagataatattacttcgtgtctatatacaatgttgggattgctatagttaaaatctatttacatagattctgtctatattgatcacatttgccatataaattggtgatgccttattattggtggctttttatataagctaaccgatgagtacatttacgttttttaagctgctaaacgatactcccttcatcccaatatataagagattttagatggatgtgatatatcctagtaccatattcagattcgtattactagtgtgttttacatccacctaaaatctcttatattgttggacggaaagaatatattgcaacgtgaaaattttctgtgtagaagttcttttaaaatatcaaatagttttatttaagtttgtaataattaaaattagattaatcatgtgttaatgattttttttcatcgctttatcttccctagaaaaacgaagaccacgtagcatttctctttattctctccatttcaaattacttgtttaaaatactagttattattataattttaaatttctaagcactttttactaaaatgtttcctgtttgctcctcataaatgcattaacacctgtgaccgtaatgtacaggggttgtttcttttgttgcttgatttagatcggcgcaaagtttggcttttggttgaaattagatataatgtgactgaaaagttaggtgtgtatgataggttgatgtgatagaaaatgactgaagtttggatccaaactttggatctaaacacagccttgctatatctctgtgttgtatctaaaagttgatcgaatggtagtacgcaggagtaactaaattgaaacggagggagtttatggtggtgagtcgcgtttgcgttgaaggggggaagttgagttggtgctcttgttcggttttgataggtgatgggggtgtttaattagtctatgtaaggtagagattgagttgacttgcggcatgaataaaaattcaatcttatctcccttgttgtttgcgtattttagccgaaacagctccttcacgataacattaactatacttcagatgaatacaatttggccaccccataacacttaaatatcgaaaattatcaacactaaatgagcactttttattatgcattgtgaccatcaccaccgcccgcgtaaaataaccaggagaaagggcttgtttgtttcgttgctagaatcagccttatcaatttttttttatatatagatgaatgtgcatttagtttaatatccttttaaactttactagtagtgtctttatgagagaatctatggaaccactaaattttgataacgcatcattggcaaaccttacctaaaataggtgggttaaaaagtgacaataaaatggacatgtggatgtggtagggttaaaagtggtaataatgtgaacatatccaaagtagcaataatgttatgataatggaagttcaaccagtgactgggcaagctcccggcaggtcgggcagccactcgggctccattatcgccatctccattgctgaatgccatcaatgtttgtaaaaatcggtcaatcgcggtaaaaagtattagtcacttatagctcggtaacgccatctctttctcaaccatctccatcatctcagcaagacagaagttgatttgcagcattcaagtgctccatcgttgaaggttggctactcttcggattcacccttcctattgttctctaacagaagaaaccatgctggatttatcattcgggttgagctcggaccacctgcacaatttcggttgacagggttgatgttagagctcctcagattcaatgatgagcctcgtggggatccttcgctaagtccggtgacgcacacaccaaaatctacagctcaacaacaaacctcagtcttgtgccgtttccgtggaggcagccgatggggatcaacggtttgtcaagcggagtgcacatcttttgaggcccagggtagcggtcgtcgcggcttcgtcgcagatccctgccgacttgctcatttttctaatgttaggttatttcaggaagattgtttccgtagttcagttaaccctcccttctcaggggtggctcttttgctttcagtttttatccttggttatgtattggggtttatcctctaattctgctcttgcttaataaagttgatgtgtttttttaaaaaaaaaaacctcaacctgtgcagctggccatgttaagattaaggctgtgtttttttttcaagttttcaactcatttcctctttttcgcacgtccattgctgagtgccatcgatgtttaaatcggtcaatcgcggtaaaaagtattagtcactcaggctcggtaatgccgctagcttcgtcactgagtccaacctcaacctgtgcagctggccatattaagggcaagtacaacgggtcggcgagacctataggtgtccaaacgggcggcacggcccggcccggcacgggcacggttccggcacgggcacggttccggcacggcccgttaggcacggctgatgaaacgggccgtgccgtgccggcccacgtgccgagccgccggcccaagcacggcccgtggatggccgggccgtgcccgtgccggcacggcacgcccgcggcccacgggccgttcggggcacggcggcccgtgaaggcaggccgccagcccgccagcctgcagtgcacagtgtttttttttaaaaaaaaaagcaaaggaaatgtataaggaaaaaaaaattaaaaatggaaataaaatgtttaaaaaaaagtaatgatttactaatgttaaaaaatgaaaaaatggtatttaaaaaatggaaataaaagttttttaaaaaagtaatgatttgctaatgttaaaaaaaagaaaaaatggtatttttttgttgtgttgaaaaatttaaaaatatagattgtgattcattattttgaaataatttaaagataaatccacacttgcgaaaatattgcaaaagaatttgttaaaaatagtaatgacctttattgatgtttatatcattacaggatacaatgatacatgctgcctcgttaaaaactttgtcatgtaaaaactcataggggaaaatgagaaaaccatgacaaagaaaagagtacagctcaaaggtcagaactacttctaacaaaattctactggggttggtctggatccaggtagagttgctcgaactgggcggccaattcttggttgtccgcagtgtattgggcatgttgtcgagcaagctcccagtctttaacgcttagtagcatttcgacgtggtcgctgcgcagagtcgtcctccggtcttcgatgattcggccgcatagactgaaggccgattcggaggacaccgtcgacacgggcaccgtcaacacatcccgtgctagttttgaaagcacaggatatgttatcttgtggtcattccaccacccgaggacgttgaaatcttgtgcttcgtggtggatggcgtcgctgtccaaataaccggacaactcttcggccacaacatgcgaagaggcgtctccacttgtagccgacgaactgccaccaccttggattgaacttgaagacgatccaccccaaatcctaccccactgtatcttcttcttacctgtagtggggataggagggggtctctgctggcgaacttcctgaaactttacttcatatcttccaaaaacctcatataatttacgtctaacctcagtataaaaagaactataatctacacctatagtatctccaacaagtgataaaatagcagacaatccccttaatttacacctaggatctaaaacaaaagcaagagcatacaacataggtatatttttccaatatttcaaatatttttgtttcatgtgaaagacaggttcagttagaacgtcatcattttcgtattctttaaataaagtagcaatttcaagaaggttgtgcaaaattatattagcagttggataataaacttgtgacaaagttagagtacaatcataaaaagtttctagaaattggtaaaatttttggacaattgcccaaacatgctcgttcagtactgaagacccgtcactgtttcttgggccaccacgtgactgaacaaaatcagaaagtaaactactataaggtaaaacaacttttaacattaaatacgttgcattccaccgatgctctgcatcggtggcaaacttacgagctttcacaccggccgcattgcaaaacctcttccatgcagcaatccgcgggttagaagcagttaaccacgcgattgcttgacgaacagcatcgatgtggtcacctaccctcttcatgccagtcttaacaatcaaattaattatatgacatgcacaacgctgatggagtagaaaagattgagcatacacacaaaataaaggttgcaatatttcaatagccctagaattagcagatgcattatctagggtgacagcaaatattttatcagcaagattaaattcattaattacttccctaattctttcagctatgttttctcctgtatgtgagacatctattaacctaagccctaaaactctcttttgtaattgccaatcatcatcaacaaaatgaacaactacgctaagataatcctctctagctctactactccatatatctgaagtaacactaacagagaaagtacatgtactaaacagttccttaagtgcagttgcttccttgtgataaacattctctaaatctctagttgatgtttgcctactcacagctttaaacctagggttatgagattgctgaatgtaatgttcaaaagcaagggactccccaaagttcaggggtaaatcttgcctggcgattaaccggacaagagattcccgagcaaccatgggatcgtactcccaactgtgtaccgtaccgtctgggtttaccataagttgctgctgccggagttgtattccttgcttcttggcacacgactccgcatggcgcttgaggtgacctgtaccaccagaagaacgagcagataaaatttgcctacatattctacaacgggctttcgatacctcccttccgtcggggcatgtttcctttatctcgtcgaagctttgccacacaccggaggttctcgatctcttcgagccggtgtgtgtcgaaacacttccgctcgcggttccggaaaatccttccgaagctgtctccgcctgaaccggtacctcctcaacgacagccgtatgaaccggtacctcctccacagatggtggagttggagccgatccggaggtaccgtcaaaccccgacatgtagttggggtcgaaatcacccaaggtgaacgacggcgactggtatggaaagttcggatccattctgaaaatttaaaccgacataaacaaattttcgaatatttattgaattcacaaacacaatacaaataatacacaaatttaaatattacttacatctttccaactgcgagctcttcaaacctctgcgatcaaactgttgaactacgaaactaattttgatttttgacaaaatttgagcaaattttgtcaaaatcaaaaaaaatgcacacttgagaacaaagagagcacttaaaacacttgagagcacaagatgaggagtgtgggatgaggagaaatggctggggttcatgccctatttatagggcgaaatttgagattttttggaattttttcgaaatttttatgaattttttagcctcccaacggttattttcaaatttgaacggtcaaatagccgttagtgccacgtggcgccttcccattcgaccgccgcccgccctgtccgcgcctgacgggccgccggcgtgccgtgccgttgcgtgccgcgggccgtgccgtgccggcccgctacagtagccgtgccgtgccgtgccggcccgcgggctcggccagcggcccaagcacggcacggctactcgtgccgtgccggcacggcccgttactgtagcaggccgtgccgggccgtgcctgctacaggttcggccgtgccccgggccgcccgtttggcccggcccatttggccacctctagcgagacccgtcgacatgcactgcttttttgcaaaaaacaccccccacggtgctagcttcgacccatccgtcgtctcgttcgtcgacgatgccagcgcgtgctcccaggcgacgcgacggcgatgaagcccgttgtacgacgcgatgcggggaggcgacggaagtgcgggatcagctgcgtgggatcagctctctcgcgcgcggaatatttaaatgtactatgcattgtcttatgtatgcaacaaaataactacaaagatcaattatacactagatcatcatgatttgtgtgtcaaaggatgaattaaacactctacggacagccaaaccaacaacccattatataagccgtctgtttaagctgtctatctgtgtaaaaagacagcaagctgtctacacggttgtacttgccctaaggctgtgtttttcttttccaagttctcaactcatttactcgtttttcgtacgtactttttccaaactgctaaacgctgtgtttttttttaaaaaaagaatttttgcggaaagtgctttaaaaaatcatattaatttatccttttaaaaaataactcttaattagttaagtgctaataagtcgttctattttatgtgtgagagattattttccaaccgcatggattgagaacatagcctaaaggaatgtagcagactagcagcagtggaagtaagatcaggtacaataacaggctataagccaactataaacataatttaaagatataaaggaagagaaataagatcagcgggctacagatctgtagccagctgcagcacggactccaaagcgtactatgtgtatgacaggtaggaccaggtattaataggatagtaagcaactattatatgaattggctattatattggttatagatgatttggagttagtagttggctacgctattaaacttgctctaaggccatctgaagattaaggaatgtagcagcagcggaagtaaaggccgtggatgttaggaatgtagcaggctagcagcacagcgttccgcaggaaaatccacggcgctaattggtgacgcgccgagggaatggaaatcacggcggacggcgatcgaatcgaatcgaatcgacgcgacgcgggcgtttttgtcgggtcgccatcgacgggaggacaggacacagccgcgggcccgcgccggcgaagacgctgctgcatctgcatctggacaggccgcaaccggccgccccctcgcccgccgacggccatcggaaaaaggaaaatgctgaagcgaatcaagtagggccgccgcgcggcgcgtctagtgcaggaaatcgggacgacgacgtgcgtgcgatgcgaccgcgatacctcgcttggttgttgttttcggccattcaaaaaccttttacagaagatgggagaagatgccaagcagcgacgcatgccaaactaaacgtggccatgaattgtactaatactatttctcatgtatttgcttgcaacatcgtccaactaaacgtgcccattggttataatgcttcttctattcgctcgcaacatcattggaataataattcattccaatcatgtccatgcggaaaaccagcaaacgtgtccttgccaactaaatgttcacgctctccgccgcagcagcaacaacaacaaaaacgttcaaccagaagcaggctcagctttgcttctcagatgagaacatcaccatcttgtgccaatggttcagtgaccgcttcctaccaatgcacatcatcacatgaattcgaacatatcagaattaagatacaaaagtctccggtatcaacatccataacactatttgatgataacattgaaattgaatcgcaagctccttcgtaacactaaatgatgagttgctcctacatatctttcatgatccgtgctcactaaattgtaagtacaactttgccaataattacgaaaactctttcaagggagcatatgagtaaagttaccgatgataaaataacttttttttgtcccagtagtcaatagtacaaaatcctttattcaccaggaacatctccacataggccatctagccctcaataccgaaatgaaaatttcctgtctgatccgacatctttcagattttgcctgagattcagaggaacaagcttgcagaaattttaataaaagattctactgttttagagactacaacagcttgactccagcttctctaacagagtcaatgacagccctgaccttcccatggtacttctgctctctcttcatgtggatgcacacagcgggtatgcccttctgcagcagccgctcgccgagcagcttaccgatcttggcagcggcagcgacatcgcgagtggactccatgttcggcctcagcagcttctcctgcgagctcgcggaacaggcgaccgtcgccgttggggtgtgaaccacctgagcggatacatacttgttcgagaaatgcatcctcagaaggtagggcttcagaaagcgcgtgatcctagccgccctttccggtggagggatcaccatagttgctaggatctctctctgcagcaaaataacaagcgagacaggggacaatttcagttggcgaaaaatgcatacaggtattcacattaagacaacacaagtgaataatggtttaccactgatttgtaaacaatttgaattgtaagctgaaattcaaaaccaggagacaaacaaacagtacatatgaaaaggaacagtgtttagtccggccatgctgatcgacgataaacagttaagtattccaaaaaggttctacttcaatcagcactgcaattgcatatttgaatggccatatagcatcagcagcagcagcagcaacttatgcttactaaagctcacaaaaaaatgcatcaattccaccatggcgttattatccaagattattacaacaaattcaggcctgaaccagcgcatcaaaaacagattcgggcatgtccaccagacgcaggtgaaagctcacctcgagactcagaggctaacttaacgtgcgggcatggccatggcggatcagccaaactaatcccccacccgaaaagaacctccttggaaacaaacagctaatagtagtagttgggttaggcaaagatttagcttttccagatatagaagagaagctagggatggcaacacgttcccgcccctgcgaaatgcaacggggcatagttttctcccatcgccccccatggattctccatccccgctgtcaggaacaacaaactcaataggtacatttcacatctcaaataataacaatattcagtcaagagatattattgccatccaaaagaaaaaaaaaacaaaaactgctagtattttcagccggagcatgaccatcagtccaaaatcaacaatactaataatcaacatgaagtaagttcacatctcacatctagatgagtaagttcacatctcacatgcaagcaagcagcgggatcaaatctagacaggcgtacacacacggtaggagcgaccagccgacgacggagaggggggcgagcatgcgaggagaaagggagcgaggcgaggcgatgcctgacgactgccgcccgcgccgccctgctcgccgcgtcggcccctccctcggccgctcggcgggttaacgcgaggagaaaaaggggtatgggaggagaggcatgaggaggagtatgtgcgtacgtgcgtgtgcccaccggcggctgggtgtggggagcaggacgacgccggcgccgcttgcccgccggggtgggtggggatcggcgctgctcggcggcggcggcggcggcgcgaggagacgggaggggagtcggaggccgaagggatacacgggggagatcgagatcgactaatgctgggctgtttgaggtccagcgatatgggctttttctatggccggcctgggcctggctgaaaaacaatggtgaagaaagcccttcatcttttgatctatctatatgagggaataagtttacataaagtcctcacttacctctcccgattgaataaactgagccccatcgtttggcctaaacagtcaaagaataaggagtaaattccttgtgtgcccctgaaaagttacccaatcccttacatgcccctgaaacttactcgattccttctatacccctgaattttcgattggatcccctacatacccctaccgtttgggttccgtcagatgtttgtgttcatgtgtgtgttagcttgtcagtattttcataaaatgcgaaaatgcccctgtcaaccctaggtaacacagggccacatccgatccccaaatcctccaaaatagttcccacacgcacggtgccgcacatcgccagctttcagccatcgttgcacgcgcatcgccgcccttctcccacatcccggcggcggcagcggctctgcatcccgccgcggtctcggctctgcttgcggtcggcggcggcggctgggtccgcatcccatcggtggcgtggcggggtccgtatctggtgggcggcggcggctttgcatcctgccgcggcgacgagtccgcatcccgccgcggcctcgactctgcttgcggtcatggcgacgccgtctcctccctgcctcctccgcgccctccctcttgtcacctcaccctcttctcgggggctccgacgccggcctattacctccttgctccgctgctcctcgccgtcggtaagatacacccttgcgttgattagcaaaatgcgaatagctgctgctgctagtgtttcttcattaatttgtttgactttatgcaggcagatgccttgaactgttatgggcttgtgccattatgctcatgatgtaaaaagtaatatatttgtgtactgctgatggtgtatgaatgcttttagatgtattttcattttcttcctattaaatggtgctaccgatgctcttgatatgctgatgaattgcaatggtgtttgagtaaacgggtaggggtactgtcttttacccccaggctgtatcggttagtggtcatgaaagatccaatgtcatgttatatttttttataaaatactgaatgctataacaaaagaaaatgaaattaattttatgcactatttttttagtctcacggaatacatactgtgcagtcatgaatgtttcaaacccagctgccaaacatgttcttagttttcagctcctccaacctcaagggtattatagacattttcaaccaaactaaccagggaatgctgctaaatctaacggtaggggtatgtaggggatccaatcaaaaattcaagggtatagaaggaatcgagtaagtttcaggggcatgtaagagattgaataacttttcaggggcactcaaggaatttactcaagaataagccaaaatttgaatttttgaacttgattttgaagtgattttgaaatgcttttaacgtaatttttgttaatgttggcttttaagtcgctacgaacaaatctataaaagttttacttataaattaattttaattttctaataagccaaataagccattttggccaaatgggcaaccgatgggagcctgagtataacatattttccctttttttgaaaagaggagcaaattgactggtttcgaaagctgtttatgatgacgtgccaagtttaacatggttgatttgttgagtcaacaggttggacccacgtatgagtcacctctcttcccgtctttccatccctcccggtgatatccaggatggccaccgggggaagaggagcaggcatggaagcatcagccacagtttcaatggccaccaccatagcctgatgctacaactcgcccgactattcgccatcactgcgcgtcctctgcaccacataaaactaggggtgctagtgggcaaggttacccacttatttgtactataggtggtttcgtgtacctgcccgtttttacccctacatacaatataaacacgctggacccggcggcgcaccccggagttggtgttcgtcgccttgccgtcctacaccatcgaagtgtccgggtgcgcccccgacgcgctcgcggagtcggagccagcagcgttggtcggcggcatgcatggtcatcctcagtgcgcacaaggctgagctttgcctcggcctggggttggaaatttcggaccgaaatttccgaaatttcggaaattccggtcatttcggtcacctccgatacgatattattttggccgaaaattttcatttttttcatgaatttggataatatttgttcaaattcaactaaagtttactcaaaatttcggatatttcagaccgaaattttagaatttcggtgaccccctatacaaacgcctctaccgatagagtaaaccctggctgcacgtacgatatggctcagcgatacagatgccaccactgtccactgtgagtatcaggcgtacatgttcaacccagccaattaagtacgctccacttcatcaacgagtaaaatggccaacaaaagtgtactggctctctcagtagaaacctaaacaaactcctctggcacagtggtcaacacgttcgatgctcgctagcagcagcaacagccgccgtctggccctttctccgtcgcccatcggtaagagcgatggatggaaaaaaaaaagaaaagaaaggaaaatagagaggaaggggagggaagtggatcctacagatttttttttttcgttgagaggcttacacgcgagtctttgatgtgtgggtccagcttgctgatttaacgaatcaattgtgattaacttaccacgtcagtagaaaccgctttaaaaataactgaaggagtttaatttgcactggtttttaaaaatgggcgagaagttatacccagttttatggttgagagaggcgattcgatcgggagcagtagctaagggaagcaaaattgacttatttcatctatgtgaagccatagaaaaaatgaacaaagtaactaaaaataatttaatttagagcacatttcatagcatacacaaagtaactaaaaataatttaatttcatagcatacacatttcatagcatataaccaaccccagatattatgtttttaaagttttacaaaatctcacccttgagtatgaatttacttaaaattttaaaacataaagcgtatatagtttcactctgcactacttttaaaaagtattgtttcaaatatgctgaaattaattgagatttgaataaagatagttttatgtataataaagttatataatgaagtctgatcgtaatcattagactaagttgtggggccctgtccgcaccttcagtatcatcagactgtccttcaattttgttttaatccctggctgacatattatcagacgaaacttttctcattagaatatgaccatgaggtcaataaaccaaatccatgaggtcaaagaaacatatccacatcagtgccacgtttgatgatacagttgaggatgaaaaaaagttaagttactgatgttacggaatgataagggattgcacattaacataacaagctttcagttcaggaaatttggcatcaatttaagttcggaaccaacatttaaaacagcatcccttcagttaaagttccctagtgaattctaattcagatagcactcaagtaagccttacacttctgtaaaagctgaactgaccaaaaaattacagttcgcaaaatggcttgaccaaagctattcacatgtggaaataa

SEQ ID NO: 9179 - DNA, 9195 bp, Oryza sativa
ttaaggagatcccctgcttcagtgagactggtgacttgtacaccactgcttctaccttctcattggtcaaggtgactatgcgattcgcacaatcaatgacacccttgaacttggtaagccaatccatcccaagaatgacatctaggtctttggattcgagaaggatgaggttggctagaaatggtgatctttggatttctattagcacggaagggctataactgacctaggttgaactatttcccggggtatgaaccctcattggtgtactaagctcttcttttcttaacccatgcaccccaacaaacttctttgaaatgaatgaatgcattgcaccagaatcgaaaagtactgttgcagggatcgagttaacaggaaacgtacccagtacgacctctggtgctgcttgcgcctcttctgcggacgcgtggttaacacgggcttgggcaaaccttggcccggcacgcctgggcttcgggcacttgtcagcaaagtggccatgctcgccacagttgaagcaggaccctggctttgccctagtctccttggcttgggctgatggagctgattgtgttggtgccattggtgggcgcggagctgcactgcggttgggctgacctcccgggtggttctggctaccactggcgccctggtggaagctgcttgagttgaaaggacgatgctggcggacaatcatagggtaggtccaccctgctatccggaagtgaagcgtggtcgctggtgacttcctgggttggaccggaactgagccgcctttctcttcctgtccattttgtttcgctgatcctcctgacggattgccttgtcaaccagcttctcaaagtcggcgtagtctctagaaatcagctggttggtaagctcgttatccaggcccactaggaacttctcctgtttctctgcgttagtgcggacatcctctggtgcgtatcgcactaggcgattgaactcatgcaggtactcggttactgtcctgttgccctggtggagtgcgcggaattctctcttcttttgtgccacaaccccgtctggcacctgcgccttcctgaagctgcgacagaactccgcccaagtgacctccgtacctggcggacgggtagccatgtgattgtcccaccaagctgacgcggaaccctggagctagtgtgtggcgaaggcgaccttctcctgatcattgcactacagaagattgagcttcttctctatggcatggagccaatcattcgcctccatggggttggtggtgctagagaaggtgggtggcctgacgcatagaaactccggcagcttggactgagggggagggggaccaaactgctgctgctgctgctcggcttgctgctgcatcctctggtgcatctgctggtgctgctgctgcatctgctagtgctgctgctgcatctgctacatcatggctgccatcatctgagtctgatgggccatcacttgtgcaagagtcgggttctcggggagcggtggcggaccgttgccagaggcgctgttgggatatccaccatcggtacgttctttgccgttgctgccctcacctgctgcgcagctgccattcctggtgtttaccatctaaaggaagagcagacggaggaggtggaaaagaagaaaaacagatgctcaggaactaagctttcttatataggaatataaactgcaattgttctgatctgaattaaaacacttaaaacagcaaacaaatctttattaagacagccacatcataggcacatgatgtcgaccgtcgactgacccacaagcgaacaaacctaaacacacaagctgacaggcaattactaagcagtcgataaactaagggaaaacgagcctaattctcggaacggctcctacggttggtggagtcgaaggcgtcctcctgcttgtcgctaggtccctctaagcggctcctggagtctggcagatacgtctcgccattgcccggctctgagccactggaactgctgctgctgtggtcgcggctgccactggagttagcaggcaaccaacctccgttaccactggctggacccctggtggctgacgctggagtgaaggagagagcggacatcggagctgacactggaacaggagctggggctggagctggagctgcgggtgctgcgggaactgcgggaggtgctggaggagttgcgggaggaactgcgggaggtggtgggttcctgggcgcaagctgaatatgcacgggagcagtcgtcgacttgcgaggcgtggtgcggatccggactcctctaggagcagggagacccttcagctgagcgttctccttcttcagtcgtgctatctcatccttcagaactatgatcctcacaagcttcccatcattcaaggccttggatgccttgcgcaggtcggagtgcatcctatccattcccctcatcacggcgcacatgtggccaaaggtggtgtcgttcttgccggctatcgggcggaaggtgctaatgtcgtcgccacttgcttggcgagggtggaagcggtacgccgtgttgcagaagatgtagttgtggcgatcgcgaagcctggccatcatcagatatgctgcctcctgacaggcgtgatctgcggtgcctccagatgcctcaaccaccatgttagcgaggcaggtgcccacatagcgatgcaccaccagacgaatacggtgaggaagctcgccactgagcggccgaatagtcgagtactctggcgcgttggggtagcccaccaccagggtcatgcgagccaactctgccacaaaatcgtccatgccttctccgcggtggttgggtgggtggtcagccatctagagaagacaagggggtaggatcaatgcatgctcaaatccaatttaaatgaagcagtaaaggactcaaataaaataggcgaataagagcggaattttatgcatagatcatttttgcatgagagcgaataaatgagacggacttacatagcgataaaataataagaaattagatactgactaataataacaataagagcataaataccttgcaacccatattcctgagttaggacctaatgcattcctcccatcaaataccgactgactgtccaataaatctcaaataattttactaaaaccctaagcagacctaatttgataaatctcgcctaaacgcacgaccaagatttttcccattgaaccacagaaacaaatccccaatttttcccggaacaaatccaattgcaaagtacatatgcaatgaaaaggattcatagggctcttaggttttccatttggcttgtcctacggtcaaggtcggctctgataccaacttgtcacgcccagaaattcccgaatagaattccaagcagaatgtgcataaaaacccccgtccaggaccggccggggtacacaaacgacaaagttgacatacagatccacgtcttacaaacatcataaaagtcttacataaatgcagcggaaaattaaaagataactggagctaagccttgacttggaccgcagcgggatcaccactccacaggcatcctcgacggcacggacgaagcctactcctcggagaaaccgccatctgacacatactcaaattctggggtttggggaaaatagagcaagactgagtacaaccaccgtactcagcaggtcataccggaataggggggtatgatgcagggtataatcaaaggataggtagagcggttcatttgcataaagcgagcatttataaacagtagttgaaaacagtaaaaccgttgtaacaattaatcaatattaactatccactgtccaatgctataccacgttgcaacaggcccaaccatccacctaaactaatcaattccattagactagactagggtgagactaatcacggtgaatctggttgaccgcccgtaaccgcgggcatggctattcgaatagttttactctgatcagaggtgtacaactgtacccacaagacacagccccacaacaagtttttgtgtgtcgacatgccaccacgacataccggatagaggccgtgacaggacccttcgcataaccccctctaaccaagcacaccacacctcaggtttcacccccactcctcggaaggcagcgggcagtcccctctcgtgcctaggtgaatccggaagccgcaaaaggccgtcgcagggcccatccaaactccatcacgcccacccttgcctggatgcgtcagctagaggaaagctacactacaagcccagccgttgcccacgctggcttgtgataagtacgatgaattcttccagggtttcccgcgaaccggtccttaagagccatgggcgcgaccaacaaaaccatgcacccacagcccaccatttagttcattttaatttaccaacaccggagcggtggcactaaaccaacatcaacactaaaacctgacgtttaatcattaatgtgatttcccccatggtgtgctggttgaactaagcatggctaagcaatctctagaccaacatctagtcttgttatatcccaagctatcaaaggagcaaggtacaaaaatatcatggctgtaacagtaggtaaacatcccatagtaacattataaaacaatgcggtatttaagggaaaacggtagagcatttgcaatataggatcaacatgttcaagtgacaagcatgacttaccttgctctgctgctagaggagcctcggcgactatttcaaagtacaccggagcgtcaggagagccggaatctaagcgacatacaaagcaaacaatacaaataggctataagactactgaaacagagaacaaaaccattttaatggattctatgcatttttcttgattttctaagacttgaatgggcttaaacggagctcggatgaattttctatgaattttagaagattcactatgttttactataaacagaaaaattcttaattgatttattgcgcaataattaaattcccgggaagagatggggcggcgccgacatgcgggccccacgtggcagtgactcggggggggtgtccacggtggaccgggtccacggaccggggaggagcggcgcaccacgtggtgcacacatggcgccgacgcggcgcacacgtggcggccacgtggcagccgtgcgggcggcggggttggatggccccgatctaccgcccggtagatcagacggtggaggcgtctcgcggccgggcgcgcacgagcacggcccaagccgacccggcggccgtggcgcgcggcagcgcagcgcgacacgacggcgtcgcaaggtggcgaggggccaacggtggagagcagcggcgaccgacgacgagtggcggcgcacggcgagcgacggcggcgcggccccgagtggaaaggcagcggcgctaagagggagagggggaaagacgacggggagatgctcaccggggttcagccggcacgagggggcgatggcgaacggcggtgagggatgacctggggacgacggcgactggcggacggtctccggaaccacctagcgaacaagatgagaggggttagagggagagaggaaaatgggagagggcgaagacgacggccgaaggcggcggccatggcggtgctcaccagcgcacggggcggagagggttccggcagcggattccgacagaggagaggtggacgggacgacccgcaccacggcgagcgcgacggcgttgatggcgcggctcggcacggtggctagcggcggctagcggcgaccggagcggtggcggcggtggcggagaggagggcaacggcgctagggcgatggagggcatgggagcgggtggttgcaaaacgaaaaagagataagaggagacagggacgctttatatagacccacgggggtcgatcgtggccgggatggccgcaatttcgccggcggagtggggagaagtggggaggaattcgaatcccggccgtctcgagcgcagcgcgggcgggagagagagggagtgggcgcgggggacacgggcgtgggtggcgacgtgggcgacgtggcccggaagacgcgggagcgagggcgcggcggcgccggctggaggttgggggggacccgataggtaggccccacctgtcggcgaccccaggagagaggaggggggcggccggctcagctgtgcctcggccttcggccggcccagtgggaagggggaggaaggagagaatgggccggtggccctttccgaaaagaaaaagagggaaaaagaaagaaaaagaaggaaaagaatttccagggaattaaatattgcttgttctcatttttaattggttaaaattatttctagagctctgaaaattccactaaaaatcttgttagcgtatttcgacatgtagaactcaggaaaaatcccacatgctagttccgattattatttgcattaattcctttagggtttctctcttgcttttacaccggtattttcttgagaccatttataacgtcaatttaggcttgagaaagaactttagggtgtgacaattaacataggaacttatgacaatacctgtctataagttcgaaagccttgtcaaacgtagactcttttttatccattgagtcatatacgttgacggtggaggcctccaagtcgaagagtaaaaggacccagtggaatctgcattgtgcgtcggatgcattacatatgaaacacttagcatgttcgtacgggaatgaaatttggtataggaagacagtaaaaactaacactgtgttgtacgacaatagtatgaatgtcttgtaatgctgcgccttcaggagatggacgagattttcctctgtagcttgcggatactggtcgagtattgcgacgtttactttccgagggtcgatgaatccagtatcgaaaaccccctgccgtcgggccctttgaatctccattctacaacgataaaaggaagtatatattatatatagtaaatgtaataagaaatctaactgaacgatacttacaaaatccagcaactcataatagagacgtcgagggcgtccagctggtatagttcgtaaatacccttgaaattgatccagagaatatcatctccttgcaagaagtccgtgtccctaatcctcgctccgatcatctctctaccggtggcgctcatctccatgtacagttgatggaacttgtacatttgtgtgggtagggactgcagctgctcaggcttgacaagcggtttaccgagttcgtacatgtatttcacttccgccctttcgattggtgcgcctcgtagcaattgatccgtagttagcccggtgtcattaataaattcttgtattccaaaatcttcaccggtcaccaacggctctatctcctggtttggttgctctccaagctgagggactggtttggactttccagaagatgctttcttaagtgttcgctcatagtccgatagctttatggcctccttggcaggtgtagacatacccctgaagaagttcctggcactcgggtctataggaatcttcttttctggacttcgaggcttcaattgtctcctgacttctgatgccacataagtgtcaagctcctcttgcgtgcaatcgtaccccgggtccttgttttttgcggcgtcaactttcgccttcttcgttgcccttgtgggggcaggcggtggagcttggagggcccttgacttggaaggtgccggtgcaggagcctgaggaggagtcggtgcaggagcctgaggaggagatggtggagccggaggagatggtgcacgagacaccgcttgtcgcccagggaggatgatgtaccacttgcgccatagtataatggcgtggcttgtgtctcgtagatgcgtctcaccgtctcctccagggtaatccaactcgaggtcctcgtacgcgccttccaccaactcaacttcgaccttggagtatcctgctggaatcagcctgcagtggtaagtacctgaacggtccgttgggatggccatgcccgatgccaccttcacatggtgagaggttatttattagtaatcaacatatgtaagcaacaacttgcggaatggacaagtctaaaatctataaatactacaagctttcctttattgataagttcttgaagggaatatgcagctcacatggtgtccgctgagtgatgtcatcaacggggcaggtggtttcgtcctgggtttgcatggcgtccatgctctgtgatcctacctgccccgttgaggcgcagctgctacaattgcctgaagggctcaccattgcaggaggaatggtcggctggggatcatgggactgatgtgcggccatgcgttcatcaaccttccttgccacctcctcttgcatgctgagctcgtagctcgataccctatacttaagatctgcaatcttcgcctcggtatctctctcgctcctcatccgactcctgtacatgtggatgtcctccttgaatccaatcttccaaggaatcacccctttccctcgtgttcgtcccagatgctctggagtctgcagggcgagtgatagctcgtccttctctctgtcggtcagaacgtgccctgagaagaggcttccacagctcgtccgttagtcgacgcgcagcctcgcgtatctgatcgctaaggaccagggagccatcaactaggttgagcgttccaccgtgagcatagtaccagaacttcgatcgatctggccatttagcggtggctggttcgatacccctctcaaacaatcttgcctccatctcctcccacttcggcatcgcgacgctatagccgcctgaccccacgtggtgatagtacttcttcttggcggcattttctttgttttttccatcatcgcctacccttgttgacctgtcttatatgcaacgaactcgtcccagtgatcccttagctttgagattgtgtcgaagttcggtgtctgtcccttcaggatatatttctggtacagatctcccttgaagctctgaaactgttctgccattttctttagagtccaccttttcactttgtcctctatacccgcgggaagggtgaatgtctcgagcattgtggtccacagcatctctttctccgaatctgggacaaagctctcatgatctccgcgtgcccttgttctgcgccagtacacagtactgacaggcacgttatcccgcacaacccaaccgttgtgtcgtacgtagttcttggctgcttccgccggggcactaggtcggccgtcttcgtccact

SEQ ID NO: 9180 - DNA, 6581 bp, Oryza sativa
ttttaatttagtcctcaataaaactcgcacccaaaagaaacccaagaaataccaaattagactcggagttcgactttgtgatctgaccggccacctcgcatggcaagacaggtctcttccaaatttagccacgtttttttttttttggctttccgggaaggatgatagcactatcatatgatccggattcatatagtacaatcctacggtaccaaatctatttctgaatcctattgtttttcattctatgaaacaagagaaactaaccttccatccatatattacttatctgggcgatcacatacgtgtgagaagtgctactaagagttaatagtagtgctaactactagctataggcacatttaaacctaacattttataatagattaggtataaggtgagctctactttttcctccatgtttcttccatataggtttatagtatatttatagtatacttatagctcactattgtccttgttctaattaactaaaagtatacagcaagcttaaatatctgatttgcttgctaggtcatgcattttttttcatatagagttttctattaaaatacttatccgatttacgattctattacaccattataaaaatagattttttaaattatttatagcataatgtaaattacttttagatttgattaaattacttcttatacatcaatgaatgtaaattcaataaagcctaaaagtaattatgtatatgctattaattactactctaatctcggtaccacgcttataaaagattaaggtattctatctaagcggagcgatgagaatatattttacttaaataataagagtaaataccataaagcagtcacaaacacttatatgaaggcaaagcatccgtcgaggtacaagctttgagaagagcgccaacagactcagcacttccccatacttccccctcactctctcctactctaagcattagctatatagagcttcacccttacaatatagcttataattttgtatcttggtgtgtgttgagaatgaggagtatgaagccaatagtgtggaggtgacttgagagagtggagatggcaagagaatattcttcctccagctgtctcaagcccccacttgtcctcaaaccgtcattggatggcagtttccttccatgagccttgcgccatcagctttaggagggcgatgagtggtcccctggtgggttctactgaaccctgggcaagcctcctcgtgccacctttcatctgggtcgctacttggtggaccctcatggcggtttgggatgtttgcgccaatttgaggtaattcgatcttctcctggtgtaggccctttgatctatatatgtactctcctctcgttgattggagttgtgtcttcttacttatgtaatcacctacatacaaatatttaccaacacttgtggaaatagttggtaataaaccactaccagcatatatgtttggtggtagacattgataagttttatgcaagaattgacggtcaaatttagtagttaaggaccatcaaagtacaatcaatagctgttgacactaaccataagcaatttttactcaccttgtcttggttcatttcatacctccccttcatcctaagaaactcataaacgtaatacccacaaagattgatagaatcaagttacttctggcactccatgaagcaatgcaagcaatatgtaattgtttcattgtttgtatcatcgtaatattaaggtagaaggtttggaaatgttgtcttacccaagagtgtacgttgaccatcatttgagctggatacttgggatcatgttgcccattcctttgttggatgcaccactcgcaagccctggtattgaaaatatcaagagtcattataaaaccatgtacgaagcacaatgattatttttatagttggaggcaatattcttacccattgatgatgtagataaattccttctataatttttcatcagaattgacggagttaattactattattctgctctccttaggatagagtactaataataaaataaaatgtagtgctcaatataaatctataaaacttatgttagtttctgggttgtcggatttagtaggtgcaaaatactacctccatcccaaaatgtttgacgccgttgacttttttaaaaatgtttgaccgttcgtcttattcaaaaaatttaagtaattgttaattctttttctatcatttgatttattgttaaatatacttttatgtatacatatagttttacacatatcacaaaagtttttgaataaaatgaatggtcaaacatgtttaaaaaagtcaacggtgtcaaacatttagggaaggagggagtaatttgtatgactagctatttgaattaatggaattatctaaagtgatagggagtaaatattttgtccttgactatcagtggacccattaattgagcttcctatgtacaccgatctccttcctttttttcccattgagaaatgtttttccttccttacttattggcttctttttttgtgaacgtgcaaaaatattgcatgttagtacttattgttagaataaatgagttaggcccaatttatttctactaaaatctcaagggcccataataaatgttaaagataataataccacattggggattaaatgtggagtatatcaacttaaagagagagttatcggagattccccgttgaccggttgaggtgggggtcggatagccacacacgcgtgcgccgagccaagcaggccggcccgtggcgagcgtgcggcttggctctctctctctctctctctctctccttttgcaatggttcagaattcaactccgcgagattacctctgtaacaggcgggcgattcaatattgattgatcgcgtcattacgctattaggacgagacacagagaccgacattcagtttttccacgaattctctccatcgctggttcgaggttacctctgtaatgggcgggcgattcaatattgattgatcgcgtcattacgctattaggacgagacacagagatcgacgttcagtttttccacgaattctctccatcgctggtttctcccctgtgcctgtgctgcttctgttcttcttcggttctgatcgcttgcgcacacaagtgattgggacgagcagggcctccggaaccacaccctcgcctgagatctgcacgggtaggcgggtgatcaggtttttggggagtgcttccgcacgactgctcgcttcttcgtcgtcgtacggttccgtctgcatcgcgtgatgtctactggtggtggcgcacccggagcggcaggggttggtgcgccaggagcaggaggtggcgcaccaatcgacaacaccaatggaggcaattctgactcacaatccagtggagggacattcacagggtatagcattcttctgttacctttcattttgttaaagctgtcagtcgcaaatattattgcgttgtctcaatgctgatgcttattttaccttaagcatgctcatggttatgtttagttttatcactagaccacttcacattgtgcatgtcatgtttattgtcttaatattttggattaaaatatgccgattttttaccatatttccaacacttattaccttcctctgatgattggtctcaagttaatcctctaacaaatacattgagatcaaggaagccgaccttgtatcccttcgtctctgcaggatcatgctgcattctaaaaacactgaaagtaaaaacattaaaaaaggtcacaatttaatgaataaaactaatacatgaaatggtagttttattagagtaaatacaatagcagactatatgccagttataaacacatttcgaggagataaaagataagagagaagagcagcgggctacaaatatgtagccaactgaaacacggactctaagatgcacacactggtggggaaagcatttgcagtcccggttcgtaacccccctttagtcccggttttcaaaccgggactaccaatccaggactaaagatcgctatctttagtcccggttggaaataaccgggactaaagatcgagctgaccttttttttttgcatggccctgttgctacatggtttatatatatatatatattgaacttccgcccaagtctttctctccatttgccgcggaccaaatgacggaaccgataccaagccctacatggagtttaaagctatgattcatagtagcaattaattataacaagattcttaattaatgtcacgcccagaaattcccgaatagaattccaagcagaatgtgcataaaaacccccatccaggaccggccggggtacacaaacaacaaagttaacatacagatccatgtcttacaaacatcatataagtcttacatatatgcagcggaaaattaaaagataattggagcaaagccttgacttggaccgtagcgggatcaccactccacaggcatcctcgacggcacggacgaagcctactcctcggagaaaccgccatctgacgcatactcaaattctggggtttggggaaaatagagcaagactgagtacaaccaccgtactcaacaggtcatatcggaatagggggtatgatgtagggtataatcaaaggataggtagagcggttcatttgcataaagcgagcatttataaacagtagttgaaaacagtaaaaccgttgtaacaattaatcaatattaaccatccactgtccaatgctataccacgttgcaacaggcccaaccatccacctaaactaatcaattccattagactagactagggtgagactcatcacggtgaatctggttgaccgcccgtaaccgcgggcacggctattcgaatagttttactctgatcagaggtgtataactgtacccacaagacatagccccacaacacgtttctgtgcgccgacatgccaccacgacataccggatagaggccgtgacaggacacttcacataaccccctctaaccaagcacaccacacctcaggtttcacccccactcctcgcaaggcagcgggcagtcccctctcgtgcctaggtgaatccggaagccgcataagccgtcgtagggcccatccaaactccatcacgcccatccttgcctggatgcgtcagctagaggaaagctacactacaagcccagccgttgcccacgctggcttgtggtaagtacgatgaattcttccagggtttcccgcgaaccggtccttaagtgccataggcgcgaccaacaaaaccatgcacccagagcccaccatttagttcattttaatttaccaacaccggagcggtggcactaaaccaacatcaacactaaaacctgaagtctaatcattaatgtgatttcccccatggtgtgctagttgaactaagcatggctaagcaatctctaattcaacatctagtcatgttatatcccaagctaacaaaggagaaaggtacaaaaatagcatggctgtaacagtaggtaaacatcccatagtaacattataaaacaatgcggtatttaagggaaaacggtagagcatttgcaatataggatcaacatgttcaagtgacaagtatgacttgccttgctctgctgctggaggagcctcggcgactatttcaaagtacaccggagcgtcgagagagccggaatctaagcaacatacaaagaaaacaatacaaacaggctataatactacagaaacagagaacaaaaccatttttaatagattctatgcatttttcttgattttctgagacttgaatgggcttaaacagagctcggatgaattttctatgaattctagaagattcactgtgttttactataaacagaaaaatccttaattaatttattgcgcaataattaaattcccggggagagaggggcggcgccgacatgcgggccccacatggcaatgactcgggggggcggttcacggtggaccgggtccacggaccggggaggagcggcgcaccacgtggtgcacacgtggcgccgacgcggcgcacacgtggcggccacgtggcagccacgtgggcggcggggttgaacggccccgatctaccgcccggtagatcggacggcggaggcggctcgcggccgggcgcgcacgagcagggcccaagccgacccggcggcagtggcgcgcggcggcgcagcgcgacgcgacggtgacgcaaggcggcgagcggccaacggcggagagcggcggcgatcgacgacgagcggcggcgagggatgactggggagatgctcacaggggttcggccgacacgagggggcgacggtgaacggcggcgagggatgactgggggacgacggggaacggcggacggtctccggaaccacctagcgaacaagatgagaggggttagagggagaaaggaaaatgggagagggcgaggacgccggccgaaggcggcggccatggtggtgctcaccggcgcacggggcggagagggttctggcggcggattttgacggaggagaggtggacgtgacgacccgcacgacggcgagcgcgacgacgttgatggcgcggcttggcacggtggctagcggcgctagcggctatgcggc

SEQ ID NO: 9181 - DNA, 1158 bp, Oryza sativa
aagagataagaggagacagggacgctttatatagacccacgggggtcgatcgtggccgggatggccgcgatttcgccggcggagtggggagaagtggggaggagagagagactggattcgaaattcgaatcccggctgtctcgagcgcggcacgggcgggagagagaggaagtgggcgcgggggacgcgggcgcgggtggcgacgtgggcgacttggcctagaagacgagggagcgagggtgtggcggcgccggctggaggttgggggaggacccgacaggtgggccccacctgtcggcgaccccgagagagaggaggggggcggccggctcagctgggcctcgtccttcggccggcctagcggggagggggaggaaggagagaatgggccggcggcccattccgaaaagaaaaagagggaaaaagaaagaaaaagaaggaaaagaatttccaaggaattaaatattgcttgtgctcatttttaattggttaaaattatttctagaactttgaaaattccactaaaaatcttgttagcttatttcaacatgtagaactcaggaaaaatcccacatgctagttccgattattatttgcattaattcctttagggtttctctcttgcttttacaccggtattttcttgagaccatttataacgtcaatttaggcttgagaaagaactttagggtgtgacaattaacataggaacttatgacaatacctgtctataagttcgaaagccttgtcaaacgtagactcttttttatccattgagtcatatacgttgacggtggaggcctccaagtcgaagagtaaaaggacccagtggaatctgcattgtgcgtcggatgcattacatatgaaacacttagcatgttcgtacgggaatgaaatttggtataggaagacagtaaaaactaacactgtgttgtacgacaatagtatgaatgtcttgtaatgctgcgccttcaggagatggacgagattttcctctgtagcttgcggatactggtcgagtattgcgacgtttactttccgagggtcgatgaatccagtatcgaaaaccccctgccgtcgggccctttgaatctccattctacaacgataaaaggaagtatatattatatatagtaaatgtaataagaaatctaactg

SEQ ID NO: 9182 - DNA, 3641 bp, Oryza sativa
atgttccaggtcaaggctaatgctgatactcctgcggatgcactgactgcaagaaataacggtgcggaagggattgggttgtgcagaacagaacacatggttggtacactgctttatcttattattcaaggcatcttgatggattaattctgacagctgtctctgctacatttgttctttagttcttctcttctgatgaaaggataaaggccatgagacagatgataatggcggaaacaattgaacacaggcagatagcactagatcgcctcttgccatatcagagacttgactttgaaggaattttccgtgcaatggatggtatgtgataccattacatttagtcttaagcttcatccaactttctcaatatcattactggcttcatagttaagataatgtttagtgcttaatgcatatgctataatcatatgattttgtacattactttcacattttcgtgcaaacatgtaatatttgtagtctctgatcattaattattgcatcattgcttgtgtttcaggacttcctgtgactattcgactcttggatcctccactccacgaattccttccagagggtaacgttgaggatatggttcgtttgttgtcttctggaaacgtatatactcaggaggaaattcttacaagaatagaaaaactttctgaagtgaatccaatgcttggcttccgtgggtgcaggtcagctctttgtgttgtgctttcatcatgcatttgtttgaccgcaattaattattaaaaaggaggtaccacaccagtgattctgatttgcaatttgtttgacacttcaggcttgggatatcatacccagaattgacagcaatgcaagcccgtgctatctttgaagctgctatttctatgactgaacaaggtgttaaagttttcccagagataatggtgcctctcattggaacacctcaggtatacatgtatttattgtctggcattacatagctatgatatgcttcacctgctctatgccatctatattaagaatttgagttactacagtgctactgaactcccaatattaggatgtattgtattttctgtagatggataagaaagatttgcttattttgagaagaaattttccgtcgtcgcttattccaggttccatacattttataatttttgagcttgaacaactaatattattatgttactcttttaggaactcgcccaacaagtagatgtaattcgtgaagttgccgaaaaggtttttgcaaatgcagaaacaaccattagctacaaaattggatccatgattgaggttcccagggctgctcttatagctgatgaggttagttggtatcgactttgctgtttatttagcatgtatttctacctaatttgtgaatactgttctatgtttctctgaacttcaataatggatgacagatagcagcactagccgaattcttctcgtttgggacgaacgacctgactcagatgacatttggttatagcagggacgatgttggcaagtttctgccaacctacttgtcaaagggtatcctccagaatgaccccttcgaggtaatcttactcctgatcaagctcttaatctcaaattctcagttgggctacaaatacatgacagcacacctaagacagctccatatattattctatatttttctgttgatcaaaattgtctgctctgagattatctcatttagctaatccgtgtctccctgaacgcatgtatttgcaggtgtttgaccagaagggagtgggggagcttgttaaggttgccgtagagcggggccggaaggcaaggcctgatttagaggtataatcagctcctaaggcataagttatcgtgaaataattatgcattaccgtgtacctttcgaacatatatattgaagggcaaaacttgtttgattataatcaatcaaattgatgcttgtcattgaaaatatatattttttgtaataggtgggcatttgtggggaacatggtggtgagccttcttcagttgcatttttcgcgaaggttgggctgaactacgtttcttgctccccattcaggtcagctgccgctttcaaatttgattagttaacaaaatcaacatatactgataaatattgatcccaatattttcaaacaactgtgaaactactgctgattgatctggacttgacatacttaacgatttggattcagggttccaattgcaaggctagcagcagcgcaggtgatgctgtgatcggcgagtactaatgaagcaaaccgttggtgcatcttgtaaatatacgaagagtaaataatgcttaaataatttatgttacgatggacactcgcaacatgctttgcttgacgaaatgtatgatgacctgcaaatggaggtttgcatgtgtataaataatattttttgtttgtgtgcccacggtaattgctgccataaacatcaaacagctatcagaggttgcatgttaaggcacctgaaataattgtaatttatttcgagaattactcaaatgaaatgtcatgtttttttgtacctatttattgaggaaatgttttgcacattgtttgatccttgagatcgtcctagtaattctcgcttgacacaatattttatttaatttggttgtggtgcttttgctagtcatttccacagctgcttgtgttatgcaaatgttctagagcatgtgtggccgccgtgccaacgttatggtaggatgcccgacaagccgacagttttcgtaagcctttttaagatccaatttcaaaaagattgcttctctcttagacaataaattagtctttgttcttttccctttttgtgaaacgaagactaaaaagtcttgtactcttgtacatattgtttgcatgcaaccttattgattgcagcagacaccttatgatacccgagatcaattatttcttggcttcagccgagtcaatgggtaacaaagataactgaaccaatgccccgtagcccgtaggccatatggctaaagctccagcccaaccatttcgagcctccgatgtactccttatgtttcaaaatatcaaaatataataatttatagcatttaaatcttgtttcaaaatataaaaaattttagcatgatttagagtactccctccttccaaaaatctaagaaatatttcattatttggtttttccaaaaatcaagtttgtagttactatgtgttaaattaaattgttgatcggaaaccaagaagtcattctaatacttattggttatatgttcattagttttgtcatatggtgagtgagttaattactttttggttttgatgcaaaagaaataggtcttagatttttggaaagagggagtactatttatctctttaatcaccttctattgtaattcctttttatcttttcctttagcctacctcatccatctcatatctttttacaggataactccatctgatcccatattattttaaagggatatctctatctgatggagtgaaaaataagaggtcaaagagatagaaatctactaagggcttgtttagttaatgaaaagaaaatttttgggtgtcacatcggatgtttaatcggatgtcggaagggcttttcagacataaataaaaaaaataatttcataactcgcttggaaaacgcgagac

SEQ ID NO: 9183 - DNA, 3331 bp, Oryza sativa
ttttctggaattagactaatgtacacctgcaaacacacctatgttgacctattccatacttcaaagggaaggcattttcatccgaagtttcagcttatctaacatttttcttcagcataaagcaacagtccaccatggtccaagccagcttaatcatagttgaccaaccatggatacattataaaatgacttagagttaaactagaatttaccgtacaattggatggctggatactaaaatatgtttgcatctagaataacaagaattgcatgtttgttactgaaaatacttgtaatgcagcagatctaataaatatctaattagtctatatcgttgcaatctaggcccaccatggtaaatggcatacattttctcttatttttccattatggcagtgatttctagatcttgagggtgaacagtgccaacttcttttaaccttttccttaatagtacaataggccagtggcgaatccatgtgttagatatgggatgatttaactttgcatgtaaaataaggaaaaattaaagaaatggccccactaacatatggaatagcgataattgacccccagtgtaaaatttgactcttccactgtaataggttgattgatttcaaataatatctcaccaaagcaaaggtcatatgggtcttttggcaatgtgtatacttgactgacgtcttagtttgaaaatgcaaatcttgagcatctgttctccagttacagcaatcatacttatccttggtaacatgaagtatacagtttgagtacttcacacagctactggacatcacaacatactagttctatctaaaaacacatcccactagttgttagttcccaacttcctatcacattattttcttgaattaagaaagtaaagaatttgttatgaactagatggagcaaagcaatttgggatgaaaataaaacaagatgcagttttgaatccccatggcaacaagaaccttgctgaaaagttgaaaaagaaaatttatgataactctttcaaggacacatgagctataaaccttaaagaatacagcaaccagtcaaggttgagctgttcaaatgcaaacaattctggcaaaacaaggattggtggaaaaccccaacatagagcaattttcatagagtttctttctttggtctcatttttttaaatgcaacccatccaagcgtcacatattatttattgcaggcctaagtcgaattatcctcagtctaattatgcaccaatggagaacctacacaaccaaaaattcatgtttcaatatgctaatgtcatgggtgcatcttcaatcatccatttcagtcttatagaagtcactaccattcagatgatgatgtggccatgagcaggctgcaaaggctgctagaaagcaacagaaagcccgggcaatgcaaagggtgactactaaggataactcctggaaaagaaagaaacaagaggaaacccatagttgaaaagttcttatgttataccataagacattatgctagttaatgtatgcagtgaaaatttttatcttgttatttgatcatgccctgctgtgagcttgttacagaggacatatgagaagagggtgtagagcacaccaatcaccaactcaatcatgtaagctggaaaagttgcgtcctgacaaaatcatggactaagagtctagctaattactactccctccttcccaaattgatcatcatataagtttatgcacaaagaccaagaacaaaataaatcacatcaatcaatacaccataatgcatgcatcgattaaaaccctaggccaattacaccctagcatgcacacattctcccatactgcattaattgtattctgataaaatccgtgtccatgtagttatatgatgatcaatttgagaaattttgaattctattacatgatgatcaatttgggaaggagggagtaattagcaatatgaactatgtgaaagctctacctgtgttattctacagtggctcaaacaacaaatcaacaaatagaaaagcaaaattagaataggaaggagccatcatattaaaatccggcaaaagtccaaacaagcggaaaagactttttgttgatgtgccttgaccagaatttttttcttcaaaaaaatcagttcatggagagaagatatgaccatattgtattaggtaatttgctgatttgcagagagtatgctgcaacctgtgagcatatatccagatcatggaagaggcttactatcaatagagacttgggattgtgtactgaacaaaccttagggctgatgccagggctgacatctgtagtaacatgtacatctttacaactgctgtcacagcattgcatctctccaacagggttttcattgatttcagggttgatacgaattttacttaacttatcttgaatctcattaacaacagtgctcaactgagatgattcttcttccaatattttcataatgtcatccctttgttgtatatgcaacttttgaagagttgaaaggccatttctcataaactcatcatagagtgcctgcattccaaagtgtactacacaaattaaagatgtcatgacaaagaaatataatctcagttttcatacctgtcttttctctaatactcgtgcatttctttgcaaatgttgctcaatttcaaggccctaaacatccaaaaacaaatacgtcagcaaagccaaaagattacgcttctcctaccatttaaaaaaaaatcgtcttaccattcttagattgttttgaagcttagctattttagctctcagtgaatctttctcttcttctagagatgcctataaaaaagaatagttacttagccaatggggcatgttcttacaaactactgcctctaattctgaatgtaagtcattttagactttgcatcctttgtcaaagaacaaattgaaaactgtagcataatttaacttaacaaattagaaaaagcaaagttgtttaacaccacaatcatcaagtatccgagtagtatgtatacaaagggggttatataagaaagcttaagatcaaagcataaatgcctctaaaaagagaaaaaaagagagagtatcaacatggccctcatttttgcactattttcaccatagaattggagcgtacgccaggataaatgtctcctaaatagtggatatagaatcaaacaattcatagatgtgtaataactcaatttgaattcaattattgaaatggataaagggctttaagtttacaatgtacttcgaagttgaggttcctccatctgagctgaaactccaattatcagcagaatcgtccagaagaactgaacatttttcttcaagagtaatgt

SEQ ID NO: 9184 - DNA, 7984 bp, Oryza sativa
taatgaaaagaaaatcattgggtgtcacatcggatgtttaatcggatgtcggaagggcttttcagacataaataaaaaaaataatttcataactcgcttggaaaacgcgagacgaatcttttgagcataattaatccgtcattagcacatgtgggttactgtagcacttatggctaatcatggattaattaggctcaaaagattcgtctcgcgattttctccctaactgtgcaattagttttttcatttatctatatttaatgcttcatgcatgtgtctaaagattcgatgtgatgtttttggaaaaaaaaatttagggaactaaacggggcctaagtagataaggcaagtcatacacgatgacctaccgaaaacgttattaactgctctgttctcaacagggccggccctgggcctaggccggttgtgcaaccgcctagggcctaggccggagggggcccatcatttacccccccagcagcccactagatcaggtcatcaggtgatcagttaggaggcaaggagcacgtcgattcatctgccggcccacaccgcgagtcccgagaagaaacaaagcgccagagcatcacccgcgccgcgtcgcttcgttgtctcatcaccgcgccgatgccctagtccgcgaccagcgaccgcgagtccatcagtccgcctgtaggctccagcgcctgccgcggtgccgccgtgcatttcaaatgttataatgttacctaaaaaacatttatcgggtgctaaaaaagaaactgtcccaggaaagattgaatggattggctatgtgtagcattgagaaaaatatcttggacaacattgatcttcaaactgtcattgatgatttcgcttcaagaaatgctcgaagaagctcttttttataagggacacgggatatttgtattaaggtatttatactactttgtttctatggcattttttagttgttaattatattatagttattatttatcgagaataaattattatattgcagcttgcaaattgcttcatttattatttaccatgttaggaatgtttatttgtgttactatatggtatatggtatatgtgcttatagagtataaatattagaagtaaaaaaatagcattaattttttaagggtccatacactgtgtttagttcacactgaagtttagaagtttggttgaaattggtacgatgtgatagaaaagttgtgtgtgtatgaaagatttgatgtgatggaaagttagatgtttggaaaaaaaaaactttggaactaaacaaggccatagtgccccccaaatgtcaggaccagccctggttctcaaatggaagaatcaatttcagatgagttatatgtacacatgcttatgttattagtacttttgaagtattatatctattactccgtccgttttatattataagatattcttttggttttaactaaatttataaaagaacataacaaaatttttaatacaaaataaacttaatatcaacatatgttcagtgttagatgttgctaaacttttatagaaactttaatttcgaaaaaaaatatataaaactttgtgaaacggagtacaaaaccgaacgtcctcaacagagcagcccttctagaatctagactttcagtttcacggcatgttgtagtaatctcttttcacatgcatattctccgtctactggcgattttatgggctgtcgtttgctgcggttgtcaaattgtcaaaaagtccctttcacgaagaccttgcgttaaccggcagatacatgcttccatccaacccattaagttggtgtttaatgacctgccggtactgtgctgctgcgtcttctgatcggtggaatgcacggaaagcctgggcgccgcccgcgcaagaatggccgcgtacgccaatcctgacgacggtttggaattcttcttttccccgacgtactgtcaatttattagtatcgggttactatgatatttttctatttttaagtgtaatttaatattcatattaattatatatatagccatttcataaaaaatagaataataataatatacagcattaaaaagagagaacacaaatgtattaagatagttttgatttttgaatattgtctagtttgaaatagttagctaatatcccgatagtaacacgattttaacgatcctatgctcccgtattccgatactagggcgataccataaaaaacaatcttaggatcgatacagacaactttgcgtaggtccaagcaaattaggttggttagtattgagcatctagaacaattaacaaactggcagttcccatcaatattttttttcctagggccgcagtcatagaatttggcaattaagtaccgattaatcattgctgcttattctaaatgaagtgtagcgtatactttttacatccctaaaaaagcaaactgatcttttctttttacaagtggaagtataacttgctacagttacaaaatgatgagcagtagcttctagtatgatttaatgtactaacaggttagaatcatacaatcgacatatggattaaatattaaggtgactatacgcctttaattgaaggtatttggatgcaagctaatattatctacgtacctatatatccaatacaacttttttttaattttttagaggaatacaactctttccttataacaagtattatgcaccaaaacccttcctttcctcactctctccataagctatccataagctagaaggggcggagccacgtgtaaggtagcttggtgttcaacctcatcacacgtggtagaaaatcacgtgtaaggtggattacagccagggttggattgtccaggctcattcgtgaatggataatgcgattttagtacgtatagagattgaaaatagtgttccatagttagattagttacggctcaaaaaaattgctttagctgaggttcaacctgagattaaacattgttttagacctcaaggagagttggaggtgtagattatttatattataaaatgagtattagatgtgtacacctttgttggtatagattccgggttttaatccattatagaaaaaaaaacttacatatagatcggcaaccgatcacagtaattaagcaacaaccattaattgtactgcacacttcttcgattggttctcttcagggtagccacacatcgaaaggggctgatctgaccaatgcacattacaaaccaagttcaaaaagacaaaaaaaaaaaaacatcacattaacaaagctgaaaaagaaacaaaaggtgacctgaaacaaaaaattgaagatcccctttcttccagctaccccagtaattactactactccaattaattaagattccacataaacacacattactggcttactgcaactcacttcaggtgcccttctttgtgtggcctctcggcgagctcccaacctcgcgcgtgccgcggcggccggccaacttcttgccgctcgccggcggcggcgacttcctcggggagcccagagggcggcgcgccgcgtcctcgccgccggcgcctccgttgctcagcagggtgggcgcgaggtaccaccagatggaggtgcagcagatggcgaacaccctcccgaacacggcgaggcacaccagcatcagcaccatcaccgccggccagtagcacgccggccgccgcatccgcccccacgagaacgacgacaccctgctcgccgccggcgcaggtggtggagccctggtcgcgcgcgcggcggaggcgccctgctgctgggcggcggcggtcgacggagacgacggcctgggtttcttggcggcggcgtcgtccttggggcgccgctgctcgtcggggagcttgacgatgatgggctccaacgcgccgttggactggacgaagcggaccatgacgaggccgccgccggagccgacgcggcggaggatcttgtcccggcgggcctcgagctcggagagcacggtggagaacttgtccagcccgcgctcggcgtaggggttgatcttaccgccgccgcctccgccgtgcttccgcctcggctgcctgggcgacccgccgccggtgccgcgcgccgccgggtcgtcgtcgtcgacgacgtgcttgaagctggccgtgccgcataacattttctaacgaaacgagctggtcctggtcgcgtacgtctctcgattttatcgatctggagtgtctgtccatgtgatccattaaaccagacgcttttaagtgctcgagccagtggtcaaagttttttttttctgtaagaaaaaaactttttaatacacgccgggtcaaatagaatcttctgttcatggtgacgtacttcgaatgtgcaatgatgagggtataattttctcagcatcagtgcatctcgtaaaagtaagtttaaccgaataagatataattaaataagttaatctagtatggaattggttatgtagatatcctctcgttgattacgtgtcatctgaatagttataaaaaaaataaaaaaaatcgacaacatagattaatataaaatatatcactccacaaatatacaagaccaaattcaacttttacaagttgcaacaaaagaataaaataaattgaaaatagttatcgtacattcgcagctatacttgttatttttgttacaacttgtaaagttgaattttaacttgtgtatttgtggagtgatatatttcatattaatccatcttaccaatttttttcaaaatttttatgactatttaggtggcatgcatgaaacgagagatatctccttgagagatgaaatcactttccctatggaatgtaatatatcttacattttatttgagaagtttaagattcttacaatctgttggttggtagccattttctgcgaatcttaagaagttggattttctagcttttgggttttagagcctgtttggggagcttctagctgctatagcgttttccacagaatcttcagctcctccaaacaattcagattgacaccttgattttgagaattcgcagttatagaatctagaaaatcaagaaagcaaaagctggaaaacccaacttctctagattcttagaaactggctaccaactagcatattcttataatcttaagcttccccaacatggcctagttcattttttgggttctaggtgataatctagattgtttgggggctaagtagactgtagttgatagaggctccctaagcagactctaaaatatgccacatctcgtgtcgtattagattaacttattctgagacagatggagtagtagactaatgtggattctgagacaggggagtagactaatgtggaaataggaagagtattatgtaacagcccttcctccaaaaccccgcagcccagcccaaccaacaagcgggcccacttacacataccactccacttacactttcgtcttcacttcgtgtaaaagggttaacccggttgtaatatggttagagggaagatgtcttataagttggttccacccttgctaaactagcaaggtgatactaaatatgtgcacacagtttacatgggctacacatgtctcatcctaattgggccaagatgtcacatacacccccctcaaagaattcaatgtccccatcggcttaacttacccatgtagccacacatgcttaaacaccatgtagtccacacatggcatataggtaaatgtccataaacatgccccctctcagcgcacgtcccatgtgcctcacacagagcccacatgcgctatgcgtcatatgtccgtacactgactcgtacgtgcaaccgcgagggtcggctgggataccatttgtagcagccctccctccaaaaccgtgtagccagcccattcgatgagcgggcccacttatacatgctacttcacttacactttcgtcctcgcttcgtgtaaaagggttaacccaggagtgatatggttataagaaagagaccttataagttggttccgcccttgctaaactagcaatgatactaaaatatgcacacagctcacatgggccacacaggcctcatcctaactggaccaggatgtcacatattaagcatctacttatagactttgcaagtaattatataaggacactatgattgaggcaaccttatacatgaggcctcgccatatgcaataaaaatatcacttttctctcactgctactttgtctctctacaatacaggtacttgccaccatacaggaggggagagcctgccatgggaaaggagaagaagccaggggagtgccaggatagtcgttgaagatccgcccacgacagcctactaccatcgtcaccaaatccgcatgtgacagtcgccgccgccgttggatccgctcacgactgtgtaccacgccgacgcacccgccatcgccgaagccgcccgagtttatcatcgctgaagatggtgtgggggaaaaatagggtaaaaacgacatgaagtgacatcctggtctatactaaaatatgcacacagctcatatggaccacataggtctcatcctaatttattataatgtgggatacatcttaataccctcgcttttcatatatgaaggtaacaatatacctcagtggaacctgtttgggatccaccataagactaacttaggaatatatattgctgatgccctacgcgaacatatattagctctcacgcaaaagctgtttctagacatgctataatataatgcattaattatataaattagagaaagagaaagaagaaaaaagatagagataattttatagttaatccatattatatattagctctaatataaatttatagctagtagttacctctacaattaaacttgctctagtcatggttatgaggaaatacaggcttactagtgtttacatcctctattataatggcactaccattacatgcattgacgtatggggcaataggagggtgggaccaggggcagagctagagtattgtaggagggtgggaccaggggcagagctagagtattgagggaggtacctaggaatccggtaaagaaaaatttgtagatatacctgacctattttcaccatgtgtgcaccccctcgatataaatttagatacccatattagtttaaaattgatataaagcagagtaaattaaacaagtggcactcccctccatctcgctctatctccgcctctgggtgggacccacatcggccatatttggtcttgaggtatccacttcaaaagaaacttctctcaaactaccgataggtggaagagggcgcgttatcgatgtgaaatggatccagagggatctcctcggcataatggttcgtgtatatattttacaaaaacacgaaatcaaagttggggactttttagtccattttttccaagagtctccgctagttgaaccgcgtccagtagacgacctcttccgctcatctccttcgtcaactctttgatagggatactataacctaggtccctaaacttggaatggatggcggagcgtattattgtaatggtactgacattatgatagaggattctcaccccacttaattactacacttactaccctgaccctgttaattttggtcataaggtttattcattcatcttaaaagaatattacaaacacgagaaaatatacgtacgataaaacaagttgcagcagaatgaaagtacttcgacgatggttttcttcaataagacaaatgatcaaaatatcacgtcaaaaattaattacatcatctttgatttatgccaaaacgtgccttatagctttagctttcggggcaaaactattgtttgggctaacaagtagtaactcttctagaagcaccttccgttctagtcacacatgaccatacagagctgcacataaaacctctttcagagttcatattaagtttttgttgatgtgaatccggatttaattcggtgtcaaactttaacttcaacaaaaccaattacgtgtcaatcaaaaccactatcataaacatggtacaagatgtt

SEQ ID NO: 9185 - DNA, 42530 bp, Oryza sativa
  unsure (1)..(42530): unsure at all n locations
gggggggacgacgcctgcggaggagacgacggccgccgtgggggaggcagagggctctgcgccgggcgtgtcgcgtgggtcgcgcctcggttggggttggggatcgaacggtgacacggtactaggcagaagggatgaaaacagatcgaatacggtcggaaactagctatatcatatttatttttattttttttctcggaatcgaaatcggaattggaaacccgaatacgaaaacggaatcaaatattatcgaatgcagatacagagtgaatacgaatcgaaacgaatacggtaacgaataattatcaaaatatcgacacccctcaaaataagtttcttaaatcgaggaagaaatatagccattagttttcaaaaacaaaacgtcagtattttcaaattttatctctatttataagggcaaggggagatagaaaatgttatgtttacttttcatacaatttatgttatcatgaaattaaataaattaatgtgtatcactgaaattttcgcagacgcattgaaatttttgaaaattggttgaatattttaaattttgggttgaacatttcaattgaaagtttttaaaaattcgagtgattatttttcagaattgaatttttttcatttgtttgtacgtggaccacttaaggacccacatggaaaaatcaatttttccatacgggtaacttaagaagccgtatgcaaaaataaatttgaaaatttgagactagtttatctcactcatatgaactccaaattagatgattcttttttctaaatgtttctaaaatcatactctatcatattattgtgttattactgctattattttggtcattttttcttgtgactttgttttatcaactaaaaatttgaatttcaaaacttcaaataatattttgaagctgtaattaatttcagctgaaaaagtcatcaacataaaagttgtagagctcatcaagacatacaacttttattttgactatttcttcatccgataaagtgatagtaacattgttcacaaagtttacatatctctcttatatagtttatagaaccagatgagacagatgtaaattttgtaaacaatattactatcactttgtcggatgaagaaacgaccaaaataaaagttatagatcttgatgagttatacaacttcgttgttgatgactttttcaattgaaatcatttagtattttaaaatattgtttgaagttgtcatattttgaaattcaaattcaaacggttcaaacaaaatcatattgaaaaatgtccaaaacaaaagttgtagatgttgatgtgttatacaactttgttgttgacaacattttcatttgaaatcagttactacccggaaaattatttgaatttcttatatttttaaattcaaattttatatggtttaatcaaactcggatggagaaatgaccaaaataaaaatggtagatctcaataaattatacaactttgtttttgacaactttttcttacgagttgattttaatgccttaaaattcattttaaagagccacatataaaaaaaattgatttttacattgaaaaaaaatccacctttttttaccccaaccttatctactcttctcttgacccttcctctcctctctctttctcagtttctactctctctctctctctctatctctcacttcctcatccacagcggcgccgggcggggtgggcggccgcagcggcgcggatctggcgccggccacgcggcggccggcggtgggcgggcacggccggctagggttccagtttttttttctaaaaaatattcccgaatatccaatgaaaaatcccggatagtttctgaccgttttccgattccgttggatatcacccttactgtattcgttttcatatccgagaaaaaaatccgaattcgtttccgaatccaagaaattccggatagttccgatcgaatttttctgaatccgaaaattggtccggatggacggaaactatccgaaccagtttcatccctactaggtagggccggatatcgagccgtttcagctcggctcggctcgatcctcgttacgatcctaaggacatccacaatctgggacacatctagacgtagggaaactcctatcacaatgaaagatacccctagaagcccaacgagtgtccctaacccaaaagcccacgtaggtattttactatactatccctctcttcttctctctccccctcatttactcccatctctctcgtccttgccatctctccctttctcgtctccctctctcccgttctcccgtcgctgcccgtcctcgcctctccctctcgctgctcagccgcttgccatcgccggcagctgcgagggccacctccctccaccaccgtcacctctccctctcgctgcgaggccgctcccaccgccgccgcccgctgccgcgcggtggccgacggagggccgcgcgcgggacgcactggtcgacggcgagcggcgcgagggacgggggtggccgacagcgtcgtcaccgtccgcctcctccgcctcaccggtctcctctacctcgcgccatccgcctccccgatctcctcctcctcgcgccgtcgccggtcgggggcggcagatccggcgccctagcgggcggatctgtccccccccctagccagatcggggaggagatggtggcggttgtcgccgtcgcctccgactcctccccactgctagcgacaagaccgagggtggaaggggaaatttgtggagcgggagccgtgtccacgagccacgccctcctccaacacgtagccccgagcggtgtctctagaaaagcagccgaggcgcgcgttcctctgctaggggtcacgcctctctcataatggatgacccggcgacggaaagcaggcgtcgtttgcaagggcacgggttgagggtaccgattatggatggcctaatgagctagtactccatagaagtttagctcggtcggctcgttggatagctcgagctggctcgtttagctcgtgagccagtgactaaaaaatacaactgcaggcaaattggtgaatcaataagacaaatcaacaaaaacaactacaagttccatccatgcatacatatttcaagctttcagcacaaagcagcaccacttctgcaagcacaagggcacacacaaccagtccaacctttgttccattgcattagctgacgacataaggacgatgtcatattattaggtgtttgcttcgggattccaagcttgttggtgttgaaagcacttcgtctttctcctccatggtgcacacaggcctgcggcaggtggcaggatgtgcaggtgacaagtggcgtggttagctggcggcaaggggcgaagggaggctagagatggcgtcgccgcgtccgctggactgcgtgaaaaggggatcgagagagagagagagagattgattgattgattcgagagtttgagatggtagatggatagggttttggaggtttatatttgggccttatgggccgcaagttgggagaaagattatatttgtaggcctgtagactactgaggtgtgtcacgatgtgtgctgtgtagtaaggtgcttatgggctaccctaacacgctaagctcacaagcagctcacgagtcagagctggctcgttatctctaacgagctaaaatgctagctcagctcgttagaaaaatacaacgagccgagttaagctgagcagagttagtcacgagccgagtgaactaacgagtcatgagtttttcgtccacccctagtactagggtgacgggtgaccatacgtctagacctgcccagttgtcggcgccacgtggtcgtggctacaactgcaagcctgcaacattgcgtgattgtatcacaagtcggctcatttaggtcacacccccagtatgccatatgtgctacaccacccacgagtgagccactcattcccacaaaaaaaaggttcatttgcatcccccatccaatgttcgagtttgaatggtttcccacaactataaaacccggtacagtataataaaacttgatatagcgcatccctcatgttgcaaaacaagcgaaaatgaggtccattggctgtttggatgatgtttttgtcctatatgtcatgttaactttgtccactcgagatgatgtgtcgcctacgtgacaattgtataaaagcaggggcggaggttcatgttaaaggggggacccaggaacccggttaagaaaatcttttagcattagtttatctattttcatcatatatgcaccctcctcagtgcaaacttaagcacccacaccagcttaaatttggtccaaaagagagtaaagcaagcatgtggcacccctctccatttcactcgcttccaaatgtcagtaaaggtaaatatttcactcgcttcctctctagagctcctcgccatgataggcattggacaacaatggtggtggcctcctcggtgttaacagcggcatgcgctcgctggagctaggaacgaactcgccgaagcccagtagctgcaccacaacacgtggctatttccatggcggagtccaaccggtggtggcttcatacaacaaggagaggaaaagggagaggacatcgagaaggggacgaggcggggctcaacaatgtggttcatcggtgtgcactactccatcaccagcaccagacccctagctcgcctttgccacgcccacaccagtcctagcgttggacccctctccgtcctcccactgccaagtgctcatggagaccacaaaggatgcgacgccatctcgctgagcagcagtcgccccagcagcaagaggagcctctccaccaccgatggcctttggctaatgtaggtccaatcaccgtcgttctcatcaattggctcctctcatcagtacaaagggaggagacagagatagagatctcgctcctagatccatgagacagtggtggtctttgttgcgggaggaggccgagactatagcatgtggtgggacaaggaggaggaggacctggcggacccgatccgaaacaacaataatgaggtgacacaagggagctttgaccggagcctagcagtgatgttaatcttgtcctttgtcaggcaagagctcctgtaatcctgcctactaggctaaggctgaggctgagtggctcagcggtgacaggggagcaccggggagcagcggcgggaggcgttgcttcaccacctcaccttcaatctagagcagaacttcaccaccaccgatgttgaggcacacgtgtcgtgctcaaccacgtcaagaagcaccgtctccaatgtcattctctttgtccatcgcatgtggatgcctcgtcagtcaaaaccgctatccaaactgccttaggactacatttgcactagtcttgaaagatgaggtatgtgttgtatcagttttgcgcttgaggaacatgaccaaaactatactgattatctagattttgtattgaagtcatgacactttatttacggaatcactctactacgaagtgcagtggcagacacacccattggacagggcgggtcggccgacccagctacagtccgtgtcgcccccacacccccaaacatcatttcagtcatatttctaacacattagttatcagtctactattgaataatcagataaatcaagtattttaagtaggaacaaaaacatttatgaaaatttatgtataagtagtatcattttgactgtttctgattttggccatacataaaatttgattttctttctatttctttagtgtataatacagtctacagttgtggggatacccggtttgagtatagtatcccgaaaccacccgcgaccgtctaggatttcgatcgcgcatagattgatatacagaacagctttcgatacatatacccaagtttttacagaaattattacataaaagataactaagacaggttttaggggccgaccggccaaacacactccctacaaacaaaagacccaaacacaaaataggataaaaacaccacaggcaacgcttgagagcagatcgacctagaacaagaactcgtctgcaccatagaattcttccccttcctgcgcctcctcagggaagaactgatcgtctgaaccacattttatgtaagaggtgagtaccgaggtacctaacaagccacattcataataatacaaatagaatatatgcaaggcgtacaaagaatatagttcatcaaggaggttgcataacaagcctattataaatagtgtttccctactttatcaaacattttattcgcaaacaattgtaaatcatcattttaaaacggtagcaatattaatcaccatttattctcatcttcatcatattccatattttaatttaaaatctactcataccatgataaataggaatcacccaatgacatagcttcttaaccggaagcacggcacattcgaatgatttaagactcatctctgcagagactgcccagctttacccacatgatgnnnnnnnnnnnnnnnnnnnnggacaacatagccgttcgagagtcccacttactactagttactgcccagtgggatattgatccgtcctagcagtcaggcacttgctgggcctaagcaaggctagacggtcgctgctttcacgggttccaccgttgtggatcatgtcaacctggccgaagccccttccacatgtccaccccagacctgctcatagagccaccctacagtctttcatacagtgggacaatgtactaggctaagtctaattactcagtcctgtggatgggcgcaaattacatcattttccatggcataagggggtagtccttatatccggggaaagccactgaaactagcacaggcccgtgcatactttaagtgtaaatatacactttccacaaaataattataacaacatgcacggcctcacacaccacaacatccatcttcacccggaattaaacttccatatcactccaggcgagtgactcatatcaaataacacattttatatcacccgatacgccaccacgtgacgacgggtaaaccatgtatatgagtatagatatttggtggtcttatccactagaatattattgtgaagtatataaatctacacctaggttatcaaaggacgtgatatagcaatccatggatttggccaataataacaatataacaatgggtaataattaaactaacaagtttattaaaaaataattcatacgcaaaataattttataaatactcaatgcataaaataactaagtggttctctactaggtttcaatatgatcaaagattggtactgtggcttgcctcgtggaacgtggccttcggaagcttcaacgtagccttcttggtccactttagttcctacgagtccagtgggatcttcaacgcgatctaacgtacgcacaagaagaaacgaccaaataagcctataagaaaaatactataaataaaaattaaaataaatggtgaaggttggagccagaactgtggaaagatgcactagaagttctatggtttcaaataacaaaatatcactgtaaagcaggggtttatggtgtatacaagaatggacatgatgcagaggtttgggtactggaaaccggaagaaattgtgtctagaggtggccgaaccaaaggtgaaccgaaggcaaaattattgaaccattaaacagagccttagccagatttgtttagctctgtttcctgtcttatggttggattcaaccatgatggcacagtaccacgtactactgttcatcttcttcagtgagacgaacctaggggcaagggaatagagaacagggaaaaagtaggaaggtggatgctaggctgtggtgggtgataggtaaggacatcatgagcaaaacacgttctcaagggtcgcgaactcgatgctgttgttagttttcagagacgacacccacaccggccggaacaggagttccagatctggagctatggtgacaccgggcatggaagtggcagctctggtggtgaacgcgggcgggtgagcgcgtcaaaacgcgttcccggatgagaaggttccatttttgtggttagttgataaagaggacattctggacgtgttggccacggtgatggctatgacagcccatgggagcttcggaaaagctcgatacaaaagcggaaaaagagggaaaatagagaaagaagcctcaccgatgagcggaaaagttgatggtgtgctgttgtggcagaaaaagggccggcgacggtggatttggccagtgaccttggcagcagtttggagaggtttgagggcagggatgagcttgagtgctcggtgtttccagagaaagaagaagaaggagaaaaaggaagggagaatagcctctcgctaagattcgcgcaacggctatcggagatcggcgcgtggctggtataaggcggcacgggcgagcgtgtgcgagcacgggaaaggcacgaggcggcacgcgtgtagcgcgagcggccctgagcggcgtcggcctgcagcggctcggctggagccggcctacctaggctgggccaggacatgggctagaacagcccaacacagagagtgaccagggaaaaggaaatccggaatatgggctggattgcaaggaactcggcccgagaagaaacacagtgttctatttgaatttttggagagatttttgtatggaattttgataggatatttttgaataggaattgatgggatttgggatcttagaacatttgcatgatgactccggtttaacttaaaataaacatgagctcttctgatgattttgggaattttctttgggatatctcggattttgtttggtgagggaaactaaacaaggttatgtgggagtcggaaacttagagggaacaaaagaagaattgggaggctccaattcgaaagaacgaagaacatcgactttaaatattttcgcaaaaaatttatcttgaaaaatctagtatgttacaacataatttaagtaatctcttaaattacttatttatctacattctttatgttcgttgtaattaaatctttataaaaatatctcatatgattatattttgatgaaagattacaaattacttttataataatatatataattataattacttttagattttattaaattacttcttagacatgtaaaagtaaattcaataaaaccaaaaagtaatttatatatattataaaagtaacttaaaaaaagaaaaaaaaatttggctgacatcggttcgcttttgcggttgctgttttgcagcagaagcccatcggttcgctgttacggcctaaatgcgaatagctattggtagtgggccctatacatgtcgggatctatctacggccacgcatctggagtcagtgctgacgagcacacaacgcacacagaggcaggcaaagcagaggcaatgcatcagttcaaaagttcacagaagatccagtaatcagccataagcaaaacaatggaattgctgatgcttataagcatcaggctagtactgctgaaaagcagcagcaactgcaaattgatggcgcccttgtaagttgttacggcaataaaagtaaatctattgttgggataaaaacattagccagtcaaaaaaataaatttaatcagcaacttaccaataaaataaactatttataactttatgaatattttaccagtaatttaatcaagtataaaagtaatttacctatgtaatacataaaagtaatttacacgtataataaaagtaattcacaacatatatattttcctttactctaattgtgtaatatcttgttgcgatatgtaattatcacgaacataatagtgtaattggactgtagattaaataagtaatttaaaagaatattttgtttgaatattaggtgtaagcagtggcggatccatagtgtaagcattggtgtcagctgacaccggtgacttcttgctaatctctttgctcatacactctagaaacaagaattactcttaacaccactatatttgtgtaatgattccaataactctatattctgatccgccactgtgtaaggaatcttttccttattacataaactaataatatgcccgtactaacgttacggcgtaacttaatttataattcacttaagaaagaaatgataaagatagttatatatatggagtgatatttgcattccctttctagatcttgagcaaagctatacacatccattaaggaacattgtgagatgagatctaacataatggtagtgcttttcattctgtaacattatctcagattcagtcaactctgttacacggtgtaaaacatcatccacagagtatgaaataatcactaaaagatggggagcaactcaaaaactcaaacacaattagtgggcttggctgatggcagtttgtgtcacatcctctggaattgtccaactcatcatttttctgtcggcaaacaatgcactcatatagtatgaaattcatactatccctcgtaacatttataataacaattagatgcataataaaatgcaatattttcattaaaacaatatatgatggtaaataaggacgacactttgtaatccacttcttttattgcgtcctctgtgttccactgtacttcttgctagattgacaatttatataaggacaacctttcctctgatattcctatcgagaagtagctccaacctaagcagctttggactgattcaggtatccatgtcatctacaccgaacatcagcatctcgccttttacatttgttcaatttcccgcaccttcaatgttaagatggtctcaagccggccaaacacggacacctattgaaaggatccttaggctcccagttcttccaaactatttttgtctactataaccactttttgatgattaacgcaaactgaataatgtgctgcaacaagaaggaagtggcattgcaaggtcatgtactctaagacattgaataattcaaggaaataaaaattttgcaaagatgagtattatttggggaccgacaaatatcaacagtaggatatgccttcaatgtgataagaggaaatcacatggattacaagcatatttagagcctccaatgacctgaaaactacaccttacatccaaccaaagaaaatttaatagaaccagccaaaattccttgcttacatagaaaaaaggagcaggtgccatggtgtaccactgcaaattaataagtcatttggagaaaaaaaaagcaactcaacacattacctgttcacatcgggatgcaacccaaagttattgtgttcctttagccattacaagttcaaattttcttcccaactgtgacttacaaaacatcaacagcctgcaacgagtcatataattaatttgaatcagttcttttcttcctttctattttaaagttatttgttcaagggaattagtcacatgacctcgaaaaatgctattttcacgctccatttgtttttaatgtatgacatgttggttagttcaaattgaactaacgttgatgccattactgttaattacaaagaagggtatataagatgccattacaaagaatttattttcaaactcaacagtgaatctgcatattgattatattattattattattacaaagatttctattattatttctgtggctattattactatcagttcggtgacaggattgatcacaacaagtgcctaataagcgagaattccccaaagcagtgccggctggcgaatgggaggattagcggaatcagtcacactgatccaccagcatccggcgaccggtgagctggtcgtggagttgcatttgcagtgcacaaattaagcaacgaaatccagtgtaaccaatcctaatttagcacaaattaaagcttcaaagcgtagataaatagagacaggtaaagcattgtgcattatactaattctggttcaatgtgatgctgagttgaacctatcagtcgcacaacgaatatataatatatgccatcagtccacattaatatatgccatcagtccaagatgatgcaataatctgaatttttgataaacaagatgatgcaataatctgaattttcaaaaagcatttaaaaaaaactgtagcgcttgattatatcatgtttacagcatagcagcagcagaaaagcatgagcatatggataggaacatgagcacgccattctcatcatcaaataatatatatatatgtactgaaataatctggaaacactgaaaaccaataaatatgttgcacatccccactgttaatgaaccataattctgaaaaaaaatgataggttaagctaagcaatgcctcatgtatgtagatatcagaggctgagtgaaatcaacatctaatacgtgcatagagaagtcacgatcattggttgatcatccaagaagtcacaatcaataagaaacaacgatagcagaccatattcttagggcattatgacttcgcttactccacatcaaaaattccattttttcataaaatcacttgcatagacagaatggataaaaccacctacaaattacaatgcaaccccagatttccagagaattgtagcaagcatgtcaccactatgaaacaacattttctgcatttggacctactgacccacataaaaacttgacattgtcagtcaaatagtctgttatctacaaaatatcagatagatcatataattgagtaatgcatatttctgattcaattcatgatgctaccgatcaacccaataatatggtgctcatttcaataatattttcataagataagatgcttagtttaatttcaattttcctgggtctgaaatcatgcacttaattgaccattgtaaagcaggtatatagggtcattgatactgcaaactaattttgattataaaaccaaagaaattcatctgttcgcaggatgtatattataccttcttgtaactggactctgtaaactgaggaatgagacgagggtacgtcgtgtcgaggcttcacttgatcccgcagaaattatctgaaatccgagtattggaattgattcaggttaaaataccgtgatcatcccaggcgtcaatttcaggttaaataccactaaccactaagcaattccatcgtatatatttagctcggtaaaaggaccagtaaaagtaataggagaaattgttgtctgatcctaattttccaacccaaattaaactgtttttaagtggagcatatcatcattaaatttattagtctgaacttccaagatatcatcaccatacagtatatttcaccaaaattatcagctgagagctatgtcatcatgagtatgaattcaccgacaatccaatgatccctacctgcctgtttggttggagggagtttttaggagggattcggagtttagagggatgtagctattaagtgtttttgtttggttgggagacatgagaattttggtgggatagggatggagaattgagcaaggaactccctccttttcaatacctgggtaggggtaggtaattaggagagaattcctcctttactttttctaagcaaatctcagccatccgtttttattaatgacctaatctccaactaaactccctatcaatttccatcacctctaccaaacaagatattgggattaaaaattaaattcccatcttaatctcatcatcaattccctcgtgtaaactcccaatccccttccctcgagttaccaaacaagccgtgcgattgcacggatcaaaaattcaaaatcgatcctacagtggaaaaaaaacctagacaaatccaactttagccgcaacaggacagacgtgaaaacacccaacaaattaaaaaactcccatccaatcctacaacagcccaaaaatccaggcaacgaacaaaacctaaatcgccccctacgcgaaaacaatgaccgatctgagcagtcggggaagaggaggaggagacgaaccagtgtgtgagagagataggcgccccgctcctcggccagtccccccacccccccaccctccgcgattcaggccatggaactcgcttcaatccggttgtgagtgctcggaatcggattcgccgaggcgaggcgaggcgaggcgaggcgaggatgagaggatcaaatggattttgggggaagccggaggtggaggagaggcggaggcgcggttgccattgcagaggaatgaagcggagtaaggggagatgattgattgcgctatcgatctcccaccgcgtgacctcgcatgagcccctgtcgttggatgtgaaacgttggatgatttttatccgttggatttaatgaatgaagtatctatatctatactaatataaaaagcaccagttcatcaaacacctatatatatatatatttatttattttttacccttatatctatttccaacggcttttatcaaaattggatcaatccctgcaattagcgatccacacagcggttataggaggcgatcgattgcgagaaagaagcgaaaaagaaaaaaaaaaaaccttcgctcccatcccataactcccgtactgcgctagcctaccgccgcctcccggagccgctcaccgcctcctcgcacgcgcccgccggacagccaggcgccgccgccagctccgagcgcgtgcccgccggagccgcgccccctaccccgccgcctcctcgcgcgcgcccgacgctcgccctaccccgccgggttcgccatcggccggcgccttctccaccgccgctgccgcctcctcgggcacgtcctctggagagctggggttgccgtcggccggttcctcctcctcgcgtgcgcccgccggggagccgtgatgggttacggccctacgcagcacatactccaggttaagttgatgtcctctcttcctataaatcctcaaacaataaagattttgtgcttttattattttgggttcagaaaattgtttacctagggtttgggcagatctgtgcaatttgtggcatggggattgatttggcttttcatgcaagaagagaaagctccccgcaaaaaaaaaaaatgcaagaagaaaaagcactaaaaacattttatatagagatgttttagtttaatctatgatgggaagccttgcaaccattaatttcatattttgctgaaactgagtgacaattgattattttgagaatttgccagtatatcagttccattttagaaagcatagaaataaaagagctggatttgggacttcatttgatttggggttgatatacggttatgtttcttagatttgagtgggaatttttgtttttgttcaatcagaggatggaggataatatgatgtgcccaatcaaggaccaagaaaccatgctgtgagttggccaacctctgttctcctgcaattacattttcctttttgcagtagatcttgcttccaattgattttgtagggtagtagcaatggacatgaacaggcagcaggatacggtttgctccaaggaaattttgcagcaccgaaacagtactatactggctagcatctcttgtttatttgcattctgatattctttttatcctgtgggacagattgatctagtctacgatcgaatgccacaatatatgtcaggcatataacacaggggagtgcagaaatcctgttattttcactcaatctggtaatctgctttaattcttttgctattctttgccttgaccatgtactggattgaattgaagatgtttatttcagcataatttttgttcagggttataggattgaaattcaagtatacaagattacaagattgcatataattgaaggattggagtgatcaatgtctagaattcaagcgtgcaagacctgctgagccgtgtcaccattgcgttgcatctgatctaagttggcgttcttggtttaaattgttgaccggtgtcaatgctaatcttttaccaactttttacgcaggggcacttcttggatgctttgatcttatgttcgtttagtgcctctcgatggctctacaagttagccatgttattgtaaagcacagtaactgcttgaatcagcccacaccacaagacaacgagatgctacatatatcaggtgcaaatgcaggtattgacttagctcatgtgtgtctttttatgcaaaatttgttttcctgcaagtgatatcaagatttgaccacatggcattatcaatgtaacagcaaagaatgcgggacaagcttgtggtatatgcatatgtagctgttgagctaatcatatttcactcaaaccggttcaagtagtcttccaaatttctctctatgctgaaacattctgctttatggttgagctcacatattttggtgacagcagaattctgttattctgaagcataaattttatgtcatgtgttcaacgagtccaatgataggaccataggaggctacataaactgaataaattgaatggcatcatagttaactatctccggatggcgctccatccatgcgttcatgtcgttgtgcaagtacttatcattgagtttcttagcaatcatgtcaacatttagctatgctggcaaccatggttgtgtacttgtgttagcctgtaatgtaaagattcatttccttttcatctgaatcaacatgatcaactcttgggtagattctttgtcaaatgtacatatgattggagggaccatgtgtgatttatcattcaatcagactagcaagatgttggtcagttagttctcatgaatactgtcatttagctatatttcttacctcaggaccatattcctgtttatttgtcactacaattcagacttgcatgtcataaaaaaaaactttgatatcatattagactagataagtgagctgtcaggagcaagatgttctctggttatgtatgtgtttgatgtcagggactccacgtccgcccatccgaagaggagcctggggaggaggcgtaggctggtggctgcggttgactggtatgcatattttagagcacatgaaggacacaaacatgacattggcgcagtttccataacctcaacttgtgatcaaagactgaaaaatggaatgaatggacaatgaagagtgtgttcccttggttttcatggatagaatcacacataatttgctaggaatttcatcgaacatttttgaacacgggaaaaacggcgctggggaaaaacggcagtgttccagcgccggatgtgggagtgcccaatctgacttctataaatttattcatgtagaaaggagagcgataagtttcatttgacgcaaccggcctcgactccaacacttcttcctcaatccaagtctcagccagattgatacccagatagactcccctcccaacagctccaagtctcagccagattgatacccagatagactcccctcccaatagctcccaacagcatgacatgtgttgtgatggcgctctctcacatagcgtaattcttctccaataacctcaacagctaggcgtgccggctcaagatccatatcgacccagtcactcatcctgggggcttttaactatttgccacttttagatttggtaaataactatttgtcactcctatctcaatgacacgtggttccacatgtgtctgacatgtgggtccagtgataaaaaattaattgctacatttaaatgtggcaaatggttaaatatctctttggtaggcccacccatatggccaagagtaggcattagcttattgttattacggctaaatatactcctcttcaaggtgcatgcacatattttatttttctgtttgaaatatacaaactaatatagtaccaaatgtattgatctatgttgatgtgcatcagcgatggatgtatttttctttaatttactctatcagtatatatcgacgtgccttgcaaggtaggcactatgtcaacaagttaaatagtttccttggtgtactactctttgaaaacgttattttggttcatctgtgtgattatatgaagccagggcctgaccgcctcacagattgttaatcgatcttgaaacaaaaaatgaaatctgaaaattatttagcactttaacaattatattatgtgttttatttattttattagcaacgtggattccacgtgcacatttactagtgaaggatgggtagatgtgtagtcctgcacaggaaacagattcatgttattttaacatttgtcgacatgttaggtagttagcactaattagaacacttgcactatatgtagttctgtccttaagagttgaatcaaagcttgctttttgattaatggttatataagatatgtcaccgtggtcgcatatcgatcttagggtgatttcgcgtttctcttcgtcgagctatgtctcggctttcgggcttggcctagcgtgagtcgcgttggtgtgaaattgcggaaaggagtacggcatgcatgcagtacttacaaaataatttttacaagggccataacagtttttttttaggctaccaaatactccgctagtatctaaaggcctgcgaaaattgactttcgcaagcggtcataggtctacttgcaaaaatcaattttagtaggtgggcccattaagaagaccgccggcgaaaagtatcttgtgccaaaaaaaagttttttcacaacatgcaaattcacatttaaatccgcatcattgcaaacacatagttcagagagttctttaaaatatactccctttatccataaaaaaaaccaacttctcactacgaatctggctgtaggctagacgactcctcttagaatgtgtgcctcgcgggagccaaggagggcagcaccggcacaatttttttttatttttgaacttttttattttttagtttaaaatatagacactttcaaaacttatttccataatctgaatctttggtgacactagcatgcctggtataataaaataataccgacacaccacacatagtgggtgtggtagttttatactatcactaccacgcgagtgagagtggtgtgaccaaataatgctgtcacaccagccagatcagtgtgataatgttattttgccacggctaatgtggctaaaagattcagatattggaaataagttttaaaagggtttattttaaaattaaaaatttaaaagttcaaaaaataaaaataaatccaccggcatagcgctgtctccatgcacaagagagaaagaggggaagttagtacaacaagaaggttaattagggactgacatgtgtggccaataagaatttcttaaagagaaaatttgtttcttttgcaccaggtttagcagatactttcattttacaccaggattcaataatttaaatttcacttaacaccaagatacgtcattaaatatacaagattttcatgacatttcatcaattttgaataaatcctcatcaaacatggtctaaattcaaaaaggttttataatttgtaaacatattttacaaggtttttctttaatatatgatacaacccccagtgcaaagtgaaacaggtacgctttacccagtgcaatgtgttatttattctttattaaatttagttgatatttggatggtataaaaccattttagcattttattttcagtttggcttcgtagagtgttgtgaaacctgtagcacgacacgagacatcgaagggtttgtcagcatatatctgttagaaaaccgccggcccataaaggcccgacccggttactcactaattggacccctcactaaacatggaaggtggaagagggaatgactataaatagagaagtagagaggaggattgtacaggtgaatgagaagatggccacaccctcatatctttgtgtaatccctcttggactaccttggtagcatgaggggttgcataatacgttatcagcacgacagtctaccggaggtaagaactcgtagatgaccgaggaagaagaagggtaataactcgtagatccgttttgcatctcgctgattcaatcgcgaaaacgacttcctctccctattcccgttccatttttgctgttcccgacgaaatccaccgcagcagacttggagtcgccggcatatgccgatcggtggaaaccgcggtcggcaaacacggcattagcgtgccggcgacgcgccatggccgcgaacccgagcgtcgcgacaccacggccgcaagatcacaccggcgacgcacactggaagcgctccgtgccggcgtgcaccgggcagcaacccgcgccacggccgcgacgagactgcatcaggacgaagtgctacgcactagcacggcgcctaagtcgcagccaatgctcgtgccgccgtgcgttgcactgagacgcactcgcactgtgctccttgccatgaaggcactggccggataggacagagaggaagaagaagaaaagaaacaagcagaaagcattagcgtagtattgacacacacaccagtgtctacgccgccgcacggccgctggcctggccgcagcatgtgcagccgcgcgctgccaccgaccacgtcggcgcccggtctgtcgcgccgcaccgccatcggctgccacgccgcaccgaccgtactcatggcaaccggtgccatcaggggagagaagaaaggaagaagaacgaaaaagaaaaaggggaaggcgcagccgccgcacggccgtccccccgccggccgtcggctttcgccgcgcaacgctgcacaccgtcttcgcgcggcagcacctcaccaccgcacgggcgcgccgccgccgcatggcatcgccgtagcccgcctgcgcctggtaccgctgcccggctgagccacgccaccgcaaggccaactggccaagctcctccgccgcaaggccaagcaccgccgccgcgcgccccgccgccgcatggccacctctcgccgccgcgccgtgccgcgcggctgtgcgccgctgcgccgtccttggtgccgtctcggccgcgcctcgccgcacgggtgcgccgccgccgctcaccgcgtcccacgccatccgtcagtaggcgtcaccgcgccgcgccgccttcgcatggccgccgcgcgcctcgccgtcccgccgcgccgccccgctgcgcgtcgcgccctggccgccgcgcgcccgcgccgctgcccggccacctcgccgtcgcatggccggccgctgccacatatggcaggagccccatccgggggaagaagagaaggaggaaaggcaagaaaaaggaaagaaaagaaagaaaaaaagaaaggaaagaaaaaagaaaaatggaaagattcccgtgattttgcaaaaagacccctgaagttttgcgaaactaagtgcattttcctttggataggaaatcttgccttttgaacccttaacttttcaggaaactcataaatagccctctgtacttgggatattcgttcgaacggcattcggaatttgcaaatatcaccaaaatcatattctcgcataaaaagggaccacgggacattggatttcgaccccgactttccatttcaggtacctttattgctgatatatatgattatgaaatttatttatcgcatttacaattattaattatttgtgatgttttattacttttaattaatatcgttgtggtaaaatgtatagaattgcatagaatatattggaattatttgcaggaatttttgtgtaccattatattgcaacaattgtgcatttttacctgaatctaattttacgcatatatgaaaaaatgacgtgcatcgcgaattagaaaatttgccgaatcttgaatatctttgacatatttattcgatgtcgaaattacaatagagcaagaagctctatgttaccgctaatccaatcgtgctataggcattgactcgatgagtttgatctagtatttcaaactctcgctagtgcctccaagctgctctcatgaatgagtacgctagacgaatgagcgcgctagcatttagaggattatggtacataccctacctcccgtagagcaagaactataagcaagaacgggtatttttcgactatgattcaccaagcagatgacccatagagagtatggtaatacgatgcattgcattggcattgaatgccgctgaaactcttaatgttctacccgaacgcgatgaaagtcgcacgcaagtatcactagtacacgtataagaagtatgcctaactagttgataatggaattacgtaacgttcgggatagtgttcactagaaaaacattgtcttccaaaaccaactagcatagttgatagcgagttcaacaggagtagctagcttggtgtacttacctcaacgaaagaaggggaaaagggggagtagaacacaagtcaagatgaacaatctagaattatgaacatgaaaagaaaaggacagatcctaatagcacaatcatcatgaattgagggggagaactccttagctatttgcatggctatggacgtagaatctcctatgctagattggatcggccctaaaatttatgtcgggatagtaaatcattgcgatagctgttgagtaagaagctcgctatgaagttaattgaatccgatgtagcggaatacttcgttgaatcaataaacttcgtcatcacatgttgcaattcttgaatagaacattgcattgaagaaatggtgtttgcccaagtagagcacatattttccctgcaatagagaattatttccagtataaaatagtatatttaaggcatttactatcttgttgctcttttctagcacatagttataatgctttgaattttgtgtagcacccaaacataaaagaaaaatgaattgtggtccgcataaccacaaataacactttaagagaaagaggtatttccatacccatagaactagaaaaaattatgatcgttactagtagcaacaactaaatttgtcggcctagaaagtgccacggtcatattacctatggaacaaatgatgcactttatagaagcatccattgtccgtcaaccccgttgaactttctaaaagtgtgatgatttgggctacaccttttagtaacgaattttcagccatttgggtcttagaattataagaataaatattacaactcgtatggtcatagcacttacatgcataattttcctaaatcatgaagacttgtgtgctagtatgcaccaacaggagattaatgcataaaccgcataatacaaaggtatagttcctgcatccctgaactggattaggaggaatatttgcggtcctatttggtactatatggataaatgcgcttccgaagcagcaaacatccagtgtctcttagacaccgtgtctttgccaagactgatccagcaatatcacgtgaactccaatataactcactaaatcatctttagaagtccgcgaggacaacgctagcattgtatttgatgattggtgaattggcagcacgaagtaccaaatatccgcataagcggactaagtataagctatgaattgcaatatttgctatatcattgttgtaatacacgcagtagaaaaggacatgtagtcctgaaaacagcagactctgatagaaaattcagaccatcgtcatgaactttcattctgcaactagtgctattgtatctgttttggtttatgtgcatatcccactaccataatgcgttgcaaaaggctctctccgaaagtcggaaaccttttacgaagatagttatgaagcctaaattccttaacaaataagaattatttccagtcatttagggggagagaatgaacccctagataggaaatgtcaggaaatatgatagtagaaagggactaatgcatgttacaccgcactagtaaatacagtttgcataaagaattaaaactgccaaaccactttgtaaatacttttgtgatttcgaagagtttgactaagttgcatgaatgcaccggaggagggttaaataccgaagaaagtaaatgtatccctcatcttgtctagaggcctcgaataaaaacaattggacaagaaacttcagctcctcatgaccctaaagtaaccggagacatctggtgaaaatagggcaagagggactatcatactcaaagtcacgaaaagtaccccaccaaatagaaggggagccagttgagatctggcaagtggtacggaacctcagaataggcgtgctgcaccttcccatcaaggaagaaaactagctattcgagtgcacactaacgctggtacatgcccacattaagaagtattaagcaattataggaagaagaagcatatgaaaatgcaactcctcgtatatccatggatactcgcatagagcctcatgcaaccaataggagttggcaatgagacctatcatgggcaatgtctttttttaagacaacaaaactcattggcagtcaaccaggagttgaatggaattaataaactagaagttgaaaagaagaactcaacccaaatgttgataagcattgaatatagaatcaataaatgcactttagaagcttggatcggacacttgcataatagtacatgaagaagtactaagtcctgaagcaacatagaacaaatagagtaatttgaaaaggattgaagaaacaaaatcgttcattttgaattagaatttggcttcatttggaatatttggctgaacccaaatcatgcttacgcttgcagctaaaggcatgcaacatatgaaagtctagtacatcagtccaactgcactttgaaatgttcatggtgcatggcttcggaatagtcaattatcgccaaaatgggacggaattcccaaacacaagagttatagcagcacatgaatatttggctaattgaactaaatcgttgaactgttcagtgcctcggcatggttttgagagatggttacccgcgacagcaattgcgatttgaaaactatctcaacccccaccatttatgatattaaagcagcatatgtcgcacatatgcaaatgagttacgtgagaagcaaactcactaagcatatgaacccccaagctattctatgtacatgaattgcatagaagcaacgaactaagttatgtggaagtcttgcagattcatccgctcattattgacatcttctctcttgaataggtgtttccgagaaatcggaataatgagacttagataaatgcaaaattcagggggagaattttgctgactcattcaagaatcttgatatagaaaatcaagtacccaaaaatcaatctagaaagattgaacgaagaattgggtggattgtactccttttctcttggataagttttcccagcaatttcttatcaaggtttttaatgaggcaattcatgcaatattgcaagcgtatgctatgtactctttccctaaatttttcccactgggtttttgttgagttttgatgaggcataggcatcacgcagtgagagcccaaggggaagtgttaggaaaccgctggcccatgaaggcccagcccggttacccagtaattgggcccatcactaaacatggaaggtagaagagagaatggctataaatagaggagtagagaggaggattgtacaggtgaatgaatgaatgaatgagaagatggccacaccctcatatctttgtgtctccaacttttgttatgcaatccctcttggactacctcggtagcaggaggggttgcataataatatcattgtacgactcttctgaccaaatcacgcgcataaacatgaggatttttttaacgactcgcacgagatggtgagaagttctattcatagagcagaaaaaaattacaacattacaaccctggagggtcgtaaccaggaaaaaggaaaaaaatataccaccaccacataccgacagcatcaacacacaagtctaggagaaggctagcgccggaccgaccgccgctagaccaacaaaggaacacagacgagggggtgccaaaacgacgtcttcaagaagagaagcgacggaaaactgccgccgctgtccgttggggcttaaaggagccaagactgggctttcgcccggcaaccacccttgaggggtgagacagcatgacaacgccctcaggagggggaattaaccattgttgcgctccggcaaaggccgagcttggttttcacccgctgctcaccacctgcgaatccacggttgacgcaccaatgctccaccaccactcaacctttgctgatatgtgggacccctgcaccggcgccccccgctggcaagccttcgtgcaccgaagaccgcgccacacccaccggcagctcctcctcgcaccaaggtcgcctcctccaccgccggccgcgcctctcgcaccaaccggcctcctccaccggacgtgcctctcgcgccaatccggcctccctccatcggcagcgcctctcgcgccaagccggcctccatctccgccgcccgtgcctcttgcctagccggcctccgctgccatcggccgcgcctctctgcaccaagccggtctccgacccctcctccatacgctgccgtgccggccagatgcagccatctgccacgccctcagctagccgtccgaggtcgccatgcctcctcccacaccaccaccgcagccgttgctgccgacggccaccttgccgccgtccagccgctacagcgaccgtcgccacaagctccgtgccgctgcctccgccgtgagtgcgccccgttgccacagcagccggcagccgccactaccgtcgaccagccaccgtgatgacgccgccgtcaagctgctgctgccgctgtcgccatcgccctgtgctcccgcgccgttgccgtcgacgccgtcgacgtgagctttgtagtgccgtcaccgccgcaagctcgccccgcactagatccgccctgggggtaggggggacggatccgcctccggcgtgactgagtcctgcctgccgtcgccatcctccaccaccttccatccccgccgccatctccatccccgccgccgctggcctggactccgccgcctccaccaccactcaccgccgccgccgctcctcagccccgccgccatcacctcgtccgcctcttccgcctgcgccacggcctcctccaacggcaactcgatctcctccgccggcctttgaagtggcgcggccggcgccgctccctcccgacttggccacgagggggctagatttgcctccatcggcgtcggatccgtcgcctccggccgccggcggcaccgaagaccaccgtctccgtctctctttccgttccccgtcggagctccatccgccgggaagaggtgcgagggagaagaaggccccgccgccgctgtccttgccgccgcccggctttgtcggcggctgctcgggcggtggcgaggcagaggaggcgatggagcgaggtgacacgggcgctggctaaaaacatgaggattatctggttacgtaaagacgccaaattcttagtttgttttactctgctaggtagggtggccatagcggcgtcaaatatgttatcatggattactttatcttattagtttaagaagttgtttgaaggacatatataacacattgttgggtaggcaaatggacatggaggtgctttcttcgttcttcgtatcctcattgaccgcatgatccatgtgcttgcgtggaccaaatactactattgtaattggtgtggctagtttcctggaaagtccagcactgagaacaagttcagcagttggctgaccaagacagacacttgtgtttagggttggtttagttccccaaatattttttctcaaaaacatcacatcaaatctttgacatatacatggagcattaaatatagataaaaacaaaaactaattacatagtttgcatggaaatcgcgagacgaatcttttgagcctaattagtcaatgattagccataagtgctatagtaacccatgtgtgctattgatggcttaattaggctaaaaagattcgtcttacggtttccagatgagttataaaattagttttttcattcatgtccgaaaaccccttccggcatccggtcaaacatccgatatcacacctaaaatttttcttttcgcgaactaaacacaccattaatctgagacgatgcgcacagacatgtttgatcaattaatcctaattaacatcaattaaaatctggtaacatatatacacgcagatgtacaagaggcgtatgacatttagcatttattattcgcatctatatcgttctgtgttactcccttcgtcttaaaaatatggtaacttttgcttttcaaaatttatcacatattttctccacttattcaataatctcaatcaagcattatcatctctcatttaatttttctacataattttcatttcattccatcgtaacagtgcccatttaatttcacctaattacttataatcaccatataaaactaaaacaaatccactaaatcctatcttgttatgtcggagggtgaactcctctgccagggaaccgtgaggtccccttttttgttcggccgggggcggtgactgagattcgaggactctgtggtggagtgtgaacaagagagggtcgggcccctcgggggagatgagacaataggggtttatacaggttccggccgctgagaaacgtaataccctactcctgtgctatgctgattgaggaagagagattacaagatctctttgttggagtagaaggtgttgatgataagaggcaggagactgctctcgtgaaaaagcgctcatcccctccctaagtaagcttggacctccttttatatctcaaggggttaccacatgggcccatggagcctatcttggaagtctcttgcatgcccgctgcagcgtggggactgtcaaatcatgccgcctgacacgagggacgcccgtgtcattcgccatttaatgggtgaagacttttgggttctcttcacaccgggaaacgagaaccctgcttgaccaaaacggatgaaccagctccggctgggaggagaggctaaaagcctctcatcatgacgacgtgacggggcaaggcaattgcacgccgcctgacgcgcggcagtgcgtaggcgcactaccctagtcccgtcaatcattcgaccggtcacatacctgtcaggcgtgttgcacgctggcgcgcccgttcggtccgctttaaatgtggttaagtgggcactgtgcgcacccacccaactcgcacgtgtaggctgatgcgctgagggggttgggacgggtccgaccctcgagcgaggagggggcagccgccactccaccccgggcccgaccctcctcggggaagtgccacgtgggtctgggggcaacctcctccctccaaactcggtaccccaagctgggagggggcagccgccgctccaccccggaagccaccccctcaggggatgccacggggattcggggggcgaccttctccctctaaacatgatacccccggccccatatcaccgatatgctataaagcaacaacccactaaatcctaaaattgaacacacaaagatgtcacatcattatcctttaacaattgttaaatataaaatatcatgcaaacaagctatattatttataattctataatttattaaattttagggcttttaatgtaagtatgttaaatcactacccaaataattcacataatatcttaatatatctctccatcgtttttataatatcatatatacctatatagttaatcttattaattaatgttatttcactcttttcttattaagccatatcacatcaattgtgcttaacccttattagatgattaatgtgtggtctaaattatcttcctcattttctcattaaaatatatcacctcaattgttttagcctttagataattaatctacggtccaaattatgttcctccttttcttctctcataattccatgtcaccttatttttgcatttgaatcaatattccatatactgtttgaattatcattctatatactattgttacatttaaattatcataaaccgtcaacttatataagcttatatcgtttaactattttacgtattattttaaattattgttattatactaaattcctgcagaaacacgccgggttttacctaggagacgaaggggtatatatgtcaacttgtctcctcgctgttcctttctctccgcttatctcttatcttccatgtcagcaaaaataagtaccacaaaacaccattttaatcggggtcgtgcgtgctcaaatctgttagtgtaaacaaaggccacatatatacgatagatttgcattccaggtagcatatgagcatatgtatctatgcatcgcttttagcagttttagcggggattgatattaaggtaaaatattttaatgcctctaagatcctacttgactgaagaaagatcatatctagccatgcaacaaaaattacagagaaccatatgaagtagttggattgagaaaaacagtatttgttgacatattttatatgctagaaaagtttatatttatgaacagaggagtatgagcaattttttatgtgtagatgatcttgatccactactcaacatctcgttatcacgcttgctcctccaatccaatcatgctggtacctttcacgcgagagaggtttttcttgttctgcaacttgtagacctaggtcgtccataatctctgcacactgttcagctacattaattccaagatatagaaatcgcagtctttttttccaatgaccaatttgcaaaatttaagattcgctagctagctagctcttgtcatcatgcctccaatcagtctgacgtggacgattttttttcttttataaaattatttattttggcaaaaaagaaatggacaagaatcaaagatggtacccacccacgcacgaggctcgattgatcgaagacaaggaagatctggcttggaatctaataaagcagagagcagtgacacgatcccgtgagcatcaggctcactgttctctcactgttctacggagaggtctttgccgggtatcatggccaatttgagctcaagtgtgtgctcttcattgcagtcttgtctctgctggagacgacgacaatggcgataatgttggtagagagatcaatgtcggaagggaactgggatttgatgttttcttttatcttcttgttctctatgatgggggcaggtcgatagatttacatcagcacgatttttctcccattttgcgtggatggagatgaagggaatcctaatgagggtgtcgaaccaggagaagtcgaacgaaatttgcggttttattctttttatttttaatggttattatggatactaaatgaaaaaaaagagtaaatatacgaacttgtcattttggtgcaatttagtatattaacttataaaaatcttatttttatacacgaacttgtttggtaggtgcaaaccaagatcaaaatagcatgactaggctaattttgcccagttggatgctaattattaggacatgatatgcacgtgtgaggtgggcatgagacatgttaaacttggtttctatattatccttcttttttatccatccttgcatcttagttcttctatgtctttctttatacaatatttatgtcttattttacatttattgaacatacctatgtttatgtggcatcttctcgcatacgcgtttatgtcgtatcctcatcaacacttaaataagagaaattagccatatcgtattcttttagccttggttcgcactcaccgaacaaatttatgtattaagatgagcgttttacaagtttatatactaaattgtatccaccttattagttcatgtactaccaaaacaatttatagaaaatgattgttgtaacttaacgggataaatagtgtgtaatctattcggactctacgcaacttcaacacggggtaatctgatgagtttcaaaaataaatagagataatccgttcaatccaatgcaacaaaataattttaaagatggtttttgaaatggaggtggtgggaatgggagagggatgatgaggatggctatagagggctgggtcgacggtgaggtgctagagcagtgaggatgtagacatagttagcgggaggggaaaagatatcagagatgaggaagaaaggtgacgtggtggtgttggaagatcataaggaggagcaaggaagatggtggggagatcttggctgaagggctcatcgaagtcatcgaagccggcgcaggtgttggcataggaagaaggtggggttagggtcatgatggtatgctgagcagtgttgattttgggtaaatagggagagatgagagctcgtacgaatctttaagcaattaggctaaatgttggttcgacgatgggaaaggcattcatcaagaggtcaccataatatgagagatcaccttaggaaaaaaaggaaaacatcacactatgagatattccccgggacccaataatctccattgatcctctcacttgtgtctgtgtactaccttagaagttagaatatatacatatgttcagtactaaaatatgttatatttaattttagggtttttttatgggatgaaaggagtatatattacggtagccactggaggctccaggtgccgtggcgtgcgccttgtagcggcggcgcccttccacgtgcgcagaggccgccagccggcgaccactcgcacacccaccacaaccagtgatcagacaccacctaccgcgcgcgtcgcgtactcgcgtgcccaaccccttgcctccccgtcactgcactgcaccggcgccttctcctcctgatcttcccagataaatgttgataaactacggcaatattgagtcatcaatagcgatcaccggaagaaggaggacagagaagaaaccgagagctagcgagaaaaagtccaacaccaaatccggcaccccccgaccaaaatcccgggcgtatttaaaacgccctccctcctcccttccccgccgcgacccacgccacaaccccgtcgtcgctgcgctgcgcgccaaatcactcgttccaccgctcgctctccctccctctctctctctctctgtctctctccccctcgctttccccgctccgctccattccattccattctcttctcgccgcgtacagattactactactactgctacagtactactacagaaggctcgtcgaccccttttgatggcggcggcggcgtcgctcgccgccgcgcgattcgccggcgaggcgtccccggcgccagctgcggcgggggcggggacggggacgtggcgggcgcggtgcgccgggagggtggtggcgatgccgatgcggcggcagtgcgccaggggcgtcgtcgtgcggtgcgcaggggcgggggcggggcggtcgttcggtggggcctcctgcgggggcgggggcgggggcgggggcggggcggaggatcaggaggaggaggggacgaggttcgtggggtggtttcgggaggcctggccctacgtccgtggccaccgggggagcaccttcgtcgtcgtcgtctccggtgaggtcgtcgccgggccccacctcgacggcattctccaggtatcgcctcgccctgctctctcttgtgctattaaaaccaacgatttgaatttgtgtggatttgttctttggtcgaatccgattcagggggcaatggaaaaaccgtcttggagaaggggcgattcgtgaaattgattaggaaaccagattattagcagatgatttgtgtctaccgacttttagtaactttttcttgtgaagttttatttgttccatttaagtggatggaatgaatcgatccatttcatactctgtagcaggctgtgtcgctgcctgatttcattacatcacagataaattttagaccatttgggtggcgtgtcccattatgggttttcattgtcgcgttgcttcaccgggtatcacttccatcattgtactgtttttgtgcttccatgagatcaacatcgttggaggatcttaggcgcttattcgatctgttagggaaaggttgaggtaattaaagttaacaagttccgccctctctattgaactaggaagatagataagattattagttgcacgtgtgttactttcccttgtttttttcaccacctatttcagtccttttcatgtgaacgcctccgttgaacttgtggcaaaatcttggataggttgaccagctccacttgctttgctcactgagaagagcttattaaaaaaagtcatgttgttttcataaagattaaaataaaagaagacatttctgggctatatataactaacttactgaaatttttcatcttgttgatatcacctgcctttttttggattttatcattttttttccttgtaagtagaatttatcgttcttgagtttttcagtcttgttgttttgttaattcaactcaaagcaagttccatgcattcttcttcttgtttttttttttgggtaccaactggtgacatttcgtttaacttgtctggtcctactattttgcaagttggtgtgatcaaccttatacatgctctatgtgcgtggtaggtaagtactgagttccatttttcaggtcaaactttctagtgtgcagttgttaaatgcctatttctaccggctacaggtttagataaagacagtgctaataagtatggtacatctaattgttgcttgcattggacaaataatttgttttgtcccgtctttgtggccattatgatggcaaattcccatgttcagttgtttgcccttcgtttccacttcccagtcaatattgtcctgttaagattgttataccagggttatatgtaaggtcgtttcgctaggtagaagagtttgctactttattttatgagttatggagatctgaactgttattttttcccctactacctgctaaattacagttgttttaatttacaggatatttcacttcttcatggtcttgggatcaaatttgttcttgttcctggaacacatgttcagattgataagctcctatctgagagaggttagctgaggctttggctgtttacacatgtatgcttaaatggatcaaacaactgacattgttgtgttttacaactcactagcactaaaacttttttagcataccctagttttcttttttgctttctacattcattttttgaatactagctgaatgctcgtgctttgctatggataaaagaaaatatattaccatattgttttaaatacaaaatatatattttccatgattatttttctctctatagggaatattcaccttaatttgaatttatatgttgttacccatttaggtttgattgttttttaatattaagaagttcaagggggtgtttgcaatgggagtaggtggggtggcagattcactaccaccaccactacattcttttcaaggaatatagatatagatgttatttttgcatgttgaaggaaaacatggtatggctagattatggttttttgcatgtgcaaagcaaaaacatatagcgagtctgacttaattattttatacattcattagattatgttgcatatgcatgtacgaatcaaaagcatttaccaagtaggcaactagatatttgaatacagtaatttggaataataaaagtaccagtagggaattccactcgttattactatagcactgattcttaattttatagtagtttttgtcattttgtgtcaatatacataaaatccaggactccaacagcttctgcttgtattagatttgcagttgatgcctgcatctgcaacctcacataaacatgcgactgttaattgaagttaaattttaggataatgtatgattttcccagtctgatattctgccattcacatgctagtgattactgaatgcccctcttttgttttctcagggaagaaggccaagtatgctggtcgttaccgtattactgattctgattcattagaggctgcaatggaggcagcaggcagaatacgcttaactatagaagcaaaactatcccctggtcccccaatgttgaatcttcgtcggcatggtgttaatggtcgttggcatgaaatatgtgataatgttgcaagtggaaactttcttggcgctaaggtgaatatacatactgaaccttccatcacttctaggatagtagaacgaattgagttgatttattttctcagccgtgtgcaatgaggacaatgatgactgtcagataatagacgcatagttcaataatacatgaggtcttatacaaattaatagctattgaatccaaaagtggaattaatgtttgcacttccattcccaactgtgtaatgtgaacatacttaagtgagaaagtgagactcaaaattggcaattagtaagcctctctagctagcaagtcatataaatccctttgtttcaattgtttcaaaagataatttttagtcatgaaatggtgaattgatttacctctctactcttttggcagagacggggggttgttggtggcattgattatggattcactggtgaagttaagaaaatagatgtttcacggataaaagaaagacttgatagagatagcatagttgttgtgagcaatatgggatattccagctctggcgaggtgttgaattgcaagtatgtttactgtattatttgaaattttgctgtgattaatgtgaatctgtgttcataattcttaagatatctaaaaatcagtatcatccatgtcatataccttatggagaatttcataagaaatagaagataattgcaccattttcctatagtaagtactgacataactattcttttgttactttcagcacatatgaagtcgctacagcttgtgctttagctatcgaggcagacaagcttatctgcattgttgatggtcaaatatttgatgaacatggtcgagtcaatcgtttcatgtctattgaagaagcggacatgttgatcagaacacgtgctaagcagagtgagattgctgcaaattatgtcgaagttgtaggtgaggaggatattagttatgctcgcaatcttcctatcaaagaggagaaagaattaggattgattggaagggacttcgttgatgggtatactgcatctttccggaatggtgtgggtttcaataacggaaatggtctgtctggtgagcaagggtttgcaattggtggggaagagcggttgagtaggtcaaatggttacctttcagagttagcagcagcagcatatgtatgcaatgtaagttttgagcttcttacagaatcccattccttaaaatttgcaattctttgctattgattgaaaaagtgtgaggttctttcagcaattagggaaaagttaaaccctgcacttcgccacattctgatgctcatattttctaaactgcttatgaatatgtttctagtggacttttttactcagtggtatgtgccattatgtttctattcatatattagaatattagaccaccattctgctggattatcttctattacagagtgatgtgccatttccttgtctaatattacttggatgcccattaacgtgttggaagtgatatttgccgtgatccttgggttattatgtttccatgaggcaacactatgtgatgtatatgtgtgccttagttgcatcagtaatgtgttcattttcttttgttactctgacatcctattttctaaatgtcagggaggcgttcaaagggttcacattatagatggcactgttggcggatcattgttgttggaattattcacaagagatggtgttggaacgatgatagctaggtcagaagtttggaactttctctatcctagatgccagttttaatgtacaaaccggcaaactttataactgcattatacctaatatatttcctgaacaagtgatttaatatattttcacaaaacatttgtttccctggtttttgctaaaagaaagacggccttctatccattttgtacatggcaatgtacaatattcgattatataataagtttatcttcttgccgctttctccattttatagttcatgtttcttggagacaaaatgttttggttcttatttgatattttgattaggaaaacaggatcttttgtccattgaatattttcttgtgactagtaatttcattttgtatatttcacaagcaacatgcaaggaaatgatgtttgtgtgcttcttctcacagagacatgtatgaaggaacaaggatggctagagaagaagatctttctggtattagaaagatcatccgacccttagaagaatctggtgtcctagtgcggcgaacagataaagaggtacatttactatctcgttttgtaaacatttagcaatggatataaatacattactgttcagtccagacattccctttatgcaactgaacatattttatgttttgttattagcttctagaagcattgaagtcatttatcgtcgtggaaagagatggttcaatcattgcatgtgctgctctctttccattcttgaggataaatctggggaagttgccgctattgctgtatctgaagaatgtcgaggacagggtcaaggggataagttacttggtacgatttctgcattttcatttctttagtagataccagtttggctatcaagtgtttgtacaacatcggtttggaaaaccagtgataactgactggttgcaacatgatttccctatcttgtcctgcatcattcgccctctgttttgtgttgtttaatccactttttttaaaaagaaatatgttgaaattccaaaaccgctgctttcttagaaggccagaaccaagcaggtttcagggtttgccacagtacaaaaaaaaaaaaggagaccctacgtacattagtacaacttgaatactttcataataaaatgagaaaaagaacaccttggcatgtctgctaccttgagtattgacaactttttcttcattttacatagatcatatagcatccatgagcaattaacatctgttgtggttggcatatatccttttggattttctaatgaacatggtgtcagtttttcaacaagtctcagtattaaagttaatgtttcccgaaatatttttgtttgctctacagtcaatcactatgcattatacttaccctggtgatctgtcctttagattacgtcgagaagaaggcattatcgcttggtcttgagaaaatattcttgctcaccacacgaacagcagactggtatgtacttatgctgtagcacggcgcaaattctatttatgttcaaggtccttttaacgaatcctgtcacatggtaatatgcattgccattaaggtgcttcccagtgctgtttcgacatgaattaaacttagtcaacctagtacctgctgtatttgttaacaattttgtggtgcaatttttctttttcttaacaaagttctggatgtacttccagtcattgtttagactttggatgacgcagaatgtcgctcatttataactacatttccacaggtttgttcggcgtggcttcaaggagtgttcgattgagtccctgcctgcgcagaggagaaaacgaatcgatctttcacgtggatcaaaatattacatcaagcggctccgggcagcagagattgggcagatggctgttaacaattttgctgtcagatgagatactgcacgcaatcccggtgttgctcatgaggtttctaactttctatgataacctcaaaagcgattgtacattgtataaattgtgtatggtatatatgtgagtaatcgatcaccaatgtggttttgtttctttagtagaagccgcatcaatgggtgcagtgcgagcaacatggcagcttcgcggcatctgggttcttgagcagtcatgttgaaatgccatgtgtaggacaaacataaaacgatcgataagtaatttaaaatggagggaatatactttgagatgaaatcatagagtttaaagtctgaaaaaaaagatgtctcgacgtgaggctcgatttgtagtcactaacacggggagagtgagatattacagtaaactagataaactaatccatcaaatacaatgatttcgttaagggggtatacacttatctggtgaacaggcaatacacacataattgtacgctgtgatggtagaaaaattctactaatcttatcaaagaaagtaaccaacacgacatgccaatcccaacaattccatatatttcttttcaaaggaacaataattccacatcaatcccagggtttgtgtccgatcgagactgcttggtcacacggacagacttgatcagaagcaagcctccaacaggcagcagcagcaaagtgcagccaagctgtgcaaaatcagagaaaaaaaaagcagattcggttagggcgccgaaaaggcgaaaaaggacaaaatacagctattacccgtgcaaatcccatactaattaacaaaacccagagggaccaacaagttgtgtgttcgctactcttggcagtatcaccaaccactaccgatcatatcccttccagctgcgctttacagagcgagagttgccggttagctagctagtggtggtggcgcattgctgtcaacgttcccaaatcgtgtgatttgttgttggtccactcgaactgctcaatcgtcgtgtgaaccaaccgtggaattaaaattaaccagtgaaaacatatcgcaagttgaaataaaaagacaaaaagagaacttattcactacaacttggtgaatatggtaaaatatcaaaaaaaaaaagaaagaaaaaaaaacacaatctgtgtgtcgctgtcagacgatgatccctcgaaattttacggttcgtatttgtgtggacctcgaaattttagtcgtcggttagaaggtcacattgggagcgagtgggcgcaaggacggataagaaaagagacgaaaaagaaaggtagaagttggcacagaagaggcgtggggcccgcgtgccagtgagccagacacagtcaggtcacgagccacatccaccacacccaactcgcctgcctaacccgtcgtcgtcgagccccccaccacccacccaacactccaccgccggcgagcatcgccgacgaggaggaaatctccaccagaaacccgaagcccgaactgtctgggataatagctagtagtaggtgagagaggaggaggaggaggacgtaccatccctccatgaaggaaggcccgctgctgtggtgctgctgctgctgcggcggcggtggctgcgcgtacggcggcgggtagccctgctgcggcgggtacccctgctgcggagggtatccctggggagggtacccctgcgccggcggtgggtagccggccggcgggtaccccggcggcgggtacgcgtccttccccgggtaccctgcaaaattcagatcgatcaaccaaccactacagttacaagaagatggggaggaggagtggaagggacggatctggataggaaaccttgcggcggcggcgcgcccaccggcggctgctgaccgtagtagctcatctctttctagtttagctggaggattacttttccccttctcttggcgttcgtcagtgagaggattggcggttatataggcacccaggtaggcagttggccacttggcctggacaagggagattggagtatcggagaggaggctgttgaattggaaaaaaaccaacaaaccgggtgggtcatgcactcatgctgctgcacatgcaggtggatggatggatggatatatagccgtttggtcatttggacgacctgcacaagtgcaaaatttagactaattaactatttgccactcttacaagtggcaaattaaatttgaaaatatacccccttttttctataattcgcgtttatatacatgcatggcaactatttgcgaaaatatacctaatccgcagccccacgctgcgggagcgaagcgcaaccgcggattggggacgcaggaccggtgcccagagcggtggcgcacgctggagaagcggaaccgcaacggtcccgcacattggccgtgcggaaccgcggtggtctgcgggaccaatcgggccaaattcggtcccgcatattgggcatgcggcaccgatacggtcccgcatatccaacctgcgagacgggcaacggtcccgggccacccctcccctcccccgaaagttccttaaattaatcctaaaatttagttgcagtcacttctaaaattttgtgtacatttaaacaagcaaaccactcctcaactttaggtccaatcactcctaaaattcagggaacagttaaaacaaaaaaaatgattggaacttgtaggtggtagtgctaaaattctgggaacagttaaaacaaataaatggattggaggtggcagtggcagggcggtcgcacgctctggctctgcgggaccgtggcggtcgcgcacgccgggagtgtgggaccgacagcccggccccaccctttgccctctcccgcgcatgcttcttttatcatctggtccacgtgaaattatctcccacaacccgtgctgctgctaaaagtagacaaaataggaatgtgcgccgtcaatacagtgaaaacgtcaatcatgtcttctttttttttttacttagctgacactataaaataagtgggcgagagacgcgatgcccctcacacaagagctgcgcaaaagagaggagacactcatgctgtagaagagagagtagcattgtgagagaggagagctagagaaaagatcttggtgagcttccagcagcaattgaagaaat

SEQ ID NO: 9186 - DNA, 8087 bp, Oryza sativa
ctagaattttaaagagtatataccttggaggtgtatgatagtataaataacaccatagatcagaaagaaatatgctgtgaagaattttattttattttcatttttttaaaaggggaagaatcttattttctactcaggagtttgatcgtgattatttttatagtacaatactataatagtcctgcttaaatcaatttacactataaggttggaagaagaaaaggcatgaatacttaaatcctagatttaacatattaaggcgggtgcttggttggtggaatgatgttgaaactgtatgtgatgctggttcgcctgaataggttgctgctggatgacattgaccaacttcattgtttagttgggtatatggtggcatagatttctgcttggtttttaggttgggtatatatcagttgttctcaaggttctgaatatcggttttgccagaaatctcagcacccacaccctggattagcagtcttctagaacaaggttactgccaagattttggacgtaagttgttgcacgaatttcctgatatatgatattggcactaccgcactaatggacaaaattacatactttcaaggaagattgtgtctgctctttaagcctcatcagctccatttgtaaggcatcgtttgaccgtttctgatcatcaattgatgattgatattctcttgtcctgccaataagtaatcattacgatacattgcactcgtcagaaacttgtgcaggcaagtttagcataatgagaatagcttttaaaacatcaagttagcattccacttacaattgctgaaatgtttaaaagacacaacaatgcaaaaataaaatacatgaaataatccaacaataaactttagggattaacaaaagcagagggaaaaagcacaaagtgataaaccatatgcttaaaaaaaaggccatagcaaaaataggggaagatttaagcagcagccctataaaactccattttccctgccaaaaatctgtaggtcttgtactctcgttcttcttaatgaaataactaagatacagaacccatactttaacaagactagccatatacttcttcacacgcttgaaatacatttcagtcctttagattgctgcagtcatagctagtaatattttattaccaaaaactaatatatgcatgacaactaatatactgaaaaagaaaagaaaccaaaaaaatagtagtagttactggcgagaggtcatgatcttagagcaaaattgctacctattaatttctgcacattcttgctatcaagttactggcaggaaaacatagcaaaacttcgccatcctatcaattccatcatccagtatgaaaaccaaacctctctagatcattccaatggagaaatacaaataaatctagggtacctatcaaacaaattgaataggaaattatggtacctttcctcgaatttggcaaacttttgtaaaattgcttcttctcgctcctttgctttctcacactatcaatttcaacagaaaaaatatgcactttgtaacaaagagcaaaagtcacgtatgcagttatcaactctcctgctgcacaattagatttggcaggtaaactcaataaaaaaaaccttcattaacgaattgtctcgttcagcaaatgcttgagcaacgctgctttggaaaaaccttacttgcttctctagttccttgttctgcattattgtttccaaaaagaatgtcacctcaaagataagcatgaatacatatgaaaagaacttagaaaattggtgtatttccttaagtaacgaacaccaagaccttaaatatgtaaaaattgaccgcaggctcatgtttaattgtcgcgctgcaggttttgaagtagaactagcattggatttgaaggtatgctatatgaagaaaagagtaatcctttatattcctcgggttatgcaaggttccattcggatttctctgataattttgtcagatttaagttactatagtatgcattagttgtgccttgtgactagaagaaaattttctcagttgaagctcaagttcatgactcttcacccattaaaataaccaaactgttactcactatactgcttacttgtggataatagaggacaagcgcaaaatctcatgccactggaaatttctcattgataccaaaaagcaacacattctagagaaagcagaacagccagatgtataagtcaaagtaagatacctttgatagctcagccccatgtaattcagcaagctgactctgaaatttaaattacaaaagcataaaaagacagaacaaaagaaaagaaaaggacagtatagagagaaaggagggggggggggggtacgaaacacactttaattctataagcctcagcaagctcctcttgcaaattttggttctctcttaaacatccacctaacttcttctgaagattttcaatatcctgctccaaagcagctgtcctgaacagttagaataaacatattgctttatttatgctactgttactgtaaacagcagtggaatatgaacagaagatatggaagaacctctgagaaagcattcgagttgcaacagaaacatatccaggaccagcttgttgttgcatgcataattgctcaatatctttcctaagttcatctcgttctgtcaaaccaagtatatattatgtaaccccgtagttcagtaccacaataaaacaggatgaaacaaagaactatttaataaagaaatccacatgagcaactttctgaaaacagattttaatgttccattcactcaacaaagctgcagtatgatatatgatagaataaccagtcatttgtcatcggaaattccacaaatctcaaactttaaatataaaaatacttgtgataatcaaatttaaggtattgtgtgcataattcacgcaagaaatacagccacctgaaaatatacacaaataaacaatgcagccatttacaaatggcactaaaaatagcacataactatcatccaccgaagaatgaggacaaaacagaaccaccatcaactcctaactataaggaataaagataagcttcttgagggtcaagttatccactccctaaactctagattttgccttccacatggccggctattttagatctatccttcacctactactgtttctacttcaagtcctcaccatccaacttcatttcaacagatgtttatccacacattatgatgtaagggtgtctggttgtaaaaattgttagcttgattcctagcatgcagaatcttttctcacgcgtgcatgctgggaatgtcacattccctgtgatcaaattcccacagttaggacatcagggaatgttaagataaccattgatctcattttcctataatcaaacacacccaaaggatcatcaggcaagggcaaaagtgtgagcagactgctatgcgtatgcgtggttgaaaccaaccaaaacactggggtgactatgcattggtggattctggaagatggggtgttacaaagggtaaaatcatctgtagtgcacatgtatatatttcggcaaatgtgttaaatgcaaacaatgtagggtaatatgcttcagttggttactatcctcagacagagacatgatctaaggcagcagctcaagtagtcttttgcactttgtttactaccatttttgttgcctgccgtatgtgtcaggtacctggcaagtggcaagtcaaaacagatggtgtaactagatgcagctacagtcgtgttcagtttaactcacagggtgtgctgagaaggccaggaacagtgttggcctttatgtgcagaggagagtcgcttcactgctgcaccatggagcaaggggctcatatgggattggtgaatgggtgacacacaggaggggagagaatccatgcagttgttactttcatggttttgaaaaatgccactactatttaactatttggaaccatatcattacaatttaacgggtatttgatatgtgccactgaacaccccttcgctgcactaaaaatttctagtggaccaaaatgcccatgtcttcttccttctttcccttctctttccactcctgacatctctctctagatctggttcctggtgcttctccggttaagaagcccagcaacacgacaaggtacgcagaggcggagccgtggaggctcacacaggcccaggtgcaagcggagctggtgcccacgctgtcaagctgggccacagggagcagcaacgctggagtaggtgacaacattgtgcaccaacatctggccaggcaggactggagggatccttgctttcgtgagcattttcacaaacagttggcgtgcagcagaactgtgaacagattgattgaaagaatagagaaggtgccaagatggcgtagtgggagatgggttcctcgtcagtggtgagaggaggcttcctcatttggtgcgcggctaccacagccaccgatggtttggtacatgatggtgtggtgggagatggtttccatcggcggcggtccgcagctgcatggccacaggcccgcaaggaggcacgaggggagcgtcgagcgagtcttcggcttccgtcggtcatctttggcacggggctgcctccggcctcgctaccaatacctgggaaaccatctccgtcggtcgagcccacggtgagcgttctcctcacctctccaccttgactactgcttggggctaacgtctcctgtgccaactgccaagtcgctgccccagggaagagatagggacgaagaaaggctcctgcgtcgtccgaatctagctccatcgatgggaaaagatgaacaggggagaaggggtgcaggaggaacacatgggtaatttggtccaaaaaattttctgagtacaatgaaagggtatgtagtagcacatctcaaatacatgttaaattgtaatggcatggttctaaatagttaaatagtagtggcatttttcagaaccataaaagtaataatggcatagatccaattaacgcttttctctaagggtgcctgtagaatagtcttactcgctaaaacctaatataaattatattaatgtgaacttttttcattggaacaaaattactcatcagcttcatatgaccaatctaggtatggcacatattcttgccaaagtttaaatagtataacttcgtaattccaggataatatttattttttattctacagattaaaatctgtattcttcaaacgtttaactactgaaacctaacagaaaataagttaaaacagaatgcatataaaaaagcaaccccagcagactactatctgccagatgtccttagtttaattttttttagtggttaatagttacaccgtgctacaagttaggctctatgaatgaactacttgagcagagaaagaactttagagagtttatctgatgagaagctgagaactacatggaaaaattaattgattaatgaatgagaatcttgtatgttgtgagtacctcgctggagttcttcaactcgacgagataatacttcaactaggtctgttttctcatccaaatctgcagagggaaaaaaagagggggagggggggaataagaccaatgttcctgaaatcctgaatcaacaaatgcaatcgatatccaattgttcatagatattaataccatgtgtgttaagacctgagtgagaaaaagatcaaataagaaagcccatacttggaccattacccacttttgcaatcaggttcaacaagagaactggtcaatctggcataacaatgctcagatgcatagcattggccaacagtaccataggagaggtttttatgagtaaatacaaattgacttgtcaggacaagactccacgaagtgctagaagcgaggtagctagaaattgtaggttccgagtcatgcatgactcaaaaatcaacattggtaatacgatatttagaacaacaatcagataatcaggatggagagagaacggtcactagctgaccaggaacactagaataccatgggaaggcgatacaaaactggtacccagaagttttaactggttataaaatataaacatagcagtaaggaaatctttaaatcgttcaccactgtatcaggtaatcaagatttcaagttataccaataatcattacaatagaagcacatcggcaagtgctgaatcacctagaaatctagcagtaaaggaagcttcattttggtataacagagaattcaagtatatgaatgtcaaataggaaatcaccatattggagcccttcaacccgacggataaatacttccaaagcatgctgcttttcatctctttctgtttaagaaatataaagaagctaattatatgcaagcaattgcattagaacataacaaaacattaacagtggggcaagtcataaaacaaaatacaagcactgcgcatcaaataagtagaaaatacaattaatttgcatatttatgtttaattttcacactaactctttacatattttttgcattcactggtgtaacaggaacctggagttagatgttgggaaggaagggaaacattggaaaggaaagggtagaatatgaagtgacagaaaactgcaaaaaggtaacgatgagaaacagaatgcaagacaactattcatttacacaaatggtttgtagaaatgtagagataagaagcaattacattttctacaaatgatcccctatgtcccccgaccagctacgttttctaccctgggatttcatcactgcatgtacacatcaggcatgtttggctggtgatctcattagcatgggcacgtcccgctatgaggaatgcctcaagaattcaagatcgactcagttcaaacttcacagtagtttttttttctgaaaaagcatgcacattgaattgcctggtctgttatgaggacaagataacactttgagatgtttgcaaggctaaggaaaacaaacaggaccatcaacaaaagatgtcattcacaaatactaatacaagtgcctcttgaaaaaggaagcctcagtgttgaagcacaaatattacctagaattttcttcaaatttatgaactactatatgcaagaggcatgtccagatgatatatttaattatccctgccatgggtcatgttaggctccatagttttcattgctcactgcatagttcagtagttcacatatctaccaccaatactccatacactattaagtaatatggcacatgctctccatagttttaattgctcactgcatagttcggtagttcacatatataccaccagtactccatccactactaagtagcatatcctccttaatgaaataaaatgcagcactcctgcatttttgagaaaaaaaaaacttcctacattcagcaccaacatttgcagcagaactcctcaactataataagaagcaaggttgcaaacagcacatgcaacagaactctcgaggggtaatattgaggaaaataaacttaaccctcctctccaaattaacaatcatctaccattttccgttctgaattccaattctctccctgactgactattaatcaattacagaacggctaccaaattcctgataaagtaccagcacatcacataatagtctcaacaaaatattcccctttgaaaaaacaaaattggatccaccgcataaagtgttccgccatccataacaaccatcaagaaaaaagcatgaagatactgacactaccatataagctgaggaaagcagcttgtatagtgaatgtggcaactaatattatcaggtaaggatattaccacgttgtagatcttcaacccgacagagtagtgaggacttatccacgccacttgcctcttcagccatttgttactcctcctgaagatggtggttaattaactaagaatgatttgagaagttgcttttcggaaacttgattgttttagctcgctgtaaggttgttctgagttacgaactggccaaaataaccctaagacaaatcatagcttgtgcagagaagaagaactgcagattaaatgccacggttgcacggttctacatacaatacaaggtgtcttcacaagtcacaactcattgtaagatgaatctgtatatcgtctgttattgaa

SEQ ID NO: 9187 - DNA, 35564 bp, Oryza sativa
agagtagcattgtgagagaggagagctagagaaaagatcttggtgagcttccagcagcaattgaagaaatagaggtaaattagtaatgtaaatattataaagtagaagtttagtgatggcttatgtattagatataattattagtgtattggataagtaataatttagataatgtttatatattacatataaattgttcggttatatggcattttagaaattgtaggtaccacttacgttagaagttgataaatatatagtatgaatgtagtttaaatatagaatgggtttagtattatatttgttgtatataagacgtgcataaatttttattagtgtgtgaggccgtgggagaaatgtatatattttgaaatttctttagttgtgtgtacgatatctgaacaagatagacaaatgggtaaaaaatatattaatttactatgtacgtagaatggttgtagtattatgttttcgggtacataataaggggaaagttttaactagtatttagagccgtgctgcacgaataattgaatgtggtaagaagttttttagttgagtgtaccatttgagagtgaataagacaaatggaagaacaaaatttagaggtaacttgcatgacggttgggattgatataaatagtatggattttgcaagatttattattgacatatattcattattttgaaggttataagtgtgaacgtggtgcatttaatttagaaattataagttcggagaaggacaagaaataaataggagacatacaggtaagcatatatacattttatatgtgtttaggtattcattaaatgtgcaaatcatgtaaactaatgaaatgaagaagggaataaaattttcttaagaaatcatggtgcgagttaattttctggaaatctcgatgaactaaaatactatatggaattatcgtgaaattttcgaagctatattggtaattttaaaagtgtcataataatttcagcaaaataaaaaagtttaataacggccatcaaaacgcttcacatacaaaatgaaaatgacataatccatatcttcatttgtgacataatccatatttcacagatgttcattttttgtaatgcttatatgtactgattaatttggaaaatttcaggtatggcggacgattggccctacccgttactcagtagagacatcgatgcacggcaccgtgcacgacagatgtcttccagctgtccaaggggtctgtcggtcttcataacgcggacttgcccaatgtggggggtcgacgaacgttgggtaccaaggtaactaatttttatacaggcttacatgtaatattggtaatattttttttacttcaattagtgttagttttgtctgacccaacgattgtcgttttgcaaggttgtccaccgcaggccttcttccttttgttagttgcaggctcgagggcattaggattacatggtagcaagacaacaaagtgcacgccgacggagagcaaatccaggggaaggcgatgacgaggaagaagaagatgtggtgggaagagacacacggcaccagattatagacaagggacttctaactgcattggttgacatatggcggccggagactcacactttccatctcccgtgtggagagatggcaattacactgcaagatgtatccatgcttataaggatgccacttgcaggacaggcaattgtcctccctgacccactagtggattggagggatgatatcattggaagatatgcttgcattgttccagaggatgatagcgacataaaatgttttttctctgaagatgaggcgcgcggccctacgttacactggctcagccagttcgaggtaaaactaattcgaccatacaacttcgcattgatgatattatgttttgttactgaacttttcaatgtacctttgtaggttggttacatgaaagacgacacggaaaattaccatgtggaattgcatttggaggcgtaccttctatggcattttggatgggttatgttcacaagtggacacagaaacacagtggatgcaagaatgattaacttagcaaggtttattgcgcagggcaacatacaaagctttccccagtggagttggggatcaacagttttggctgcaacttaccgaggtctttgtgaagcatgcacaaagacaagctttaagcagcctgtgtttactggttgtccattgttggtcatgctatggtcgtatgaacgctttccattgggatgaccgtacatgcctgaacctatggctgattcgaccttatttggtaacactacagatgataggcctacttatggcatgcattggtgctagggaccggtacgtatattttttttaacatttgcatttatttcgtacatatataatcttaatatttatttcataacatacagccacagtgggcgaatgttcaggttcgaagtgcgtacgaatacttcactgaagtgttcgatctacttaaggaggataacgttcagtggtgtccgtacaccaacgaggagacacaacgccgtgcccctactggcctcaatacactctgcctgtgtgactcgtcttactggctgacgaaaaagatgcttctgtacgatatagcagttgaggcgtacagtccgcagcatgtaatgaggcaatttggcctttaccaagaagtgccagtcccacttggtgaaacggtcccccccaagatacacttgtaagttatatttaaatgcattcccattaatttgcgtgtgtccgaattatattacttacctcaacacttaatgatgagtttttgcaggcaaaataggaaggcagatgctagcgtgcggcgaaatatttttgctaagatgacaccttgggtcgaacaatggtcgagggcaacactcgacattgttaacgaatccagaccgtacgaccgttgtcctatgcataatgccctctacaatagctgtcaaaggtagaggccttagttttcgtagaacagcgttgtaagcttctgcaagattagttgtcatgatcccatgtctggccccatcggtgtcgtgcagcaatgcccattgctcctctggctctgcttcaatccaatgtgtgaaacacttgatgtttcttgccaacctccgtcgtttactgttggaagtaataagactgtccattggttctaaggcctccagggctggttggtcatctttcttgcaatccttttttgacttaacatgtgttgctgttgcatcatccagctgcctccaaagatcttctaacttctgttgctggttttgcatacacagccgcttgaacatttgcattagccttttgctatggaactgtttgaaaaagtttgcacccatgtgacgcatgcaccatcggctatgcaaatccgaccagtagtatgctccgttttgatcctctttgagctccttgattgccttaagcaacccagcatttctgtcatgaataatgcatacattcgatatgctttgcaccacaccccatttgacatgctgcaagaaccacaatcaactgtcgtagttctcgctctcaacaaaagcgaatgcaaccggtattatctggttgttcgcatcggcaccaacaaccgtcagaatagaccaactatactttccggtaagaaaagtaccgtccacatatagaacgggtctagaccattgaaatgcgtgaatacatgctccgaatgaatagaatgccctttccattacacggaaattcggaggtcacacggaatccctgtcttggacaacaacataggtaccaggatttctgtcttgaacaacaacataggtaccaggatttctctgtttcaggatatctaggatctgcggtagtgtgtcatatgccacctcgaatgatccataccttttctccatcgccttttgcttcgccctccacgctttgtggtagctaatagtgtaccgttcactagtctctactgcctttattatatgcctcacgagcaggtcgtccgcttcaataatgttgctgtagtacttgttagcaacatacgccgcggtgaggttgcggtgggacgaccttgtgttccttagcatacagttgttgtgctcctccactctcgacacgagccagtacgactcgtactttggcacatgcccatgaaccctaaaattgcacccttccgtctcacacaccgcagtgtagacggtcaggcttgatttgagaactttgaactgcctctgcatcttaaacgaccacgacttaactgcatcctgaaatgcagacttcgtcgaaaacattgtgcccttgtttattgggccatcaccatagaaccataccgagtcatgcaactcgttctttccgatatatccaagatcttcacggttccatgatgctataacaggttggacttcgtactcttcatcatctgcctcctcatcctcctcctgagccaagttagcttcatcctcacgagcattcctatcaaccctctcaatctcgtccactataccatttatctcttccccttcatcggcttcactcgaaccatcttgttgcaccgtgctcggcatcgcaaccaccgtttgttcagcttgttcaatatgaaggctctgcatgtcaatgccaatattgtcttcattatgctgggagacttccacatgaaatgcaatcggttgagcacatgcctctccctgcatatcggactgaccgaatgaactgtttggtcgagccctccttggacaagcttgcaccaacatggccatctcgtatcctcgacgtctgcaaccttgcaaccaatccttccatgattgacttcgggttacttctttcagttgccattggatgtccgtggccgaacgactccataacagactgacattaacactatagacttgtgggtccaatgagaatgagcatgtcaaccagtaccacacttcgggcattctaagattgtccggatttgggtgatacagtgtgcactaactaaagttgctcaagtcaacacccatttcgttcgacataatttccccgttgccataatatactctaaagtttgccattcctaaacaaataaacaattgcattacgtacgactaaaaaaactaaaaaaaactttcagatatcatacacacaactaaaaaaactttcgaaatatatacatttctccccacggtctaacacactaaaaaaaaaattcatgcacgtcttatgtacaacaaatataatactaaacccattctatattcaaactaatttcaaactacatatttatcaacttctagcttaagcggtacctaaaatttctaaacataactgaactatttacatgtaatatatgaacactatctaaactattacttatctaatacactaataattatgtctagtacataagcattcgctaaacctgttcttaataatatatacattactattttagctgtatttcttctcttgctgcaagatcatcaaaatgtttcctcttctgtgcaatctcctgacttctgtacgagcagcatctctcctctcgtttgcgcagatcttctatcttctgcagacgcatctggtctctcactctccatctactcttatggtgggagctctaaacgaaaagaaacgacacgaactaacgttttactgtattgacggcgcggattctttatcttgtctagctttaaagcaacatttattgtggagagagggcactcatatggctatcttcgcatgccctgctttcgaacccatcttctccacacaaaaaatggagcggtccattagaacgtgattaattaatattaacaattttttttaaaaaaatagattaatttgttttttaagcaacttttgtatatcaatttttttttccaaaaaacgtaacgtttagcagtttaaaaagtgtgcgcgtggaatactagggagaggggttggaaacatggagcaaagaccatagtggacagagagaagcaacagttatcgtggagagagtgcactcatagtggacagagagaggacagagattactcgtactagcagagaggacaaaggtgcatcattgaggacagaaaggtcagaggtgcaggcacggtcccgcgcgcccagtgtgcggcagcgccacggtcccgctcaaccgttccgcgcgaccgcgcaccatgcagggtcccgcccaaaccacgcgaatctcagtgcttcatttgttttaagtgtgcctaaaatttaggagtgattggacataaaatttactactattcgcaaaagttgactagtgattggatttgtgtggagagcgatcacgcagattagaaggaccgtcccgcacagccactctgcgggaccgggccggtgccgctcgcccgttctgcgtgaccgagccggcgccggccggtcccacaatccaccgcgctgcagctttatggacctgcgggatcgtgccgatgccgcctgctcaatatgcgggaccgcttcgatcccgcatattcattctgcgcgaccgggacgtctagcgatcccgctcttctgatccgcggttacgcgtcgctcccgcatccccaacacgcggattaggtatattttcacaaatctccgccatgcatgtatataaacgcaacttatgaaaaaaaagtatattttcaaatttttttctacaagtggcgacaaaggatttactactaaacccacgtgtcacagatacatgagggcctagatatgatagacaatgcgtggcaaatttttaattgtcatatcttaaaagtggcaaaaatttaaatgtcccacaaaatttggacaacaaatttggttagaattcacttttttcctccaatggagactgtcaaacacctttattgtcgtccaaatttggttagaaaatttttttgttgcaagaaaaaaggatcagatttagatggataataaccatataatatatcctaaataatatattctgagactttctatgtggtgatttttgataaaaaaaactccaaatctagcaaattgtggaccattggatttcatgcaacataccttaaccctatcttttcgccttccctcctcggtccacccgccgccgctttcacgcgcctacgcctcctgcatcatcgctgccacccgacctcatcggctggctggaaggggtcaacgtcgccggcgaggccatcttggccaacctccttcccttttcctcaccgaccttctcttcctcaaggtaacaacaccgagtgcccctgccctgctgactttcctatctccggcatctccccaccaccggatcagccaccgccacccatcgcctcctgaccagagtcaccttgttgcacccgttgcaaaccccgcaactctggcgccgccaaaggcacctcgtcactcacctgtgtccaccacccaccactagatctgccaccaccggtcgccgcttcctaaccaatctcgccattttgcctgccgccaatgctagcccattgcccattgccatcctcgtgacttcggtgccgccgcaagcacctcgttgcccgcccgtgtccaccacccacttccggtcctccattgcccatggtcatccctctaaaccccggggaacccccctccctaccaggctaccaccaaccccaacccaaaaccctaattcgcttgtctcctgctggagttgggggtatcaacggcgctagagaagagggggagcttgccggagtcagaggagaagaagcccatgacgaatcttgctgcagaaaattcacgtcccaatggcgtattctgaaagtagtgcgaattaggtggcatatcctgaaaaccgtgcgtactccaccacacgcatatcaccccaccactcccctcgcgcaaaaatcacgctgctcgccgctccctcacgcgctctcctttcccccatcctctcctcccgcccagatcgatccccctccccttgccaccgccacctcctccatcccttgccaccgcaagcaccgccccactccccgccgcggcacccgtgatgctgtctcgttcctcactccaatcgctgaagtcgaagactgccgagcaacactaatgtcccagcacatacaacacaccgaaccagatgaaaggtattgcacttcaagctcaatgggtttaacaactgcagcatactacaggttgataaaatgtcatggcatcctatggcacccagcaacattcatctggattaaggcaataccaaacacttgcaaaattttcctctggctggcctttcatggcagactaaatacgaatgataacagggtcaggaaatgctcggcatctgatccgcattgagctgtttgcccagctattgaatcagcagatcacattgttccatgctgcaagttggcatctgaggtttggaagaaaatcaacctatttgatcaggccacccagagtgcagattgtggagattatggataccccatacctacacggcatgtatagtccgactgggtatggggtgccatgtatagataagatatctttaaagggacttgggttaaattccaaacttgtatgtcaaggaaatacccgggatcccaatcggttatgattgtatattatctgtaactacctattccgttagggatatggactgtactttgtaatacggactccttcccctatataaggaggggtccgggtgcctttgggggcacgattttctcctagatcatacgatcaataatacactcggcggatcaatccccggacaggagtagggtattacttcttgattaagaaggcctgaacctgtataaaattccttgtctctcaacccatccaattttccagcttgatagccaccccctttcagtattgccgaaatcttgtttcgacaattggcgcgccaggtaagggtagcgtcaagttcttcgccgactagtgcgatgggtttcgtctccggcatcgacgacttcgtcttccctcccgggcaggcgttccggttcggcagcctcgacttcatcaccaacaacttcggcaagatttctctcctcgactcggattcgaaccagtcgggaagaggtcaggtcaccgccccgttcggtatcccgaactcggccgagatctaccccaagatcatctcaaccgagttggccacaaaccactcgaacgagatccaatatactccaacacgacccgatcaagacgatggagcctatccgccaatcctgatgaaactccccgatgacttggctgccgtgttcaccacaagggcgtcctctccccgtaggcctaggcgggatccggccccggccccgatccagtctagctccagggaagtcggcgtcataatccagcctctcggcacggtttcgacggaacaattggacggctacctcagctcccctggtgtcgactcacgaccaaccgagatcgtagagtacgacgacttcggctaccgctacgactaccacaacctcgatgacttcgatgaaggctttgaagataactacacgcgcctctactttggcattttcatggccgacaacgagacggaagaacagcgtcaagcccgagaagcagaagagcagcgcgtgcgacaggaagccgaacgtcgccgactggaggaggagcgccaagcacaagagcgagaacggctgcagcgtgagcaacaggagcgcgagcgagctgcaaaggaggctgaggaccggcgacagcgtgccttggaggccgagcgacgagcacgagaactcatagggcagcaagacgtcgaggggagggcggtttttcgcacccccaagcagaacgcggttgcaacgatcaccctcgtcgacaccctcctcaaggaagacgcactcaatcaggccaatcacgtcatcaacatcttgaaccagaccaagaccatgatcgctgcttcggtcccagtcaactccgcaagcgtccgcacgccgactggcagccgagttccgcctcttcgatctcaagactatcaccaaccaagcttcagcgtcgtcggcgcgggatccagtcgcaggagcagggatcatggcgagcggttcgttcagtcgcctcctgaccggcgcagggagtgtcgagctgaacgtccccgctccccacatcatgggcgtcccatcgatcttcgtgaaactatcaaccagcgccgtgcggcaagaggctacatccccaccattcaccagatcgttaagacaacgacgtggatggagttgctgccttcacaagcgacctgcgtcgagtggattggccggccggcttcaagccgactggaatcgagaagtatgacagcaccactaaccctgagtcttggctcaccgtctacagtctcgcaattcatgcagcaggaggagacaacaaagctatggcaaactatctgcccgtagccctagcggattctgcccggtcctggcttcacgggttaccccgcggcacaatcggatcttgggcggaacttcgcgaccacttcattgccaatttcaagggtacctttgaacgccctggcactcagttcgatctttacaacgttgtccagaagtccggagaatcccttcgagatttcatctgatgtttttccgagcaacgcaacaagatttccgacatcaccgacgatgtcatcatcgccgccttcaccaagggcattcgccacgatctcttagtcggcaagtttggacgcaagcctcccaggactgtcaagcagatgttcaaaaaagccaatgagtatgcaaaggtctaaaatgccgtcaccgcatccaagcagtcgggcaccacttggaagccgaagaaagatacgccgactacaggaggcagtggaagtaccaatcacaaggatcgcaagcgtaagcccgaggaacttgtggcaaccactacaccatcctcccgacaacgttcgcgcatcaacagcttcgacaagatcatgaactcccaatgtccgcatcatccaaattccaatcacgcggccaaagattgcttcgtctacaaatagttcgcagagcgatacgccaagaacgcacgcaagacgactaacggagatcaaagcacgtcaaagaagaaggacgatgaagatgctgccccgactggttttcaagaccatcgcaaggaactcaaccatatctttggcggacccttggcttatgaatccaagcgaaagcaaaagctgaccgaacaggagatcaatgctgttcagcccgacacgcctcaatatcttcggtggtcagagacaacaatcaagtttgacatgtcaaggaagatgctaaacctattaagcaacgactccgccgtttcgcacaggataggaaggatgcaatcaaggaggaattaactaagctgttagcagcaggcttcatcaaggaagccctacatcccgactggctggctaacccagtactggtttggaagaagacggggcaatggcgcatatgtgtcgattacaccggcctcaacaagtctcgtcccaaagaccccttcggtttacctcgcattgaccaggtagtttactcgacggccggctgcgagctactcagttttttggactgctactcaagatatcatcagatccgactaaaggagtccgactgcttgaagacttcattcatcacgcccttcggggcctactgctacatcaccatgccttttggattaaagaacgcaggagcaacttatcaacgcatgatccagagatgtttttcgactcagattggccgcaacgttgaagcttatgtggatgacatagttgtcaaaaccaagcagaaggatgatttgattacggatctagaagagacctttgcaagcatccgcacttttaggatgaaattaaaccctaaaaagtgcatcttcggagtaccgtcagggaagctgcttggttttatggtgtcccatagaggcatacaagccaacccggagaaaatcaacgccatcctcaacatgaaaccaccgagctcccagaaagatgttcaaaagttaactggctgcatggcggcactcagccggttcgtttcacgactcagcgagcgggggatgccttttttcaagctgctaaagaaaactgataatttccagtggggtcccgaagcacaaaaagcctttgaagacttcaagaaacttcttactactccaccagtcttagcttcgccacatctgcaagagccgctattgttatacgtgtcggcaactttccaggttgtaagcacagtcctggttgttgagcgtgaagaagaaggccatgttcaaaaagtccaacgaccaatctacttcgttagcgaggttttggccgactccaagacaagatatcctcaggttcagaagctgttatatggtgttttaattaccgttaggaaattatcccactactttcaaggtcactcggtcacggtggtcacattgtttccacccggggatatacttcataatcacgaagcaaatgggcggatcgcaaagtgggccttagagttgatgtctttggatatatccttcaagccgcgaacttctatcaagtcccaagctttagctgacttcgtcgccgagtggaccgagttccaagaggacacgcctgctgagaagatggagtattggactatgcattttgacgggtcaaagaggctttcaggcaccggagcaggggttgttctaatttccccgactggagagaggctgagctacgtattgtggatacatttttctgcgtcccataacgtggcggaatatgaggcgcttcttcgtggattaaagattgcgatttctttgggaattcggcgtctgattgttcgtggagattctcagttggtggttaatcaagtcatgaaagagtggtcctgtcttgatgataatatgactgcttatcggcatgaggtacgcaagttagaagataaatttgacggccttgagctaacccatgttcttcgacataacaatgaggcagccgacagactggccaattttggttcaaaacgagaagcagctccttccgatgtgtttgtcgaacatctctacgaaccaactgtaccgaggaaagaaatagtcgaggctacggacactcaagaagtaagcatgatcgaagccgactagagagagcccctcatcaaatttttaaccaagcaagaactccctcaagataaagacgaagccgagcggatctctaggcgcagcaaactttgtcatacatgagactgagctgtacaagaaaagtcaatcagggattctgcaatgctgtgtctttggaggaaggatgacaattgctaagagatatacattcaggcatctgtggcaatcatgctgccgcacgaactgttgttggcaaggcctatcggcagggttttttctggcccacagctgtgtccgatgctgacaaaatcatgcgaacatgtgagggttgtcagttcttggcccgacagactcatctaccggctcaggagttgcaaaccatcccgctatcttggccgtttgcggtatgggggctcgacatgatcggcccgtttaaaaaggctatcagtggttatactcatctctttgtagctattgacaaattctccaagtggatcgaagccaaaccggtcgccacaatcacggcagacaaggctagagattttttcatcaacattgtgctttggtttggggtacccaatcggatcatcactaataacggtactcaattcactggcggagtatttaaagatttttgtgaagacttcggcatcaaaatttgttatgcctccgtagcccatcctatgagtaatggacaagttgaacgcgccaatggtatggtacttcaaggaataaaagcacgagtttttgaccgactgcatccctatgctgccaaatgggtagaacagctaccgtccgtactttggtccctgcgcaccacacctagtcgggccacgggccagtcatcatttttcctagtctatggtgcggaagcaatgttgccgagcgaggtagaattcgaatctttgcgattttgtaacttcagcgaggagcactatgggtaagaccgagtagatgatctcaaccgactagaggaagcccgtgaagcaaccctaattcagtcggctcggtatttgcaagggatgcgccattgtcacaatcgcaatgttcgatcacgagctttctttgtcggagacctggttctgaggaaaattcaaactacacaagatcggcacaagttatctcccttatgggaaggaccgttcataatttctgaagttactcggctaggctcttaccgactcaaacgtgaagacggtactcaagtcgacaactcttggaatatcgaacatcttcgtcgtttttatgcttaggcattacattttgtatcttcctctttgactgttaacatcaagttcctccttgagttatcagtcgggagctactataataacaatggagtgtgatttttatcaattcaatttgcttacttgatttatcattgccttgtttgattttttggcttagtcaatgaggactgaaagttttttaacaacttttgcgggttctaggctcaataaggtttgacaaaaacttttaagaaatcaggacctaagtttaaatcatcaggcacagcataaattcatcagtattgtacaaattgtgcctccatcatcattatcaaaatacaaattcaatcagtttcagttttttcatcatcagagttaccaaacccggtcggcctaaggtagttgtcctggaacctctcaactacatcaacggctatcttgtcagcagctttttgcgcatcattgatgaggtcaagggcagcttcttcacttgtcccgtctgcaaagccatcaacagcatcaatgtcgatcttcgggtacaaggacttggtcatcgccaacgccaaacttgctcccatacttccagcttccttgatgttcttaaaatatgtatccggagcaattctcaacttgtcgaagatttcggaagcgtcaaatgaactcggaccattgttattaaaaaacatggcttggacaagtggtgtagcagcattggtgacttcatctctagcttcctcaagcctcttgattttgttaaccaagacgtcgaattgtgcctaggatttgattttgcaatcttcataggagtgggcacgaagataagagtggttttttgaagttcccgctacaagtaccttcgacatctttcaaagccgagtccctctgcttcgtcagttcgcccttatgtttttctagagctttgattcgcttttccagctcggatatcttggtagcttgcactgtattgcctctcattggttagttgcatatggatagcagcacgaaacaagtcagacagggatgagagttaccttttgatgaaccgctcagctcaaagttggagtcttgaaactcggcgattcgatctctgaggtcatgctcggtcttcctggcaagttctttggcttcacgcagttggtctctggttgcttcaagggttccaaggtggggaactaatttttcgagggttgcggtcttcgcttcattcctaagatggattctctgcaccacaaatttgtctttgtttaagcaaagtggtcgacaggatgattgaagctgtgtgtagggagacttacatttacaagacgagtggcttgactaagtgtctttttcagcagacacacttcctcgtctttcttctgtttatttatcatgattccctgtggttgcatttcatcatcccaccacttgacttatatgggtgggcgagaatcttcagccgattgtatccggaggacctcttcttcgtcgccgatcattgggccttatacattcatgaataatggtgaaacaattgaagaaagtctgtcggatcaaaactgatttggaggttttgattacctgttatgatttccggtcgaggacgagcaggtccttgcaccctaacaggagagttagttccagagtcagcgccagcgtccgtcttgggagggctattggtttgagcctccacttctgggatatctttattttgctctgtacccgactggtttccagtcgggggctcctgatcagcactgactccagtgtcggccgactggtttccagtcgggggcttattgctggtcgctacattgtcggttgctggttggtcatcactcgggcgatcttcggcagtcggcccggtttcttttgaaggaccagtctccgtgccagtcggctcagggtctttatcagaaagatctatgtcagatggcttcctacaaatttaagatatgctattagtgctacttcgatagtaagtgaccagtgaaacatggaaaatgaccaaatgatttgtacctggaggacttcctgatttttggtatgggacgactggctgttttattcttcgggttggcttgttttggctgtttcccagtcatccctttgctgccagtcttttcagcattatcatcttcgtcgtggctcagaaccaatttcctcttacgagagtcaggctggttagtcggctgtgaggtgtgaggttgagcgtcggaccggatttttggccctccactagcctggccagtctgccgacggggtgagcggcgttgggcaatcggaggatctgatgtcatcaaggcaaactcctgtgcatgatgttccaagttttcaatcaaccttgcagatgataaaagcatgcttttgagagaggctgagatgtttaatacatgctagtggaggagggttgaaagcattgtacggcaccactggcagcaagtgcgaatagctgactacgattgcatttgagaagattttatacattctctccttcataattttgaattcaagagattatggatcttcacggttagggtcatgcttgccatcaaattcaaaggccgtacgagatctttccttgattggggccagccggctcttgataaaatgccgggtgatctgttccccttgcagaccctgttcctttagcttcaacatacggtcaaccagggcgagtgcttgagcagcctcatctcccattggaagcgagttccaagtatcttgatacactggaggaaggcaggagtactcgggaagagctgattcaggattttgcacataaaaccaattcgcatgccaacccttgtttgaggttttgaagggcatggaaaagtacttttggctcaaggttccccttagttggaaaccggctcccccaacaacacatggtttgctcttgtttggctggggcttgaggaagaagatgcgacagaacagggcaaaatgcggtcttacacccaggaaagcctcgcaagcgtggataaaattggtgatgtggactatggaattggggtttaggtgatgcaaactgatcccatagaaatccaaaatcccccggaagaaacttgaggttggaagagaaaatccgccataaaagaaatgggaaaacaccaccacctcgtgtgtgtcgggggtcggaaatgtttcaccgcacgctagacgccacccgatgatctcctttgccagaagaacgccgtgcgccaccatctccttcaggttttcctccgttacatcggagggcgcccactgaccctcaaagctttctctctcttccgccatggatgcgaactggatgatgtgatttggttcgaagtgtggctgggaatggatgggagattgatgtggtggttgcgtgggagattttcgtggggctttggaggctggatttgtgtgaatctgtgaaccctagcttcgccggtgtggttttgcactatagcagagaatggggaaagtggcgagagtttcggcggggaagacgaaccgacgctttgcttctagtgttattttattagggtatcgggagtactaatgggcctgggcctaaacagtacttcagcccaattttgctatcagcgtggctaagttgtgattcttagggacttaggcattttgcttcggtgacacttgctcacaacagtatagtccaatgctgttaaaatcctttttgacgcagttagataattctttggaattactacgacgcaaataaaatggtgcccaatagaaaagtgttatactaattttgtaggcctttttaggctagctgttcgggttttgttgagatgactggtttttgaatagtcattctctcggcatgttatatgcttattttgatatggtgtgagtcatagcttaggcaatttagactcacttattgtcatgatttataccacatttgatggatcttttttgagagtttttactcggattcttatcatatgtgttggtttatagaccttcagtgtgtttctccctcggagttttttatatcttcttttctggtatctcaaagctaaagcagtcggctggatgttttattaaacgtagcatatgcttagctgtgtgataccatggatgatccggttgtaaaaccactcggttggatttttgcgccttgactatatgtttagtttttaactaatcacatagtcgggggctacacctaattaggtgcatctaatcgatgcacctgattttttttctattttgagcccttcacagtctttgatcttactactcaggaggccaaggcagaagaagttggagcactcggattatcgttttgggttacgagagaaaactattttgtcgactgtaaaggtctcaggggctactatggagattatgaataccccatacctacatggtatgtatagtccgactaggtatggggtgccatgtatagataagatatctttaaagggacttgggttaaattccaaacttatatgtaaaggaaatacccgggatcctagtcggttatgattgtatattatctgtaactacctattccgttagggatatggactataatttgtaatacggactccttcccctatataaggaggggtccgggtgcctttgggggcacgattttctcccagatcatatgatcaataatacactcagcgaatcaatctccggacaggagtagggtattacttcttgattaagaaggcctgaacctgtataaaattccttgtctctcaacccattcacttttccagcttgatagccacccccttttagtattgccgaaatcttgtttcgacacagatatactccagttcgttgaggagggactgttggttacaccggtgcatctaaaacctggatggtctatttgcttcgctgcttgttcacacagtttatggaaagcacgcaattaaatcagagaatgtctgcacttgtggtagaaccgcgtcaagcgacaatgccggactctaatgcgcagttgggcttgcgcagttgggctgccttgctagcatagcagctatatctccctactctttttatgttcttcatgttgttttctgttttcttttttcttttttctctttctctctcccttctttcttcttccttcctctgtctactgttgtttcttttcagtttctttccgatctttgtacttctgctataacaccttggctaccattaataaaatggttataaggtagagcctctctacctttttcagtcaaaaaaaaaaaaagacccccgagccagcgacgatctcctccgcggccgtcactgactggctctgcccgccagctgaaacgaacgtcatgtgtgtggtgtggctaaatgtgtttgattcaatcaggtgcgacagctcgtgaagacgacgacggcggcagtggttcttcgacggtctgggctggcgttgtggcggctgacacaggcggcgccggcagcgggggcgagaaagcggctcaaagactatctttggttttagtgcccacaacaaaagcagccgcagcagcagctattgcccggactattttgctgttattttgtgagagggtgtgagattagatgagatggcgtgcagatgcaatacagggcttgtgggaaattggaaaaacttggcaggattgatgggttaggtctttgtatggttctgaacatagtgctgtctacaatcagatttgggaatcaaactgcatgtaggcagatagtcttcctgagtggtacaatgaattaagggaataaaacactcactagagttctgtttccagttaatcagaagcaataaattgagggaaatagagactcacaagagttacatttccagtcaatcaaaaggttagtttttttttggttcacactgacaatttccaactcaaattatgttgatgcatgtaaacaatctgtgagtttagagcacttgaaactaggcaataaaacatttgggaataaattactttgctcaaaccgggacccaacatcaccagcagtaaatttctgaagtaacattcatatgtgagatgttaagttcatcatttttttttgttcagtacgagttttcattgcagatggttaattgtttcaaatttttgggggtattttacaggtgtttgacggttatggtcgtacagacgaagcatcttttgttcggaagaacttagcaaggtccatagttgatgcttggttgacttccccagcagcatccccaatgcagttaggagtgcatttctacatgttttacctgccatgtctaattatgtatatctatgtattcctatattcaagtatatatttctgtgctgaaatggaaatagaaaaatggcattgttgtttttaatatacattgggctgtctgaaattcagaacactgaaatatacattgttattgtcccttgactttgcttcttatatgagtgattaagtgaatttattactaaatagttaatagtttttgaattgtacaatggaaactgggagttttctatgttttataaaaatttgaattgtataatggtaagcatttaaagtaacctgaatttgttaatatggagcatgctggcagcttgctttcaaaattcctttgagaaattcagaatatataaatgtaacaggtttgctatggcacttccaaatttgctatcggactttcaaggaaagcagcgaacctctcctgtttgctatgggacttcctgattagggctaaatttttgtacaaaatctgtgagtaatggaattgttctgatttgaaacagagacctttggtttagagcatgatcactaagttagtaccggtattgtcggagggtgaactcctccatcggggaaccatgaggccctcttttttggttcggccgggggcagcgggtgagatttgagggcttggtgagcaaagttgtgtgacattaaggggtcagccccctcaaagacgatgagacaaaaggagtttatataggttcgggccaataagaagcgtaataccctactcctgtgcttagctgatcttatgagaaattacaagatctccttgttggagtagatcgagttgatcctcaggggcagaagctcccctcccttttactaggcttggttctccttttatacctcaaggggttaccacatgggcaaaaaaatctagctccggtggagaagtattttgcattaaatgcctgtcatgtctcttgatttgggaagcaagcgcacgtcatcttgatgatggggcctgtcaaatcctgctgcctgacacggggggcgcccatgtcagctgctattaatgggtgaaaacttctgggctcctgtttgcaccagcaaatgggaaccccaattgaccagggcggatggaccgactctggccaggatgagaggctcatcatgaccgatgggacaggacgggatgtacgccccctgacacatgcgatagtgcacctaacaccctgatgtacgccccctgacacatgcgatagtgcacctaacaccccgggtcccgtcggtcattcgaccggtcacaggccaatttaggcgcgctgcatgccacattaaatacggcgtggcgcgcctgctcaggtcaccattaatacgggtaggtgagcgctcgaaggtggccacctaacccaccgcacgtggcgacccgcggaggcggtctggggagcccgacccctagtcacatgagggagtggctgccgccttgcctccggcccggcccccctcgggggagggctacgtgatattggggggcagcctcctccgtctagtcgctgggaaggagtggccgccgccccacctcgggcctgactcccctcgggggagggccacgtggcattggagggcagcctcctccgtctagtcgctgggacggagtgaccaccgccccacctcaggcctgactcccctcgggggagggccacgtggcattggggggcagcctcctccgtctggtcgctgggacggagtggccgccgtcccacctcgggcctgactcccctcggaggagggccacgtggcattggggggcagcctcctccgtctggtcgctgggaaggagtggccgccgccccacctcgggcctgactcccctcgggggagggccacgtgacattggggggcagcctcctccctctagtcttgagaccccaggcccatatcaccgatagatattgttttaaattcaagcacactcctctggttggaaactttgatcagtcaggtttgaattatgtctcctctttatgcaaataatttcttttttttaggtaatgatcatttgatttagagtttaatttggcacaattggagtattaactctaagtcagggctaaattttgtacaaaatctgtaagtagtataattgttttttgacctgagacagagtcctaacatgatatcagagatagttgcaaaattttgtaatgtctgtgagtaccagaatcattctaatttggaacaaaactcatctgattaacaactttactcagtcagtgtgaattgtgcctcctcttaagtgcagatagtttctttcatttcaggtaatgatcatttcatcagtccgccgtgctctcttaggcctacatcatgggcaatcaagtgtggacctcgggtcatattggcaacatctacatccagtcagataataccacgacaagcatgcagtccttcaaatttccagtgtaagcatccatactcatccaaacataagattttgggaagacacgtggttgggatcgcgtgctttcaaagatcaataccctacattatataatctggctcgaaagaagcagtccactgtggcaaaggtcatgagcacaacgccgctaaatatctcttttagaagagctattgttggccaaaagctaatcaagtggaacgatttgatcctcaggctaactaatatagctctgttaaatgaaaaggacttctttgtatggtcgctccataagaatggtcaattttccgtcaaatctatgtatgccacgatcatgaactgtaatgttcggataaaaagagaattctgtgggacttgaaaattccactaaagatcaaggtctttatttggtttcttcacaagaaagtaattctaatgaaagataacctggctaaatgaaaatggggggggagacaaacattgttctttctgctatacacaagagacaatccaacatcttttctttgagtgtcctgtcgctcagtttgtttggagatgtgtgttttttgcttttaatatctcccaccctgtaacgccaaaaacattttcggtaaatggcttagaggggtatctaggtccatcaataagatgattctaattggagctagtgttgtatgttggtcaatttggtgttgtcgcaatgataaagtttttaatggtaaacaattatctaaccctatgcaggttatctttatgtcttcctactggctccacttttggtctacaatgctaccacaggaggagcaggatactatgcgtaatggtgctacactcttgaaatcggtagccaagcgtctcttattccactatgggtggcgtagttccataagaattgctagctaaaaaattttatgtggtttaacgctagtcaataataaaggggagttggggatttgtcccatcaccttatttctcattttgatttatttttatcttacctttttattagtattaaacttatggctgtgtgtcttatgacagaagccgagatgtaatccatttccattatctaaaaaaatactcatccacttactttatatgcatgaataacattattttcaaaactgaaagatcaaaggtatgttctgctgtggtggatgaacaaatagcctggtgaggatagtgaaagtggagtgaagacgaagcagagtatgatgcacgtcgtggctaaaacaagaccctcctattatggaaattatgagcaatgttgtctcttgaatcctttttttcctgctgaatctataactccgccgtctcatttcttcaccatataagtatgattgctgaaagagaagtgaagagatgaatttttttaatgactcgcacgagacggtgcgaagttctattgatagagcaggaaaaaattacaagattacaaccctggaggatcgtaaccaggaaaaagaaaaaaggataccaccacccacacaccgacattgccaacgaacaagcccaggagaaggctagcaccagagcggctgccgctaagcgtgaccgaccgccactacaccaacaaagggacacaaacaagatcgccccctaggggatgccaaaacgacgtctccaagaagagaagcaacggaaaaactgccgccgccgtccgtcgggactcagccaagactgggctttcacccagcaatcacccttgaggggtgagacagcacgacaacgcccataggaggatcgttgtcggtccggccaaggccggactgggttttcacccgccgctcaccggctgcgaatccacggctgacgcaccgatgctccaccaccacacaaactctgccaacatgtgggacccctgcaccggcgtcccccgccggccagccttcgtgcgccgaagaccacgccacatccaccggcaactcctcctcacacctaggtcgcctcctccactgccggccgcgcctctcgcgtcaagccggcttcctccaccggacgcgcctctcgcgccaatccggcctccctccatcggccgcgcctctcgtgccaagccggcctccatctccgccgcccgcgcctctcacgccgaaccggcctccgctgccatcggctgcgcctctctgcgccaagccggtctccgacccctccaccgaacgatgccgcgccggctagaagcagccgtctcccacgccctcggctagccgtccgaggccgtcatgcctccggtgaccgcagtcgcggtcaccaccaccacagccgctgctgtcgaacgcccagccactcacacccgactccttccccgccgccgacgtcaccaccgcctccacagtcacggccgccgtcgccgctgccaccagcgccagtcaccacctccgcagaccgctgctgcaccgtcgctctccgccaccaaggagccagcaacgccccgacgccgccgccatgccctccgccgtcgtcaccagccgatgccgccgctgctgttgtcgccagccgaccaccaaacccggccacccctcgaccgccgtcgtagccaccgcacctccgtctccagcgtctccgcgccgtcacgcccgtcgacgccggatccggccgcctcctcagcagtcgtcgtctggctccaccgccgccagttccggccgctgtggcatcggcaccgccgtcgccgtcgccctgaggacgccgacctcctccgccggcgccagacccccaccgggcaccgtcggaaacctccccgccagattcgcgtcagatctggcggcctcttccaccgccgccagcgcctccaaacctccgccgccatccccgccaaaggccgctcccgagcacactgccccgccgccggcttaactcaacgagaactctggctggccggcgtggatctgggcggtttctgcctcccgacgccggcagacctccccctgcccttgtgcggcgagacgaagcgaagcccagccgccgccgtccttgccgccacgcggctttgccggcggccactcgggcggcggcgaggcggaggaggagggagggagggcgggcgacggcggcctgggcgcctcccgtgccgcccgagaggagacgacacgagaggaaaaggtccgctatacgccccctcaagaggtgaatagataacttatagcctagcaggcgatggatcattagattgcattctatgtttctctttatctttctggtttgagcttgagaatgtatttttcggttggtcttgaactcttgaagtcacacctggatggatgggtgtttggtattctcgtttccttttacccaactcattttatttatgaatgataatgtaattttgataatttagttatccaaaaattgtgggataaaatccttatttgactcctaaagttgacctccattctctcattggcatgtggatccatgactaacatgtcagtaaattatcatggaaaaaatttcaattagagttgcttgtagttattttgcgcatcatgagcaaatagtatttatgtacataaaagaatttcttagtgcatcaacaatcagatggttttgagtgaagatataaaagttacgatgcaattttgcgcacatggttgtctttaaaatataacaattctatcgttcaatctttacgtgaattttaaatttatctaattatattttttattgtgctaacatatgacagtctttggtttaattttaccgtagcgttagcacggacaagttactagtattaaaggttcaacaatatatttgaacatacaaaattacaagaaataaacataatattcataaaaaattacaaaaattacatgcaaaaaatatttatatacttagataaaaataaattaaaaccatatataacaataaaattgcaattaaaaatatgttaactataatattacaatcataccatctaaatgctaggctttgttatatataattttaggtggctaaaattttaggaatcactaaaaaaatatcttaaattttttttaaagaactttcaaatataatagttgtagagttacactaaagttacattatagttacatttacattgtaatatctatataacttaggtataatacatatttctttacatacatacaagttaatataactagcatggtggcccgcgcagattgcgtggctagcatcattatattttctctcatataatagcatatatgttttctcattatattattcaaatatattaaaatgaaaacataattttaaattttgcaataactttacaaaactactaatgtgtaatattcatattatattttatatacgtgttagttattaattatttttaatatcaaattttagttatttgtaaattatatatattcctatatgtactctagacttgtcttttaattttttttaattccgaattttctgtaaattgtatttctatatagactctatgctcttcttctaatattatttatttttatttctgaattttcatattatattttatatacgtgttagttattaattatttttaatgtcaaattttagttatttgtaaattatatatattcctatatgtactctagactcgtcttttaatacttcttttttttaattctgaattttctgtaaattgtatttctatatagactgtttgctcttctttcaatattatttatttttatttctgaattgttattattactaattgcatttatatgtggactctaaacttatctttcaatattctttaattttaatttcgaatttcagttacttctaaattgtatttctatatttgtattcctatattgaccttaaactcttcttcccatgttattcttaatctcgaatttcgaattttagttatttgtaaattgtatttttatacatactctaaactctacttttaattttattatatttattccaaattttagttagttttgaattcctatatggactctatactctacttctaatattccttatttttttaattctgaatttctacttttttcttaattgtatttctatatggattctatactctacttctaatattccttattttaaattgggtgaatagctaatatgctccctgaagtttcacttcgggctcagtttagtccttgatgttttaaatcgtccaaacaagtcctctaaattaatcatttgggttaatatagtccttggacccaaaaaagtgccacaaattaattatttgggttaatatagtccttggacccacaaaaagtgccacgtgagcatgtcaagtcatcctcgcatgtagcggtatgaatgaaatgaacattctacccttatataccatataaaaaagaaaacaaatatttcacacatgtatggacattttagaattgtcacttacgattgctgcagcctaatcgtataaattcctttgtcggccaccctccgcaacaatgttgggcctaggttagcttgttttttttgtcttttatttcttttctatatagtatataggggtagaatagtcatttcattcatatcgctgcatgcgaggatgacttggcatactcatgtaccattttttttggtataaggactatattaacctaaataattaatttggaggacatgtctagacgatttgaaacctgactaaactgagcctgaagcgaaactttagggaccatattagctattcaccctttttaattccaaatttctattatttcctaattgtatttctatatggactctatactctacttctaatattccttatttttaattccgaatttcagttatttcctaattgtatttctatatggactctatactctacttctattattccttatttttaattccgaatttaagttatttcctaattgtatttctatatggactctagtctcctcttctaatattccttattttttaattctgaatttcagttatttcctaattgtatttctatatggactctagtctcctcttctaatattccttatttttaattccgaatttcagttatttcctaattgtatttctatatggactctagtctcctcttctaatattccttattttttaattctaaatttcagctatttcctaattgtatttctatatggactctagtctcctcttctaatattccttatttttaatttagaatttcagctatttctaaattgtatttctatatggactctgttttttctttttctccgattaatgtgagaatttctaggccatgagagcgaacgtggaggctcatttttctattcctttaataatataatagatagatagttatataataattatagtagaggtagtatattataaccgtacaataaagtttcactcagttttttagttgtctcgaagttttctcaggtgtcttaaatttagcaataccttgcaatttgataaaagattttctacggctcgaattccttttcctgttttatcgaccacgatttttaggatcttatatgttagatttccttccatagtcaagaactttttttctgtaccattaattggagggttttgtccaaattaattgtattgtatggcagatactgaacattattaatggttaaaacacctggaggtgacttaaaacaagagaatcatgtcattaacgaccgctagcttcctaacttcaggtacggttggggaacggcgacaatcggactgcgcatgacatgtttcccagacacccaactcaagcttccctccaccacctcgccgccgccgccgccgccactcaccgtcacgctgaagcccttcttctcgccgacaccggagaacaccagcttctccggcgacacacgcatcgtcagcgacctgggtatctccagcttcatcgtgtaggtcgacctggccggcccgacgttcgtcaccgtccggttcaccgtgaacggcggcggcgccgccgacgacgacgaccgcggcagcggcaccgtgatggtcgggtagttgagctgcgcctccggtatcttgttcttgtccagcttcccgcagctcaagctctcgttgcgcacgatcgtccccagcccggcgtctccgagcagcgcgcagatgtagccggcgtagtcagcgacggcgatgtcgtacactaggcctgggtcggcggccctcgccgggttgatgtggccggcgccggtgaggaacgcggtcgccctctcgtggtgttcgtccaggatcgggttgccggcgccgtcgacggcgtcggacgtcgtcaggatggctgacttgatggcggccggcaaccagtccgggtggcggctcttgacgagcgccgccacgccgctcgcgtgcggggtcgccatggacgtcccggatatgaccttgaagagcccgccgcctccgccgccgccgccgtgctggaggtgcggcggccatgcggcgaggatgttgagccccggcgccaggacgtccggcttgagcacgcccggggcgaccttgctcggtccccgggacgagaaggaggcgacggtgggcgccgggtggacgctgagcaacgtgttgtcgaacaccacggtggcgttgggtttgcagccgccggctgatgatgacgacgacctagcgtactccgtgatgttgtggccaccggcgacggtcacctgcaccatgcccgggccgtagtcctcgaggacggtcgtgtagccttcgctctcggtgttgatcagcaccacgccgccggcgccggtggccatcatggcgctcacgacggactcgtcctcgaccggatcggactggcagaccacgaggtggccggcgacgccatctccgacgattccggcgagctcgttacatttcggttgcttctccgagaagtggagtgggtagtacgaggtcgaggagttgggctgctgggcgagcgcctggccgtcgacgagctcgccgttgccgagcagcacggtggtggagaagctccggccgaccgagcctgcggcgaccgtgagcagccacggcgcgtcgttcgagaccgtcgacggctcggggccgccattgccggccgcgcacaccacggtgatgcctcgcgccactgcgctgaaggcggcgatggcgatggggtcctcatcgaaggggggactcgaccacctcccgagcgacaccgagaggacgtcgactccgtccttcatggcctcgtcgaacccggctagcacggcgtcgtcatcgcagcctgagccgttgcacaccttgtacatggcgacgtgcgcgccgggcgcgatcccggccgccgttcccgcgcccaggccgcggtccgacgcgccgccggcgacgaagttcccggcggccgtggacgcggtgtgtgtcccgtggccgacgtcgtcgtcgccgccgccgccgccgtcaacgaaggacttgacgccgacgagcttgttgttgcaccgccgcgtggcggcgacggcgcaggagcccctccacctcgccggcggcggcgggacgccgcggtcgtcgaaggaagggtgcgcggcgtggacgccggtgtcgagcagcccgacgacgacgcccttcccgtagccggcgacgtccctccagaacccggcgcctctcgtcagcccgaggaactccggcgtgtgcgtcgtcatgaggcgcagcgtccggcgccccgggaacgcgcgcacgaacccgggcttcttggacaccacgccggcgagctcggcggcggtgagcctcgcggcgaagccctcgaacacctcggtgtaggagcggatgatccgtgcctgatcggcgccgtcgtccatgcgccggcctcccggcaagaaagactcgtgccaccggcggtgcccgtcgtcgtccgtggccgcgccgtgcggcggcgggtcgacgagcacgatgtaagtccggtaggcgtcggctggcggcggcggcgtgccattcggagtacggacgacgctgcctgcttcacctgcatggatatagcagagtgcaggtgcaggagagagcaaggaggctagagccagtaacacaagaagattgatcatgagatttgtaaaggatgacattgatgggaatgcaattaagctagcaagccaagcttcatctttatatatacatatagatatcaatcatgaaggcaaaatgaagcacactacatatctcagcaggattaattgcattctcgtttctctgaatcgttgtagatggggcttgcatttattttcgtgtgatcaaataatcaattgagcataggatggtttatgtattaaaggcttggattaattttctccctccacctttccaagacaaaaaaatatttaatatgcagggagggatgcatatctatatcagtatacaatttggtataaatgtagatttgaaaatcaaaccaaaacaaagggtatgtattgttaaagatatgaaagttatatgtcagaaaatctttgccattaagacataagtctctgtattaaatgcccaacttgatgcatatactccctccatactcataaagaaagttatttaggacagcgacacggtctccaaaacacaactttgatttcttgtttttataaaaatatttattgaaaagtgatatatgtatacttttgtgaaagtatttttcaagacaaatcgattcatataatttttacattttcaaactcaacaacttgagagttatttatgatttatattcctaagatttgacttaaacattgtcctagaccacttcctttatgagtatggagggagtaccttatgacctggctatacttatgacgtcatattatataaaaaaagttcaaatctttcaacagtatttacactataaattccatatattacattgtaaattttatatatgtatagcgtagttttcttacacagtaaaatttgctgtaattttttcttatattcaggatactgttattatctgcttaaatcatataagcaaaaggacaacgacaaaactttagtttgcatcacatgatgaaaaaattgattgaaatcaaccgaaaaggtggtgccataattttaccaaaactgtttagtttattagcattttggctctttattgatttgagaatttgttttattattaatgtgagaaattttagctttcccgattaatatgtgaattcctggcctttggcctcctgaaatttccgtggaagtgcttctatgagggccttcttcagttagtatgaatatattttatgattttctcaaattgagtagtttagcatagttcctgttagaaatatggtcatatatcggcatattttaattcaaaatattatgacaataatcatggcatgaacaatgtggggtgatctaatgataaaatgtaacataaccagagcatgcttaaagtataataagcatcatgaacataccaagaacgcaattctaacagaggtatcaaagaatgagttaacagtagcagaaagatataccccgagaatgtctctccgctggattgtgaggcagaactgcctccgttgacgttgacgttcgcagcggctccggctcccggcgcgccatctccagggacggcggtagctgcgccggctccaggtgcagacatggtggagacgacgacgaacagagcagaagtcgagagcagtcgtgcggaagcactccccaaaaacttgatcacccgcctacctggtacagatctcaggcgaaggtatggttccggaggccctgctcgttccgatctctcgtgcacgcaagcgatcagaagcggggaggcagaacagaggcagcacaagcgcgcggaggaggaagaacaccagcaagagaaagcaagcgagagagttctgatcggattagcggcctccttatatagcacgagtgattccgccagttgccgcacacgccattatggaggcaatcgtgggatcgtgggatcgtgcacgcgccgttacggaggcaatcgtgggatcgtgggatcgtggttgcaaaaagggtagaggcaggcgcaacgcacgcccgccacgccattcccacgccctcgccccggcccggccggctcggcgcgcgcgcgtgtggctttccgattcccacctcaaccggtcaacagggagcctccaataactccctatttaagttgagatactcctcgtttaattcctgaggtggtattattatccttaacatttattatgggcctttgagatttaatagaataaatcgggcctagtccaattattctaacaatccccaccaaatttcaaggctcataagaaatattctcaaggttgtgcctgtttgatataccagtgttttggtggagactgttaagttgaacttccacataggaaatgagctacatcagaccacaactgaacaatggactatgccttgaattgtcagtcttgtgtgatcaggtttcactcaaacccttgactggtactgggctcccgttcgcatcccctatgtttggagcatataagtcaaactccaggccttttcatgagtatctagagatcacccaaatctcatagactttgactagcagtcaaactcatataggtgtgttccttctgagatgttctgcaggtcaacatctctgcttagaaaagccactcggatcacattaaggcatgagccatcctaccatgcagaaaagaagagaagtacatcatgaaaatgagcccttttcaagggtctcttctctcagtcacacaatagtttgtttcgccatccaaattcacgggatctccgatcacaatagacaggtttccactattgtgcaaccttaggtgggtatcaagcccatttccctcgatgcactgtctatcacattacgtggtagccccttggtaaactgatctgccagatttctagctgtttggacatagtcgaatgctatcactccggagtttttatgctttctaacagatttcagtcttctcttgatatgcctagatgacttcatgttgtcctttgaactgttcactttaataatcattgtttgattatcatagttcattaggatagctggcactggtttttcaaccatcggcaaatccatcaggagttcacgaaggcactcggcctcaactgtcgcagtatctagtgctgtaagttctgcttccattgttgacctcgttaagatggtctgcttgcaagacttccaggaaacaacgccacctccaagtgtgaacacatattcacttgcggcttttatctcatcagcatcagatatccagtttgagtcactatacccttctagtaattttggatacctggtatagtgaattccatagctcatagtgccctttagatagcgcataactctttccagagcctgccaatgatcatctcccggatttgagacaaaccggctcagcttgcttacagcaaatgagatgtcaggcctcgttgcactagccaagtacatcaatgaaccaatgatttgagagtatctcagttgatcccttgctattcttcggtttttccttaatagcacgctgggatcataaggagtaggagctggcatgcagtcactatatccaaagcgactcaaaaccttgtccacatagtgggattgcacaagtgtaatcccaccctcatctcctcttagtagcttaatgttaataataacatcagccactcccaaatccttcatttcaaaactcttggacagaaagtccttgacctcctcaatcacattgaggctggtcccaaagatcaatatgtcatcgacatataagcacaagatcactccttctcccccaccatagcgatagtacacacatttgtcagcttcgttcacaacaaagccaacagatatagtgtggtgtcaaacttctcatgccattgcttaggtgcttgcttaaggccatacaaggatttcaacagttta

SEQ ID NO: 9188 - DNA, 16442 bp, Oryza sativa
cctcagctttataggtcttaaagtaatgcaatgctttcctttgttttcaatagatatacataacaaaatctagtgcaatcatctatcaatgtcatgaaatatttctttccccctttagtcaacacgccgttcatttcacacaaatcgaaatgaacaagttctagaggtgccaaattcctcgcctcagatgccttatgaggcttgcgagattgtttcgattgaacacaagtatggcacttagaacctttgaccaaagtgaattttggaattaaactcatattagctaagcgcgtcatacaaccgaaattcacatgacagagtcgcgaatgccacacattagactcaccattctcgctaatatggttcacaacattatgattattacacatgtcatccaaagaaaagcggaacaagcctcctctgtcataaccttttccaacaaaagttccatatttagatacgacacatttattggattcaaacacaagtctaaaaccttctctacacaatagagagccgctaacaagattcttctttattgaaaggacatgctgcacgttcttcagctgcacggtctttcccgaagttaacttcaaatcgaccataccaacaccatgaacagccgcaagcgacccgtttcccatcgacaaggaggaacctctcccgacctgataagaagaaaatagagaaatgtcagcacatacatgaatattagcaccagtatcaacccaccaatcagatgaatgaaaaacagagagaactgtaggtaataatttaccgtaccccgatgtttctccgcccttgctaatgaccatattggcagacttcctgtctttgcgcttaagacagtccttgggccaatgcccatacttgccacacacaaagcagtctccatttgcctttcccttgcctttcttcttaaaattggttgtagccttgggtttgccatcaggcttgactttcttgttgttgtgggatgcatgagggttcttcttctgtaccatattggcactagaacctccctcaacctttttgtgccggttgtcctttgccctcgccttctcctcaacacccaaagagccaatgagatcagaaacactgaactcttgtctcttgtgctttagagaagtggcaaagtccgaccaagaaggtggcaacttggcaataatgccacccgccacaaacttgtccgacaactcacagttgttgttctcaagttccttagccagcatctgaatctcatgagcttgttctactacagaacggtcatcgaccatcttgtagtcatagaactgctccatgacatacagctcactgccggcgtcggaaactccgaacttggcctcaagtgcatcccacatgtccttcccggaaggcatgtgcatgtacacgtccactatgttgtcagcgagtatactgatcaatgctccacggaacaggcaatccgaagcctcgaacttaacctcttcttcaggagagagaggtggttcacttcgtttaccccgtgaaacatagaagcattgcatcgctgtcaaccacaatagtgcacgtgctttccacctcttatagttagaaccatcaaatgcatgtggtttcagagcaaagccaactaccgaaaatgacctatcaggtttttggattgttggaaatatggtcatatatcggcatattttaatccaaaatattaagacaataatcatgacatgaacaatgtggggtgatctaatgataaaatgtaacataaccaggagcatgcttaaagtataataagcatcatgaacataccaagaacgcaatagaattgtgactaacaggacaaacagaggtattaaagaatgagttaacagtaggagaaagatataccccgagaatgtccctccactggattgtgaggcagaactgcctccgttgacgttgtcgttcacagcggctccggctcccggcatgccatctccagggacggtggcagcggcgccggctctaggtgaggcggcagcggctacaagtgcagacatggtggagacgacaatgaacagagcagaagtcgaaagcagtcatacagaagcactccccaaaaacctgatcacccgcctacccggtgcagatctcaggcaaaggtgtggttccggtgcgcgcaagcgatcagaagcggggaggcagaacagaggcagcacaggcgcgcggaggaggaagaacaccagcgagagaaagcaagcgagagagttctgatcggattagcggcctccttatatagcaggagtgatatccgccagttgccgcacgcgccgttacggaggcaatcgtgggatcgtgcacgcgccattacagaggcaatcgtgggatcgtggttaagtgccgttacggaggcaatcgtgggatcgtgcacgcgccattacggaggcaatcgtgggatcgtggttaagcggggaggcagcacaggcgcgcggaggaggaagaacaccagcgagagaaagcaagcgagagttctaatcggattagcggcctccttatatagcaggagtgatatccgccagttgcgcggaggaggaagaacaccagcgagagaaagcaagcgagagttctaatcggattagcggcctccttatatagcaggagtgatatccgccagttgccgcacgcgccgttacggaggcaatcgtgagttgccgcacgcgctgttacggaggcaatcgtgggatcatgggatcgtggttgcaaaaagggtagacgcgacacacgcctcgccggctcggcacgcgcgtgtggctttccgattcccacctcaaccggtcaacagggagcctccaataactctctatttaagttgagatacttctcgtttaattcatgaggtggtattattatccttaacatttattatgagcctttgacatttaatagaataaatcgggcctagcccaattaatctaacagttcctactactaagacacaacttgtgtttaaatgtaggaatatcgtgattcaaactctggtagatggatgagcatttatagatacatgaatagaagtgatgacaacattacagagtttgccttttcgtttttaaagtgaccgctctctccggtttaccggaaaccaataaaaccaatgactcatgccaatgtcatacggaaattggctgatatcgactggaaccgatacctagcggtttcacgaaaaccaatcgttttatgaatcctgcaaagacaaattgaatcgaataataatttgttttgaccaaagaacagcaggggaggcccatattgtaataattttcagtaataaatcgaagaaaaatacaaaggaatcagggatcgtgtaacaaaagccactgtgttaattctttcgtgcagcctccatttacccagtatagatgcagaggagtatcttctttggaggtcttcccacattgctaatgagacctcatttggataatgtgaactggaaataatttcccactcaccgaggggtaacttttaatcctacaacctatccatccattcttccagattcatttcatcctacccttatgttccaatcccaatccctcatatcccattatctaaataggccccgagggatgaacattctcaagaaacaaaccattgtgattgttccatattttccaataagccacaagggaatatccataaacatattccttggaattgatcatcgtccgttcaatagaaatcatagttctgattcccaaattgaaaatgaagccaatggaacccccacaggttgtactaaaattgtaatgttagactcgcataaagtcaataacatcatatttaaatagggaagtagtagttaattatgttcccctttagaaacgtaaaaaatttgtattgattaaaataccaacagtattctaacatttttggcacgtataattaactcctaaaattctttacattgtggataaggttaacataacattaactatcaataactttcaaaaatatttagtttgtagacattagaaaacgattatagattagtcttaaaaaatattttaaataaaattaaatatttatttttatatatatttgaagaccatatcattgtacaaataatcaagaacaatggaaacaaagggaatatagtataggttattagttgtcaacaatcggagacattaatgttgaaaaaagaaatgcctaccaacgggtggaatagagatcgctagtttttgaatacgcgtcgccggcacacatttctattgggattaggtagttaaactaatatattagtcttagctaacgtcagtttaagataatgacggtagtagataaggttttctttttctgcgagatttattttaactaacaaattgaaaagaaaatctatatctgaagtcaaattttcaaaattttaaaccagatttgaaaactttcaactcgaaattttaaatttttaagtcaaattttgaaaactttcaacttttcatcttaaatttgaaaactttcaactcaattttgaaaactttcaactcaaatttgaaaactttcatctcaaatttcaaaaactttcaactcaactttgaaaactttcaacccagatttaaaaacttttaactcgaggtttgaaaactttcaattccaaatttaaattttttttaaattaagatttaaaaattttcaagtcatgatttaaaaacttataacacaaaaaatttgaaagcacttgtgctgaaaatttttaaaagaataatcagaaaaaagagcaaaaagaaaagaaaaaaatcgtgaaaacaaggaaaaacgcatggaaaatattcgctaaaaggcggcgtgtggagggtgcgcgcgccagatacggatccggcgcgcgcgccaattagcaaaagccggtggaatgggtcaatttacattaacggaagaagccttcgagtggctgtgtcaaaataaatgcaaatggaggttttctaacaggagaagagagatggtgttggtgcggtgatgagaaatgacagaggtgtgttcatggcaattctctcagcattattcttatatttggcaatgctacgatggaaggtcatggttgaaatagattttatagaggtggtaaaggtggtgggtgttaaaaggaattagccggccatggaaatccaagatttgaaatctagcttgagtttttttttttttggcaggctatgaagttagtataggttcgtcgttcgactcacatggttgcacaaaggctagcgaagtaaggtgaatttgacattaagattttaacataggtgtaatacaattgaaagtatgtgtatgattttttctagattttttggtgacatttcttagttggtgtgcacgtgggtacacgtgagggcctatgtacatagaatatgttacaccttgtgcgccaccgcgtcatcggccgcccgggccctgggtgtaccccccgtgtacaccaactaaaaattatcacaaaaaattataggaaaactcatacatgtcgtattacatctacgtgcaaagtcgtatcttcaaattcattctacatagagaataacaaaaaagataaaattttgacaaaattgcaaccttaaaactgtcagattttttgtttttttgttacggctaaaatataatgaatttgacgttaacattttaaccctaggtgtaatacaattgaaagtatgtgtatgattttttctagattttttggtgacattttttaattggtgtgcacgtgtgtacacgtgagggcctatgtgcataggatatgttgcccagttgtttcacaacctaggtctcggttcgtccagattttattttacctatgttggccggttaatttaggtgaataaagtgtcagcatagtttaacagttactcgtgttatttatcttgctacgcctatactcgtattagatgttgagacaaacggaccaaaatatacagttgagtgatgtaaaagtacacagaaatacaatttcgagcaacttttgagttatagcgcgtcgattaaaccgacaaaatatgacttcggtttgagctatggcacgctgatctagtgaatacattcatgccacggtacaacagaccgaccaagaaggtataactatttcaaaatcactggcagttcaaaattaacaagcatcagaatgagccataacttcatcaaagctattccaagtcaattgccactatcagcaacaaacaatcacatcattttagtgaaggcaatcaccccacatatgaacaaaatcgacaccatggtgatgtctgaggtgattcttgaactgtcgaaacttaagtctatcccagagcgatatcagcccaatcatttgggcctctgaataatcaaaagagcattaattgttttttaggcttctcatctagtcatctactggttcattgttggacaggatcttcaatcttcagatcaccgtttagatctccctcgctttttaggcttcctttcttctatggattcatcaatgggttggtcttccccactcttcaggtcacctcttcggttaccgtatttcctttttggtttggtcacttctaccacttcatccctgttctttgacctgatcaatcacacaaaacagtagcccaaatactttagctaatgctaaatccacaaacttcaaaaaaacaagatcatctgttagtctttcttacccttttggtaaaggatctaagaaatttacgacttctttaagagcattgagagcaatcttcttaatctacaatttgttaaaaaaacacaatcagcataagggtagttatcacagaacattacaccgcatgagcaaaccagatagctgaatacatgcgctctaacctctagtttatcttctttagccctgtgatcagatggaagacgtctaaactctccggtcagcttaacacactcaccaacattttcaggggaaacaaagtctagagcaaccttgatgcaagactgcacaaatcagaatgggtcttagttttctggttctgagcccagattcttgatgccgcattcataaatatttaatgggaaaagtggtatcaataaataccaccaaaactttatattttcaacaaataccacaggatgggggagacagagggaagtattcagctgcacctttaaatttctcacttggtgtggacatccagcaggaatgaaaactgcatcgcctagcttctgctcgaatgtccatggttcaacacctaaaattatgcatgccaacagacaagaaaaacaacattatatcagtgttataaacagctttggaagagagatgacagcttcaaaatagaatgttatctaaccgtgttcttccttgagctttctcttatgctccacagttaaatagaaagtctggtcatgaattgggtgagaaacctgcacattgtacagagctattgctcagaataagaaaataaaacatataggattcctatataatgtgattggacaaaaaaaagggtacatttttcactggattgcagtgtatgtgccgaaattctgaggcatgcttccgaagataatcttgtaacttctcagaatcttctcttcggaaaatatcccacaaagcgccaccagttttctgttggtctgaacagtctgaatctttgcgtttgaatccactcctgtcaatgtatccttggttgtctgaagtacaatgagctccagcatgcatcttgacagaactattaacctcgtgattgtgttttgaacattgtgttaattcactttctacctcagattgacaaaatgatggtttatccccaatatcacttccagaatcatcaggtggtaaagcattaatgtccaaacctgcatgactcagaaaagaaattagtaaaccataaccagacaaacaattcaatttcttgccagctcttgattttaacaagtaaagttttattatttacccttagtactttggttagaggtgtgtttgttttccatgttacatgagattttcgatgcttcatcatcagctttacccttggcgcctgattctgaaaccccaaacagttcatgaagatcttgttctctcattttcattttaatttttgctatcttgtcaagctgttcagtgtcataggacacttcagctgtgtgcatcaagatatttacctggtcaaaccaaacaccttttgtaattaacctttataccatgagaagccagtgaaacccaatcaatatataatggggaagaacaaataatttatggtaagcaggcctggcaatgcaatttttattctggacaggatgtaaaagctataacaatctggggaaaaaaatatcatcatgccaattatagaataacataccgcatcagacatgtcgcaatgaagcttggtcacagagtcacccctgcctaactcttcataacatccataagcaatataagtttttggcccaagatcaggcttcagtacaccagcaggaagcctgacagcaagatttagcgggccatatcgtggatcagtatactcgggaaatggcaatgcagttataaactcagcaccatggcgaggtaacctctggtcaaacatactagatggtggccaatcttttagcttaagcatctcaggccaaaaggtcatcggatgtcttctacctctcatataccccataaagaacatgtgtatgttaatttccacctgcagtatcaaacaaaggtctgtctaaataaaaacaggcacggatatcatatttttaaaattgaagtttcaagttatccatagataaattaacaaagtttccataaacagaaaccagatatcagggcaggagctgccaaatcttatttgtctaaaccaactgtaaacaataaggctcgcaagaatagaacagaggggataagaagacacagtgctgccaactcacataaaacacaggaagaaccaaccacttctatgcctaagaaaaatagtacaagtaaggaaggaccgtccacttctatgcctaagaaaaatatagtaatgttctatattagggataatgttattctaaaaggatagtcaaagttgtacggcctataaaatcaagacggaacactcagcaacaaggaaattaagagttccaaacctcattccaatcaaggcaatccactgccttaacagcaaagtgctcatcttcaacatcaccattggttttcttctctcgcaatgcccgccacataaccaatggctcccagctcagaccagatgttaaccgaagagcatcagaaacaataaccggttcaccttttgaccaatgcatctgaaagtgcgacaggtcatcctcctggatattattggcatctggacagtacaagtagttatcacttgagccctttctgtttgctgcctctcgagtagcatttgttcttatcttgcttgtgtgataaaagcaagggcactgatcacttgtttcgtttattgctttatcaaatgcttctctcttaataactttgttagccctgtgttctaactcagaaagcataatttctggtaataagcatctgagtaccaaagatgaagcaccgcagccccctatttcctttggtggacaaggtatactgccatcactattagctttccacagtaacaaagggttatttgggtccccagcaacagccatgtcattgcaagtttcagtactgggggtctccatgtgcctcttcgaagatacccttttcttctcatccttggaaatattaccaaaaacatacttctgacctctctcttcccactgcacactctttgcctcttctcctcctggaatctcacctttgcgaagctcccagcagcatgcaaggcacaagtcatacgaacaagccttgcagcttctatgaaaatcaactatcgaagttttgcacctatcactacaataaaagaataaaaaggctgatcaaatgctcagtgccacaatatttatggcaaaatgtaaacagggaaaatgtttaaccaataaacacgctcatccatatcacaatcagcttgttccaactttacttcatccatagaaacacctgcaaataaaaatgtaaataggcagttagaaaatcctccaatacctgaatgcatgaaggaacaccagaacagcataccttgtaatctaccctctaattccttctccttcatctgctcctgttgaagttctttcaaccaaggaagcaacaagtctacaatacgaaaagcataacgtcgttgattttcctcagaaatcttcttttcagggggctgattcaatatgacagggcaagttattaatgccagactgtaaagcaatcttttgagcacaaacaaatctgtagaaaatatggaaacactagggagggataccaagtacataccttttcaactcctatcattcttaggcatgccttgcaattacagttctttctacaatatgggcattttgcagcaaaatcaacttctgacaaacctgggtacctatttatcaaaaaagttttagtgtagtgcaatgcacaagatcaatgtattacagccatagatcaatggccaacaaaaaaggtattaaaaggaacatcaaaattggagtagcacagtcatcaaaagaaaataattgaagtataaaactataataacatttctgaacagtggcatgatacaatggatatgggtagtccaattagtagatgacaagattgagacaacttggcataccatcgtttcatgcatggctcacagaagcgcttattgttgcatgatttacaccaaatcaccctccctttgtcatttctttgacactggtggcacatcaaagcattttccccagtgagcatcttcttccccttctatatgatcaaaaccacacaataattttcaatgcactcataaaaaaactgtggagtttccatacagaacatataatgaaatctgagcattaccttattgttcgcatcacacatttcatcctcaatggatatggtattattctcttcttcctcttgtttctttcctgcacctcttttcttcgattcttttgaaggcttcatcattatcgcttcatcattctgtcaaggaaagaaattgtaagtactgaaaaatatggttaagacttaggaggcagatttttattagcaatacctagcgaccaacactcaccagaagttcattaaattttcgatttctctgagctaaagtatacacctcccagaggttacaaagcatcctattaaaggttttacacataccaatgatgtaaggtttacagcacaggactcagaatagaagcacagttacaattccggggaaaaaaatattggagctaaaactactgcttatcaaagccagacaagacatcagagcaccaacgagccaactaatattcaagatctaaaaaattgggaaatgctcacttggtcagcagaccaactcattggcagagtattcttcctggcaaggaaagcaggattcaaagtactttgccctttctcaggtgcaggaattaattcagattaatcaaagactgaatgtgttctgccatgctacaacaataaaggagaaatggcctgcccagccaactaggcccatttctccaatctactttctttcaaaccataaaccctagaaacctccttcccctctctaaaatagtagtgacagcagtggatgtcacaacaagcaacagtggtagggagtagtgacaacagtggatgtgacaatgatagcaacaagcaacagctgtgcccaatagggacatcctgcagtactgtgtctccaattttttagtgttagttgagttgaactattgctagttgaatctatagatgttcacctctatccatgcacgccatcgaagacataatatctgttgtagtagtggcaagtgcttggagttttaactttgcactagaccgagatacagctgcctactgcttggacttcgatgcaagagaagagtggaataaccaggctgagttctaaacagctacttggatcgacaacatccttgttttctatgagcacactttccaaactactaaataatgtggactaaatttctatttacaagttcttgaaaaatcaaataaatccattttccaaatttataacagttaatacctaattaatcacacactgattacccatctcgttttgtgtgcggcatattggcccaactaaaatgctctccctaacagagcataaggatgtcagcacacgaaacaaatgaccagaatggacaaagtagtagtactcataaactgaccaaaaatatgaacagcattagcaatatcaggtctagtgacagtgagataaacaagactacccacaatgtggtgatatcaagagggatcctcaataggtgtaccatcagtagaatgcagctacaagaagggatgaaaacggttcagaaagtatccagttttcggatgtgttttcagaaacaaaaagtcggttggatttttttcaaaatgtttcagattcggaaacaaattaggaattttttttctcagagacggaaacgaattcggtaaggccactatccgtcggaaacaggaatcagtcggagaatgttttcggacttctttctcagcatcggaaacaaattacttttcccatacagcagattagctttagccttctctactctagatgtttagaattgtaccgagtattgaggtaattagttgaatggagattttttttctagtctgctgctttatatcaatttttccatactacttacatatagatgaatatagttcttaaatattataattctcatgaaaagtgaagtgtgcaattaattgtattattattaattgataaaaaatagaaatgtcaatttactgttttcaaaaatattgaactacatctcttcattaatatgagaagctcatttggagttgttttcatattcctacaaatatttgttaccgtaatcgctctggttggtattcgctttgttttcatattcaataatgttctatcccgattttgtatttggggtttcgatttcaattccaatactgaaaaaaatatgaaagtggaaaaggtatagctagtttccgtccattcccaagttgttttcatccctagctagaagtgaagatccataagggtcgtagctacaagtgaagatccataggggtggttgtagagaatgcaaaacctcaattcctaagaaagaactaaggcctaaaatcagtcttctgaaattgctcaaggtgcttttccacatggaaatgtggccaacgccatcccccctaatcaacatatcatccacatataggtgaagcaaagtacatcgagcatggcttgcgcaatggggcctccaagcgacatgcgcacgacacaaactgcaagcgccgcaggtgggcaaggtctttgaatgagattttggggcgattttctggtgaggaccagtttctcttctcaccatggtacaaaaaaccgaaccatgtcaaaccaaaaaaaatagaaaccagcactcactagtaggggtgggcattcggtctgaccgaaaaattcggtctcggtcttcagtctttcggtcattttggtctttgaaaactcaggaccgaatttcaccccaaaaaaactcggggccagcaaattcggtctcggtcttggtctgactgaatttggacagtttcaggagataagtttggaatgaaaaaatttgacagcacttcccctcttttcaggcattttttcatagttatatatcacaaaaatacaagataataggcaacatcatacaccaaataatatatcacaagataggaagattaaatagcataggtctcaagtctaaacttcacagtcacagtacaactcacaagtcacaaataaaagttcaaggttgatgagtacattacttgcaaataaaagtcattattatgcactggattcaaatcaaaggagtagatcaaaaaataatcataatacttacatcgcaagaatcaacagatgtagccatcgtaacggattcacagccgttggcttgctgcctccccgatgcagacggatgcggccggcaggatggaggcaccgagctggaggcggggtagcttgagagtggagtggagtggagacgaggaggcggcgcgatggatgcccgcggcgcgatggaggtgaagggcggaggtggcgggatggtcgatggaggcggaggcggaggcgtgaccgcgcgatggcgctcgacggatagggtagagatggattggaggcagcgctggtgaggctgagtgggagtggctgacttactccctgctggtgctgccctctagggttttgtgtttcactaggcttattgggcctcctaggcctattgagccacaaatcggttttctcggttaactgaagccaatgaccgaattgcctgaaaaaaaatcggtctttcgacagttgagaccgaactactaacagaatttctcggtatcggtgttttcggtttggtcctattctgcctacccctattcaccgtgttagtttgcttcgaggaccaccaatgcaatttgactagcatgatccaggtgaactaggtagattttgaggaaaatggctgaactggggtattatgaaccagcggttcagccaacagatgggcccacctaggaaggaccaccctgcatcttaaggcccaatttgatttattaaagaaaatgaggaaaaaagatggagcggtagggagtcaaacataggttggtagggtggccacattgtttaaaatcatgttgtatgctaaatagctttggccagttcagcaatcaacccagtctatccaaccggtgagccgatgaaccggaccacgagcggttcaatggctagtcctattcttttaccatgcttctcgcagacaatgcaagttgtttggggtggcgccatctacacgaggagataagatctcttttccctcagctaggtcatccaaatgggccaatttggtatatttgttttcgataagcttcaagaccaggatctacttccgtgggtttggcatactacagcaagcaacaacatgtaaagctctggatattgggtacaacttacctttctttaagggcttcaggatggggtccaccaacacccgtccctggtaccgccacccccattagatcataatcgcttaatcccattagggccttattcggtttggaggggattgaagaggattagaggggattgaagaggattagaggggattgagaaggaataattccacaccacagtaggtgtggaataaatcccctccaatccctccctcatggggattaaccgaacaaggcctaaggaaggggattggaggggatttattgtacacctattgtggtgtggaattatccatcctcaattccgtcgaatcccctttaatccccaccaaaccaaacatggccttaatgtggtgacattgtccgcaataatcttaggtttctttaaaaataatctatataacaagtcgagatgtaaaaagagtctgtcgtttgagtctagaagggtgtgctacagctcgaggacgagctactaaaaaagaagggagcaatgtgatggacattgggatgggagtcttgggcccaaacccctgcacgacatacgtaggtcaatggataaagtctgttaagatagagcaagttagaagagaaactaacctgagttagaaagacattatattaagatttatcttagtgcccccaccaacctgccttctcagcatgacatgatcttgctccgtcgcatcgttgaggtccagagccattcctgttacttcctcctcctgtaatctaatctatctccttttgccccgaaatattcttgcacgtgaccttgtgacccatcaatattgttggaatcatcaaaaataggagcattaggactaggcaggtgttgtgggaggtgttgcataatgagtgtataattgtactaaaaggtgtatgagatggtggtggtggagcggaagtgggtagagggtgctcagaagaagtgggtgtgatggaaatagaagtaccaggattaagggttgtagagacatcatcactagatgaaataggaggaaggtacaaactctgttagggtctatgaggtttgagtggagggattataaaagaatggatgaataagcaagtatgcaacgagaggacgatacccaaggaaacatattcaactaattggaaggccaacttagtccgctcatatggtgcaaggagaacaaacatgtgcatccaaaaacccaaagatacaccaaaattggacagacaatttggaggatgattgtctactaataagataaactgtaataggaacaacttcacctagaaatgagaaggaacaaaagaggaaatccgaagtgttcgagcaatctccatgagatgacgatgatggcgttccgcagcatgagcaccaagagtacctttagtggccaaaaactgacagaagacaagaaataaataatgaccactagaataggaccaaaaaagtattacggtgtagtaaactctattaaaatatagcgagaattttcattgatag

SEQ ID NO: 9189 - DNA, 1909 bp, Oryza sativa
caacttcctaaagattgtgtgatcaaatcaaacaaaaaaaatactatgatgactcgacatacagcaacaaaatgattaaaggtatacataaagatctatacttagttaccttcattgcttctgtgtactttttattcatggcatgccattgagattcaagatcaccaccttgagattcaatggggcatgtccatctcaaataaaattggggccaaagggtaggagcaagtgctgcagcaggtggcactaggggaccattatgctttaatggatcatagaatggattacgatgcttatggaagctgccaccagaagctcggagatcagccaagtacgtccacatgcaatggcaagagcttacagcaccagattgctccctttctcgctcacttgcattttaaattgaagtcagatatgcacgatattttccaaacaagatagatcaagaactataaaagaaaggagtcaaacattgcttattaccaagagacaggtgcatacatgaacaacaaactataattttctggacaagcccgttttgggaagacacagtcaaaagagtttcggaccacatctagtggactacacagcctaagaatggtgtaacaactaacattattactggcaaactattaactatattgttcacatgtagccagctaatacttcaaaataatgtgagaaccagacacattagaagacagtacaaacttacaacagataaatcatgacagatgatgaatagaaacatttcactgctctttcttttcccccctaattgactagatggcaatatagcataaagccttccattcgtgagtcatgacatcatggaaaaccgtagaatcttacaatggtaatatgaaaaaacgaaaatcatgtaccctcaaagagagactcagtctcaaacagacccctgcaactaatgtttcaatttacctaagcatgtcactctagtcagaaaagaacttccattattttggacagatgaaaacatgagcatgtccgcatgtctttatttgattgcttcctctactcgttcacttatattcactcaatcacaaaatatacatatgaaagtagctgcaatgagatatctagattaaatacctattgcacaagaagttcccaaagcggcatgacaacacacaatccataaagtcaacaaggaatttctgcagtgaaaagcagttcaggttataaaaattcatgaagagacctagtttcagcagagtaatgcagctgcaaaagaggagacgacttacagatgagaactcaaatgcagatggatacaaacgtaacaactgagaaatacaatccagccactgaaaaataagatatgagtgttctgaggtgggttaatacaagttttgagtgatacagaaacaattgatatcttaatcacaagatattcactgcgagaattgccaaatggataatggttcgcattgttcataaggaagattattaaaaagccagaatgcagtcacttgaatgtagtagtcactatagcaccgcctgttattaactaataatttcaatataaaaatggaaaccatctgccatgcatgatttgcgagggcgtgcaacttaatcctaaatgctgagcggtcttcagactcttcagtgctcagtttgtacaatacaactccagaagagtattagcttatgcttaccctcacaaaagagtataacatctgccatacaggcaataaggaaaccaattacagaatcagaaaaggttgattgtgtatgagaaaataaaagaagaaaaaacattattcatttagctcactgttggcagttgctgatgcttgtttatgaattgaggtacattgggagaactgagactcagttacatcaaataaatttgactggaaaagtactgttttaacacaggggctgcagg

SEQ ID NO: 9190 - DNA, 5882 bp, Oryza sativa
agcactaaatttatctatcttagaaatttcattagctagcgacaaaacatgtttgtcctgtttctaatccaagttttaagatctgttgggagtggttaacagcctctagaaggactgaatgtatgtaactgagggtacataataacagatatgaatattgcctccatgtggaaaatatattttctagaaatatacatgtttccatccatattgcctccacatgggaattaggaaggggtatttacctatgcttacgggaatgagaatagaagtgactattggctattgcaatttattgagagggatactgtgatatggtttcaagttaaatattttaaggtttgacgaacaaggagcttgcttcctcattgatatactcatggacaactaactattgtctacaaaccttcatttcattacctgtgtaatatatattcttactttcctactcacatttgtttttcttgttatagactcttgaattgccatcaaaatacccgaatatctttaccaaggcacctgtaaggttgcgatcaaacattctcctctatggaccatctggatgtggaaaaacacatattgtgggagctgcagctgccgcttgttctctgcgattcatatcagtcaaaggtccagagctattgaataagtacatcggttcttctgagcaatctgtaaggactcttttattttttatcgctgtgatgtaccattctttgtcttatgcctttttctagtttcagagacatttgaagggctagtaactgtgacatttcctgcaccttgtattactcagacctgtcttaatatcttatcttatctgtgtagctgtagttatagaggacatagaagaccattgagattaatatggttctgatattcttcttttacatggtcatggttctgattttaataatctgattccaggttcgtgacttctttgcaaaggcagctgctgcagcaccttgcctactgttctttgatgagtttgaatccattgcaccccagcgaggaacacagagtgcaggagtttctgatcgtgttgttaatcaagtaagttgcctttaccattactgaatataagttttggatcggtctatagttccaaaagagcattattttttcttgttataatcaagatcatatttatatatggtttgtctgcagttcttgacagaactagatggtgtagaaagcttgactggagtatttgtatttgctgcaacaaggttagctctcaaagcataagaagatgtagttggtgcagcatgccaatcaattttaaatggactgcaatgaccagtcgcaaaacatcaagaattagtcagcatggaatgaaatgctatgaagactgaaattttactgatgagaataagattggaactaaaatagcttgattgttttcctttaatttttaatggtttcatctttttccttatgtgcagtaagccacaatcaattgatgctgcactcttgcggcccggaagatttgaccgtttgatcttatgtgattttcctggatggcatgagcgtttggaaattctgaaagttcactctagagaggtgagttctcatttgccattttgtcttttgttgatatttttaatcacgggttttgccatctgtgaactccttaaattattgatatcttaacattctcattgttattgatgatgcattttcatttttaatatcttctgttggtcacaggtttcactggcaagtgatgccagtctggaagaggttgcttctttgactgaaggatttacaggtgcagatcttgcagctattctaagagatgctaagctggcagcagtgcataaagttctggaggacagaaataatggtatctcagacacacagccatgtatcagcaaagaactcctaatatctactgctagggaggctagaccttcgacatcagcagaacaaaaaatgcagtatgacatggacttcggtcaatttgtatcgtctaggaagtctgtttcaacgaaggtgcggttcatgctccattttttggcatataaacaatgcgtttttcaactgaaaattccaataccgcatcttattgatgctcccttctgtcggtgtttgatgtttcttgcaataagattcttggacagctactgaaatatttctttgcaggcaagggaatctaaaggaaaaaaggtcacgctggcttgagtctctctgcattggacaagtaaggccacctcttcgatctgttgtcttcatggttcttaggaatccatgagatatgaatttgttgagcatttcaatgaaccttgatgtttccccctctttgaatccaggtacaattacgttatgttcattggcgcagaacaagaatggcgagcgccttttttctgctcggcaaatctcagttttgacttaccaactccacccctcttctttgagaaagggaaagaaactcattttgtagattgtagtgcaggcagcgaggggctgtgatgatgtatagcattgtgccaaattttgatacgaatggcttcttcttgtgcagtacgaaatagaaatgctgacagaacgcgtgtagcgtttgaatgaacattgggggaacgtactgacgtatctaatgctaattgtgtcgatatactttatctgtttcacattataagaaggttttggttttgaatagattcatgcatgaatccatatatgtgcttcatatatatgttgaaattcatataaatgttaataaatcttgacgagggacagagaaacaaaaacgtcttataagataaaattcatataaatgttaatgaatcttgacgagggacagagaaacaaaaacgtcttataagataaaatggaaggagtaaatctttatgtttttttatgcaaagatctggtcttgatatgatcaaccttgtgcctgacattgcaatgtgtttattgtgccaagaatcaataatatagtacatgcttaaacgcaaatttcttacacaatttgtaatctgaatttgaatcgagagggacatacattgcccttttcttttcccccaccaaaaaaccaggatagcgctaccaatggcagcgatcagaattcccgtctgttctgaccgcccgatctagcacgtgcggttgagatcgaggctaagtacggtttaacgggtacatttccacccagcccctccatttacctcatattatcgaaatcccacaagcactcagaggtggggtggggccacatcgtcagtgaaacggacgggtatagggttagggagttgggggatcgggaggaagagagtagggagacgagaggaggaagaagaggcgggcagcgaggagggaggagatcggcggcgagcggcgagaggggaggagaaggtaggttgcgatggcgtccgggtggggcatcaacgggaacaaggggcggtgctacgacttctggctggacttcagcgagtgtatgagccgctgccgccagcccaccgactgcggcctcctccgggaggactacctcgagtgcctccaccactccaaggaggtaatcctcctctctcctctctcctcactcctcaatccatctcccacccgcccttctcggtttatttttgatggatatgcccgcctcgccaaccacctagatctaccatttacagttttcttgaaggggtggatatggattgttcttgggattaacatcacccgctaattgggggcactgcatttgattggagtagtaatcgtatttcgaatccattctagtatgatatgattgttggaggttgggattccatatgctttcatttccattctgttgtactccctctggtttcattttaattgacgttttggacaatgacacggtctacaagatatatctttgatcttatttttctattataatatatataataaataaatgcatgtttacttttattatagtgctttaaaagacaaatctatatatgttgttctagttcctttaaactaaatatttttaaagttattgatggtcaaagttataaaagtttgacatcaatcttgttcaaaacgtcaattaatatagaaccggagggagtagacaaggttgttaatagtattattggtctctccttgtctcttaggatagcccaatttcccatttccaagtgatctctgaatatttcggagtgtctgttgttgcttggataactagttcagaaaatccctggttggttccagaatgtgactagaatagaattattcattagcataaaggcacacaagtcgtaatactatttaacaagttcttattacttcttggcatgcatgatatcatcatattctgaattgtttcttgtgttttaaagggatatatgcttgccctgattccttacagcaaaataaaatttatggattcatgctagtgcatagcttccagtcagtgggagaaatgaatcaggatgcaacagtactctgaattatattgttctagatttccatttcattctattagcgattctaacaaccaagatgacctgatgcggaaatgtatgattctctccaatgcagttccagcgcaggaacagaatctacaaggaggagcaacgtaagttaagagctgctattcgtcgtagggaggaggcggcaaaggagaaggctgagggagctcctgctgtttcagctcagcattagccactccgataaaattcatgtgtgctttttgtttgctgtcaaaactttgttctactgtgatgctaagagcaaggcaataattccccaccttcatgttggactacacaaactcttttcccctctcactccatgactttgatctgtatcaaggcgttgcataaaccatcatggtgatgaagttttcgtgcctgttttggataattttgcgataatgatggttggttcgatcatcatattttgcacgtttattgctatcgctcttgatgttcttataggattgacagcgcaacattggttttgtcgattgtacttggaatggtcttctgactgttgctttgcatgctcgttctattataattcttgatggccacttttccattccatgcttgggttctgaacttgaactcgcgatcacataaccatggggatgatcttgtttttcagcatatttcgctgcaaatgcaaacagcatgtggtgacggcaataaattgatttcaaattttgctgtgcaatcatcccctgttgcatttattgttttttcccgtttgattcagtagtcttgtgtgttgactcgtttctactcatacatattagcaaaacagggataaacaagtccctaaattatcttccattgtttcctaggtctcaaaatcgtcttgcaagtgttaattttaacctcaagatatcgctctataagtcaattgatctcacaaaacaaggctacaacatttgtgcaaataaaatataattaaaataccgaaacaaaagaacgaacaacatagctggatagcccccgtcatatcacattttatttcaaccaagcaggatacacattgtttctttattcccaacgtaactaaaccaattttaatgaaaataaaagaaagaaagaaatgtcccttatcccttttacatcctgcattatactgttaactgtatgaatctatctccttctatatacagctcgaaggactgattttcagtcccagtagctactaaccagttgctaactcctctagtgaagaacgcctaatgcccagttagagactattacagaggtattccaagaaacaacaacaaagaaaaaaaaagtgagcttggcgtacttcatggcaaaatggttaaaagcatgtatcatttgatttgctttccgcgcatatagcttgatattagtgcagctgtgcaggacttggaggcgccaacttgtgaaaaaaaagtattggcagctgccaagtgc

SEQ ID NO: 9191 - DNA, 28326 bp, Oryza sativa
  unsure (1)..(28326): unsure at all n locations
tggaaactgaatctgagaataagatatagactaccacttctcggaccctttctttaggcagtaaaatacccttcttttgagtaacttctttgcctttttgagcaagtctctttggtgatgatttggatgaaacagtgaccaactgaagattggaaattgaagctcttgcagctgtatctggatgtaccagcacagcatagctgagaatcacccccagttcaacacctttatatttgaatttatgcacatacttcctatctgctgcttgaacacgcaggagagcctttgtttgagcttcttccttcagtgcactttgcttttgcacatcctggctggagttttctctacgttttttgggtgccacagcaacttcagttcccggaacaagttgaactaaaagaattaaaagcatgacaaacattagaaataaatacagaaggtacatgacctcaaatactgaaggcattttttatgagaaactaaaagcagcatgacatactgtaacacagtgcagcaagcaaaattcatgatgcgttagaacaataatcattggggttttgtcagaaggtgctaaattaggttaaggtacagtcggatggactaccagtgtacgcaaaagctacaatctaatagcagtatacaacagctgataccatttcccccatcttaatgaaatttggtcgccgttccttcggccgacccggcaaaaaaaaaaaaagctgataccattgtaagaaattatttatagaggcttggacaaaatatgtacgaacttatcaagctcatctccatgcttttgttgataacatgatttcatactagcgtaacatcctggatataagaaggtacatacaatttgaagtagtttggatgaaacagctaggtcactagatacaaagtgcgcatgagcggaacattccttagaaagttcattcgaatggaactatggtttagataaaataatgcactggatgtaacacgaggataattcagataagaaaaggagccatacccagtgatttctttggagaagatgaggtcacaacaaacttcacaatattatggccgtccaaccacaatgggaatttcataccctcgtaaacaacgccaacctagtttgaagaagagaatttaaatagtaaatctttacacattagagatgattatcacttggctaatcaagcaaacaatgtatataacagaatagtacctgagtcaagattgtttcttcagccaaatcagcacggctctccagtatctcccaatcatcctcgctgaaaggttctatacagactgaatcagctttggccagggagcgagctacactcaactgtgcaactgttccatcaggcaacgagatgcattctgccagctcttgagcaacctgcaaaccccaacatttgatcaaagatttcacgctggaaataatccacagcctactgcacagtgtttacatagtagcaacgaatacaagcatatacagggtcatcacaatcatcgaaaattctactcgcagaagccagattgaccgaaaagcagcaaaaccccggataattttgaccaggataaagcgagcaatcatccatcacagatgctaaaagtaaatacaattctaggatgggaataatacgggagtcgggggggggggggggggggacctcnatggcgctggaccgggacgcggcgccggaccaggcgagggaccagcgggcggcggtggcggtggcggcggcgcggaggtggagcgcgaggaccggcgggaggtcgccggaaacggaggtgcgggacagggcgtggatcaggtggagcgggagcgcggcgaaacagctccgggcgccgcccaccacccgcacctccaccttcatcccgccgccggcggtcatcgcctcctcctcctcctcctccgcagttcagctcccctctcctctcctcgccgtcgaaaaacgacgactccacctcctctcttgtatccggtcaaaaaaagtcaaggggttttggattttcttttaaattattttatttttggagaagcttatatagagctccatgaagaagaaatcgcacttgtactcatgcacgttggatcctctcttcggttaacataatactttaaaaataattgaaagaaaaatatttttaaaaaaattataatcaaagattctaaagtttgatcttaacattgtctaaaacgacaagtattattaggtcggagagagtaagtcaaactaaaagctaaaatttaaattttcaaacttaaatttaaagatgattgtaaaatatttttaatgtaatttctttgtagtattgacttttaattgctatgaataaatataaaaaaaatatctataaaatatttttattttctaataaaccgtttgtttattagagaatatggtaatcttgtaatttctagagacatggtgaatgctactccctccgtcctaaaatataagtatttttagatatgaatctggacaagccaaaagttactatattttagtacgaaggtagtatttatcttggataacccggggactgtcgtttttgtccattctttatgcaagttttttttggggtccatctatatatatggcgccacaaaatttagtccaaaacagtcggattggacttcacactgattaacaccatttcaaacacaaagttgaccattaatgagccttggcaatataacaaataagtaactttattataatacacaatataaattaaatttacgatagaaaactaacaatcacaaaagttacacttaaataaatttaaaatcacatatgtaattttaatgtattttcactgtaagttctaaaattacatatgtaattttaatgtattttctttcactgtaagttctaaaattacatatgtaagtgtcctaaaattacatatgtaattataatgtattttcactataagtttcaaaattacatatgtaagtcccaaaattatatatgtatttagtatgtaattacaatgtaagtggcatataattgcataaattatcactatattgtaattttcattaactacgatttactttgaggatagaacgaatagcatcttgtgctcagttggtcaaaagcctggtgctgtatgcctgtaactcgtcgatcacgggatcgactccccgccaccgcaccgcaccttaatttttctcggaaagcattagcacgaattttgatatagatcctagggtctaaaaatcgactatttttttacagaaaaagtggcgccatatttctagcaaatctgttttttttgagcgtattgcgtccaaaattcaattaattattcattactattgtacaaatcacagtcaaatactaactcccggagttttatatgatttcgttcggaattaattaccgagaaaagaatgctgtacatgacaaaactctttgctcccaccacatctctttgctcccgatttctctctcttcctgaatcagacaaggttatgtaattatcttcacttcatcagatgtaaaactccacattaattaatcttccttccttttaatgcttcgacagcatatgctgatcacttgttcttgcagattctgcttccagtgtcacctcgccggagattagcattgtccggcgatgatatcgccattgccggtcatcagttgcagatttcacctacggaacggtggcggcttcttctggaatgttccgggagcaaacaccgggaaggactcgccgccgcgggccctcgtccccgccgcctcgtcccttcgaggttcgccggcggcggcggcgccgcccagcagtggcccgccgaagaatatcgactggccggagtacgtcagcctctccgacggcagcgtcgacgacgacgaaggggcggcgttcgtgggcgcgggcgcggcgggattattgcggctacgggcggcactcaatggctcgcgctcgccacctgggttcgccaagaaaggcggcgccctcgccgccggctgctcggcgccaccgccgcctcctcctggcctcgccgttgccggcgccggcgccaccgacacgtaccggccggcctcctggtcccacacgaccgacgccctccggttctcccggacgtacgacgtggccgactggaacatcgggttggatatcctcgtcgccggaggaacaggcggcggcggccgaggtattgccgcctccggagcagcgttcaccggcggcggcggccgaggcggcacgttgtgcgccgccggcaatggcggcggcgcgagcttgtggaggcgcaccgggctgctcatcacgctgctgccgctctgctcgtactcgtcctggctcgccacgctctgcgcgcacgagctcgggagagaggacgccctcctcctctgctccttggcggcggcgctcacgctgctcctgacgctgccgttgccgctggagctcaggtcgccggcgtcgtggccgccgcggtggcgagcgtccaccggccggaggacggaggaggacgcccgagctctcgccgccgctttcatggcctcgttggtgtcaagcttggcgagcttccacgcgctgatcttcacttgcttcttggctctgtttgctctctcagcatttccagccgtgtcagggtcgatggttgatggcaccatcccagcctccaggtgtgggatcacttcatcctgcattgcaatcattcagaagagaaatagtacagcgctactccctccgtttcattttagaagacgtctttgctttaatcaaagtcaaactgttttaagtttgataaagtttgtaaaaaaattagtaacattttcaacccaagactaatttattatggaaatgtattcaattattgatttgatgaaactaatttagtattataaatattactgtattcatctataaacttagtcaaacttgaaatagtttgacttttagcaaagtcaaaacgtcttataacctaaaacggagagattatttagcaatgttgtttgcaagaattcagataaatatgttctttgtaatgctatttgcagcttgaagattcatactgatattcattcagatgatacaatatctgattctttatttatcaggagagattgtctcagaagagacgggtcatcgtttgcagttacctgatcaacgaaaatccttggaggtgtgcaccatgaacccttgtagggaagaccaagtgagcttccaccgctgaatccagtagttgctgaatttgttggggaataaacaatgttcaccccatcctcttcttcctcctcttgaggtgcttcactcatagctctcattgcgacaacatattcgtaagttgtgatcccctgattcagttcaaatgaaagcaatgtaggggaatttcaagcaaatgacattacatttctatgcatctgacatgtcatttagatattacatttgattcggtgagaattgcgatacaaacctttctgatcagtatcatgtggaagaagaagagttcacctaggggtatacaagcgattatagaaagaagagtaaatatggcctgcacaagaagtttgcattcagtcaactagagaaaatgtcttgcaactaaagtatgatgatttctgctagtgcaacttactactatagttgcaaagggtggacgagttaaaccatttgcaagcttgtcttgaataatactttctgaattcttgttgacgaagcatacaacaagaacagcaatgccgaccccgatttcaatggcaagctgccagatcacagattaagaatagatttaaaatgccaatcagctgaactaattaatgaaaaatgcaaagaatcttttagtactgtgttaaacatgtattcggaatagagattaagtaaggccactttacagacccagaggaggctggtaatcatcagagcaagaaatgtgaaatagttcttgcgcccaacgcaattatttagccactgcaatggatgcaaaaatcagacgtgcgaataaaatttgaagacaaacataggtttgtataagaaaatacccgacagtgatgatcaaaaccatccacacatttatcacaacttctgcaatgtttactgaatttgcgaacctgaaaattttgcctttgtaattagcaacatctgacaacagaagttttcgcttttacaaagttattacagaggaaaataaatgatatattttgcctgaaactgagacaaaaatcattatgcagttccaacgttgagcacatatacaagcttacctcagcattacataatgtgcaaaacaaggcatcttctccatcagcttgatgctctgaatcaacaagcgtcctgcaatcctcctcaacaaacagagcacaaataagtcctccgactaaggagcaacttgaactccttggtggttgtgagctcaaattatttccatctccagcagctaaaccagcatggttagaacgtccatctagagagctcttaaaagtagatgttggggaattcgttccagtagcaacatcaccccttcctggcaaatttgtgtcctgtaagccggtgccacttgttggtgcattacggaagccattttgaaactttgacatgatcccgggatctgcaggatttatgctagtgcaccggatataaaggatgaagacaacaaatgcctgaaaattttaccacgtggaggagaaacagtaagtgtacatctcaaataactgtcctcacatgatatgctgcaggtgtcatttggtaggcttaccacaggagtatagatgccgaatgcgatatattcaaggacttgctttcccaggaatggtgcaaagaaggcataaaaggcaaccaccagaaggaagaaaacggtaattgcaataatctgtttgacaagagattcaacttagtcatccactgttcaaaagtccggtaatcggcaagtattacaaactacagcgtgtatcatgaaccaaaagttgtgaacagaaaatacgaaatcgtattttttgctgattgacatcaaattaaaaaaaaatgtcccaacaattggatgtatatgcattaccctttttatatgaagaactgtcaataaatgcttttggagggtattataggcataggacaacacggcaagttcacagttctttgtcctcttatagcattttaggctgcgttcgttcataggagataggggaggttgttactcgttttccgcgcatacgcttttcaaaccactaaatggtgcgtttttttgtaaaaattttctatagaaaagttgctttaaaaaatcatattaatccatttttgaagtttaaaatagttaatactcaattaatcatgcgctaatgactcacctcgttttgcgtatcttcccaatcctctctccctcaaacactgccttagtatgcttaaactgacttttcaatttttcagtaatagcataatgaaagaaaaacaataatcttattgatgctacaagggcaactggaagatagcaactggaagattggaagttactacttaatttcaccagtccatgaaaatcacattgtttaataaccatggagtgtccaataagtcgccaagcagcaatacatgaccaaggcaccaagctatcccttcagaagctcaagctaccagtgttcttacttgtttattttgttagtaaaactgtatgtgtgaacccaaacaagtttgtccctttttgcacccatttcagtgccaagtcatggagagcataatctttcactccatgtctccatctctctgtttatttatttaattttttgaacaattccgcactccatcatggtagaaccaggatcatgccaaaagatgagattttgtagttagtagcaaaagggaatatccaccgcacgactaaaaaccactccactaaaatgcaggaatcaggaacaaaaaaaaaaggctacctaggagaattcgcccaaagcctaaacaggttcagagccaggcattcctaaaaacactagcgaaaattacagtgatcattcctgagcagtgcactctagaaactgaactctacttcgtaagtctacaacatttcatcacgcatttatctcctccaatccacacacacacacgtaaagtggaagttgagatataagggagtggataagcaagatcactagcaactgaattctgccaaactgatccacaaaaagagaaacaaacaaaggctgaaaattttctttcagttcgggaagatcgagatgttcttcaggcctgaaagacaaggaattcttccggcggaatttccggtggataccgcgcccgataacaaccgcaagaagccaagatagacggaaaaacaacaagaagaagaagaactgatcgaaagaaattgcacctggaaggtgtgtgctgggagctgccacccattcttccgcaccatggcctctctcccctcttcttcctcctccctttccccccttctccaggtctctctctccttttctctctcccagtggaaaggggagtcctttcctttcccctgctttcttgagggcagttcaagaatcaagaccagaggaacagaaaaaagctggagattttataaaaaccccttgctctcttcctcatttcctggtgaaaataattttctaccgtcgcccttttgtcgctggttcgttgggtgggatcaatctccagccttggaaatgcagtgcagggctgcagagaaagaagggaagatcgagttgacagattcagactctgccactttttatactcacactgcgctgaaaatactgaattgaatgtggactagctgcctgccactctctctctctctctctctctctctctctctctctctctctctctctcttcttttggcctttttcagaattttcgctttcggaataaatgcatctgctgaaaattacttaaccgtgtacttgaagggccgtataccggtacaagttcaggaatagttttctcaataatagaattcatttcattattacataggttaaaggacaagtgacgattacgaattataaaatttccatctatgtttggccaaagtatgcaacttcagtgctccgtatttgttattccatcgatttttttcttgtaactgaaaaacaaagaacatttggtgagtgacaccatcaatcagctggtacgctttgctgttgtatacatttgtggtgtgatacagataggcaggtagccgtatgtatactaatattagggtgtagaccccagcagtgtacgctgtacattactccctttacctactactcctactctcctgattgtatgcccaagtgctcatgccttgatttaggtgaataacaaacctaacctaatctaatcaaatcatctgattgataatgctatgataatagtgttgcttgaccagaaagcatgcaggaatcatgctctccagagtccaagccagctctagccaataactatttggcaaataaaatagaatgaaaaaatcccgtatccaatgagttagtagacattctttaggattaagaaatggccctcatcatctcctttccttagcaggaatcaataagaatttaatcggagaatgtagtgcggcaagtacttagcagagtgcagtttagtttagggtacagtacagatggatgcatgaatgaatgctggtgaaaatgattggagagggcaaatgtaaatgcaatcaataatgcactgttgagtcccaactactcccaattgtttgctaattgccttagaattgtcctctcttctccctgtaggtgctttccagatccaaatccaatgtggcctttgttttctcctccatggatggatgatgagatggtccatcatcatcatttcctagtttcttcgttgattttatttttattattagctttcgagagaagctggattgcattgtggcattgtggcattgttaactacccgatactagcatgattattccttattatctcaaaaactataattgtttcattataggggataatcaagccagtgacatctatttaagtagcgatttagaaggaagctgggttttcataaatataggatagtaatttctcaatgtaatttattttcttttgggaggttgcttttgtggcaacttccatttacttcgataacttctggttgaagtcggaaaccttgtatatttgtacatattcctcattctcaatcttaagtacatctatttaagtatatgtagtattctctctgtttttttaaatgtccgatgacgttaaattttaaatatatatttgactactcgtcttttttaaaaaaataaaaatataagtcatactcaaagtaacttatttaaaaatatataaattttaattacgtacacttctctaaataggacgaataatcatatgtatgtctataataagttgctaggtgaaaccccgcgcattgctgcgggaatttagtatgataacaataaaaaaaataacgtgtaagatagctagataacatcaggttaagtaaattaatgtggtttatgataatttaaatttaaatagtatgtagaatagtgattcaaacgtaaaaagtaaggtggtatgactttatggaagaaaaaaagtagggagatagtttagacctagattaatcatctaaaggctaaaacaattgatgtaatatgacttaattagaggaaaaaaagagaaagataatttggactatagattaatcatttaagcactaactaagtgaggatgaattatataagtatatatgatattataaaacataataaagatatacattaaaacattatgtgaattatgttggatgataatttaacatgtttgtatttgaaaagctcttaaattataaaaactataaagatatagcatgtttgcatgatgtttaaatgtgatgattgttagtggatgataatgtggcatcttattaattagtggatgatgatgtgacatctttgcatgttaagcttaatgagttagtggaggataactttatagtaagatattataaggacgttaataaatgttagaaaatggagagagtatgtagtgctacgtttataatgggccgtgttgggccgggccacactggcaatgggcactctcctcgtggaccagaggcaaggccaagctattattattaactagatgaatgtcccgccgcgttgctgcgaaaaaataaattatataatatgtacaaatatgatgaaatatgattattaaaactaaaacaaattactacttatgaattttgagcctataaataattgagattgcatggtgttattagagaagaaagaagagacaatttgaaccatagatctatcatctaatggctagaaataattgaggtgatgtggcttattaagagaagagggaaataacaataactacacttagtgaggattaactatataagtatataggatttattaaacaacaaaaatattagtaatttcataaaccatggtaattaaggttgcaggggatgaaatttacacttatgtattttttgttgggtcggaatgggattgttggaccggaatgtggccaggccgcaacggggttacgaagattatgcctgccgttcaattcaattagttagctcgaccccgattcactgattagataataaccattgtaatttgaaaattcagtgataatttcctggacgtgaagattgaaatgcgatacatttacagcaagtcaactgatcgagcactcacttaactaattaagtctactcctgccaagaattagtgcatgcttggacttgacctggtcgatcttgtactcctggtaatttctaggaatttaatatgctaatagctatactagctaggttagttgagatcgattggctagggaaaaccagcgatatcggtttggacgacactgtcaagtgaagccacacctatggactatagtctcttacttagaagatatatttgtgaaacccaacaaattcaaaccgtataaccttcaaaaacaatacatgtagctatatatgacttacatatgtgttcttcaacattatttaatctgacctgcagtcaaccatgaaggtaggaaagggatagatcgaattaatttcaagaacgcgttatgaccaacagacatgataattcaaactaaatcaacttgcaggtcaaccacgaccctgtttgtacttataaacatatatgcatggatgatgtcatggaaacatggattgtagtcaaatacctataggaaaaataaataaataaatttggtaacattgattaattaggatagcataagcctatacacaagcatacaggttaaatctacaaatagaggggaaaaagaaaaaatcaagcagcgaatagtatgtgtgcaacatggtgaaaagcatttcttttttttctacagtttaaatttagatttgcatgtttgtttattggtttataccatcataatctatcttgtaaaatttcattaaattttttttgcaactattcaagttaaacacatttattttcgtgcaattgaacataagcataaacttactttctgataggtacatactaaaatacatatgttctgtttggaaaagttttaaattatgataggcatttagttaatagctggagaagctaaaaaaaccaaaccagtttatgattttaaatttattttctgtatgtaactaccggttttcttagaatttgatgaagattgatattgtttgaaaagtttttgattatggagaagctgcagcggcttaaaacctccctaattaagaggccaacataagtgcatatgtactgcaggcataagtgcatatgtacatctataaatacaggcatgcatcatacagacgacgtactacagagctagagctagctagcgcctagtgaatagtgatagagtcctatatataatggcggaggtgcaggtagatgaggtagaaggaggcgaacggcggcggcggcggccgctggcggagtacgcggcggagctggaggcggtgagcttgagcgtgcgggcggcgccgccgctgcggctgaaggcgctggtgcgggcgtgccaccacgcgctggccttgttcgacctcctcggcgtggaggccgggttctggaagacggaatacgcggagcggctggtggcgctggagcgcgcggcggaggccatggacagcgcggaggagctcgtcgaccgcgacgtcgccgccggccgcgtcagggccaccggcacccactccaacaacctcgtccgcgtcaagcgcggcatcgagctcaagcgggcgctcttccagctcatgctcgcgcagctgcagcagcagcgaccaggaggaggaggagtctccttcgacggggtggtgtccatggcgtacgccgccgtgttcgcccggtaccacgacaagaacgtgcagagcaccgtcgccgactccatctgcgccatccccgtcaagtccatttccgacttcttcgccaccatcaatgagaccggtactgttccatccatcatccatctatagatcaggtttgctaattagcgcagacacgctagctagctaactcgcgcgcatttcggcccacggcaactgtttcgggccttccagcccacttttgttttctttccgtaggaaacgacacagacatacgcgtgcaccacacggtaacgtaattagtttctaataatcatcgttctaattatcgtgctaattatttttatttttcttttttataggttgtttcttgtactaagattttaaaaatccttacgtgaaatttgaacatttttcagttcaaattttgaaaactttcatcccgaattttaaaaactttcaactcgaatttgaaaactttcaacttgaatttgaaaacattcgacccgaatcttgaaaactttcaacttgaatttgaaaactttcgattcgaatcttgaaaactttcaaatcaaaatttaaaaactttcaacttagatttaaaactttcaatccaaatttaaaaactttcaacccagatttgaaaactttcaagtcaaatttgaaagctttcaactcaaaatttgaaaactttcaactcaaattttaaaaatttcaagtcaaaataaaaaaaactttcaattctacatttgtaaatagatatgcaaaatattgaaaaaaattggaaagaaacagaaaaaaaaagtgttggaggagtcaaaatcaggaagaaagtgcgaaaaaagaaaaaacaaaaaaggaatcggaaaaaagtgcgaaaaaaagaaaaaatcaaaaagggcgcgtggagacggcccagctgacgtgcgcgctagcaattttgctggcacgtaagcgcgcactaggatccccctctatagatggccataaggcccgaagcctgatggccggcccaagcacaccacggcccgactgatgtcggacccgtgctggcatggcccgatagttgggccatgcctaggccgatgccttcgcacggtgggccagcctggcacgacactgtttaaaaacatagcagaggatccaaaataaacttaattaaccatgtaaggcaaggcccaaagaaagatgatagacttaatttccagccatataagacaaagctcgaagagttaaaggaaaaaaaatagacttattacatggaagagcacgatgggccgggccggcatggcacggtccaagtcttattgggccatgcttgggccgtgtgtgcagcccatgggttggcacggcacagcccgacgtggaggtcgggccatgctggctcgactaacctcagctcaggcccggtcgtgtggcccatttggccatctatatccattttctccttataccgcatttgattttaaatacacgatgttgttcacttttaggggcgttgctagttggcgcgcgcgccagctgctcccggctcatcagcccatcagccattttttcttttttttcgcgatttgttttatcgttttccttttgcgatttttttcactttttttccttttttttcctgattacttttttttaatcttcagcacacttttttttaaaatgttttgagttgaaagtttttaaatcttaacttgaaaatttttaaatctgatttgaaagtattcaaatctcgagttgaaagttttcgaatccgagttgaaagttttcaaatttgagttgaaagttttcaaatctcgagtcgaaagttttcgaatctgagtcgaaagttttcgaatatgagtcgaaggttttcgaatcggagttgaaagttttcaaatctcgagttgaaagtttttaaatctgagtcgaaagtttttatattttttcaaatcttaacttaaaaattttcaaatctgtactggaaagttttcaaaatttatcttacacatttaaatttcgagttgaaaatttttaatttgagttttaaaagtttttaaaatttgacttcaaaagttttcaatcggttagtggaaaaaaatcttccgaaaaaaaggaaatcatatcttaattactgtcattatctactaataacttagttagttaggctaaactattcggaaacgctcaccgccaacacgctcgcgcgcgttagcttttccgcacttttaggtattagatttgatcattcgtattattttgaaagaaaataatgctaataaaatgaataaatataagtcatattcaacagtcaactgtgtaatatattttgaaacgaaaatggtactaatatatactcccttcgtgttatattataagtcgttttgacgttttttctagtcaaacttttttaaatctgaccaaatttatagaaaagtttagcaatattttcgaaaaaaaaacatattatcaatatatattaaatgttaatttgaatgaaactaatttcgtgttatagatattactaaattttctcataaacttggtcaaatgcaaatgaaatcaataatgcattgttgagtcccaactactcttaattgtagtgggtatcagacgataccttagagatatcatcccatctgaatgggataccgtcatgtaacatttcctctttttttaagatgattatacgcatgcttcttgatgattaatttctcaatttgcagctatataattgttcatatgcatgcttttttatgattaatttatcctcaatttgcaactattgtaattgtgaactgcggcagatgaatctgcggctgcagagatgcaaaagtacatcgatgcagccaacgggatcatcagctacatcgacgagctattcgcctccagaggcgtcagcgcggatttctgaagtctgtcattcacacatcatgcaacagggatgcttaattatctgcagactatgcgaacggtggtcaataataatgtagtattaatatttacttatactctgcctatggtcttctggacctacagtatatatgcagtacaacatggtgtttttcctcttcttttatcaatgaaataaggtagtaaaactttcctgtcgcctcagaagacagaatggtggtcaacatttttgctctgaatgctgactgaagatacttctgtgactgacaataatggatactattatattgtagatttaattattgaaagggaagattagatcgaccaactgcatcagaataaaatcgttaggacaggacggacggatgacacttcacaagcatgctagtactccctccgtttcaaaatatttgacaccgttgactttttagcacgtgtttaaccattcgtcttattcaaaaaatttaagtaattatttattcttttcatctcatttgattcattgttaaataacctttcatgtacacatatagttttacatatttcacaattttttttaaataagacgaatggtcaaacatgtgctaaaaagtcaacggcatcaaacattttgaaacggagggagtattaattaatagtaccacaacaatctacgttacatatatattcctcttcgtgcaaattaaacagggaattttctagttcttgacatggatactgagtgaataatattggtatgataacgagcaataaagataagacaagtacactaagtacgtatctgttcgaatgaggttctgaacaagtataggtgttgttcatgcttttctctgcctgaatatctccacgcccaaatagtcgaggactccctgaacagcaacatgaggtttctcaaccttcactcgaactgcagaaatctgagggaacttgagcagggttgagtttgcaatcgactgagccaccgattccaacagattgtgcgacgggccttcgactacattcttggctatcctatacgatacaaaaaataaaagaatatgaacattctttattgagtggtactagtagcaattctgaatcatgaaaaggatcggcaaaacatatgctgaacttttttatatgattctgaactcatgcactgtgctgacgagttaaaatctcgttacagcatgtcagtagccgctaaactcatcttagccttggaacgaagtgcactgtgaaccacatctgtaattgcaacttgaaaataacgaatcccagtagcaacttcattcagggagcatatcagtagcaagcgagattgaactctctagattctggatgttgtgggggattcgataagggaggtaggacggccaatggcagaaaccagcaagcgggattaattaattaattctgaatttgggatagagaggagaagagagctttaaaatgagcgacctgtagatttcggtgtagctgacggtgtcggagatgtcgtcggagtccccggcggcggcgagatccatccaggcgtcgacgtcgatgacgaacttctggcccagcttcttctcctctggcttcaccccgtgggtgccatggaaccgcagcccccgcaggatcagcttgtcgcccctgtacacaacagcctcctcctcctccttcttccccgccatggccccccgcccccgccgccgccgccgccgcgctcttatagtggccgtggaggcggaggcgcctccggttggtggtggtggtggagttgttgcagacagagacaaacagatttgttgggggtgtgaactgcgaggaccgaggaggcagctgacgtggccgcccataccttgggccgtcgcgatgtcagcccacattatttttctgggggcccacgtaaggttttttacctccaccatcggttacggtccatatttcaaacgggctgaattttaaagtttggattcctacctttggtttatggtccatattcaaaggagtaagttcaattgaggtctcccaagttgtcgccgagtttaaaattcatccctgaactgtaataccagttataccgcgtccctcaacttccaaaaccagtgcaaataaggtctcaaagcggttccacttaaagttaaaaaaatatgggacccacatgtcaatgagtgttcaattaaaaaaatatagtggtacccacatcatcgccactatctttcccctttctctccctttcttcttctctcttctctctgccctcttttctcttctctctctctcatgcgcaagcacagcagtagcccggcagagctcggtggcagatggagtcatgcaatggccgtgtgaggatggcatccaaggtcgtgccaagatctaaaacagttgtttggatttgcggttgtagtcttgcagagaccagagatcacaacacgttgatcttcatgactagagacggagtgcagcaccaatatgaggtttcactccacataagggaaaacctcataatgaatggtggtgaggtggcacgtcggagcaagacgccaccaacgtcctcaacgaagttgttataaaagttagtcgatatagcggaacgacgactaaccttcccgatcggttcaatcattaatcacccaagacatgccagatgacgacatagtaacacacgatatttgataacgaggttcaaccgaagcctacatccccggggctctgattataggcactcctccccaaccaacatagcttctagccgctacgagtccatggccacgtcgccatcatctcccgcgtatctacgctatattgtagtcgctatggttacattgtggtgcccctctctctatttaagagagatgccgggttacagagtttgactctaactccaccccctaacacctattacaactccaagttctaaattgtaaccgactacgtacacatattcgacacaaactctaacagaggccgtcaggtacctcgatcactcaaggtgactagcatgaattgttgcaactgctaaccccccccccccggtgccacgtcagcgcgttgttgatgctcacgctccgtctcacctcaccttggaggggatcaggaagagagaagaagtagcggataagaggagattgaggagaggaagaaagtgatagccactgacatgtgggtcccacgctgactcaacttgtcacatcaactaaaactgggcataatactggttaggacctcgggtgatctggttttgtaaattgagacccattatatctggtatttcgttttaggggtgaatttcaaacttagtgacaacttgaaggaccaaaacaaagacggtccatagttcaaacgggctgaattttggcgggcctagagccattggacggcagcaaaacaaagaaagttttaaaaaatacaaaattccgttgccgggactcgaacccgggtctctcgggtgagagccgagtatcctaaccagctagactacaacggatcatgtcttggatatataggtaccattttataaccttttatattatagaaataagatgtacagagccaaaagcatgtccagtcccacataaaagacacaattgctccagatctatgtcttgctactccaatacgaagtaatacactaatactacactatctgcagatgcagattattgtgtattttaaagaggaatcttatctgcaaatgcagatagctacacgcaatcatgatgtgaggagcagcaacagatctggcgcctaatcgtttcgtcttgcgcatctaaacgagtggaattaaccatgacacagacaagtggacaaatctaaatctagctaatcaaccaatcacaccaaagcgcaaggagttcccatcggaatccagacaggatccaagtccatctcttgaattaatcacaaacttatttaaatataaatcaaaataatactccatccgtctcaaaacaagtgcaattttgcactattcacgttcaacgtttgatcattcgtcttatttaaaaattttgtgaaaaaattgaaaatatttagtcacacataaagtaatattcatgttttatcatttaatagcaataaaaatagtaatcataattttttttaaataaaacggacggtcaaatgttgggcacggatatccatagctgtacttattctgggacagaggtagtaataaacttaccggccatgttagatccaatccgagatcaaagcgagaccaacatgagataaggttaatacactaccctctttttgtttttttggttttttggctttgtacggatcgatcttgacttgactcgcacctgcagctgccacgtcagagccacgtcggattccaacacgtattccggcgtgggcatcggctctttctagagcaaaccccaaatcaaatcttgcacgaacacccctccaacttccccacgtttacaaatccaaccctcaccctataaataataaatagcgaattcttactctttttttttattaatatataataaaagaagatcgaagcgaagcgcacctctctcctcttcttcttcaattgatcaggttgagagggacgacaacatcagatcacgagccacgcaatcgcaatcgcagaggggagagagagaagagggatcgaatcgaatccagtcgaggaggaggagggcccctcgggccgatccgatcgagaggaggagggatccgagctgaacgattcaacccaaggctcgcgggatttggcgcgagttgagccataccgatccctctgccttccgacggacggatccctgatggaatcggcgcacggcggatcggatcgcccaggttagcgcggggattttttttttcgtctctgtttcgatttttggctggatggttgggtttggggttgctcttcgatctggggttgcatcggtgcgattgttttttggttgattcttgctgggttcgggatgttccccttgctagatcttgctgccaagtgcgtcggatcttggcgcaagctgtctgcgtcgcttaattatgacaattcatagatagtatacgtgattaatttttccctgatgccatccatgtcatagactcatagtggtgccgttggaattattgagtgaattagtggattattaagattagatttcagggattcgggcagcgaagacctgctcaagcatcgacattgccgtcttcttttctcctcttcgcgtccgtgaataatggcaggtggtgtggactattgttggttcgcgtgcaggtttagcaatgtgcgattttgtcggttgggtaagatgccgctttcagatggaaatcgcatcacgtgttcatggtttgtacaggcagcaacctgcactaaaattccggcgagccagtatacctgaaaaagatacggacgcaaccaatgcctctagtgtgtctcctgtgagcagcagcagcagctggcgcagggatagtagctgcacgaagggagaaggtagtagtggtaggatgcctgtcagtatcgacaattgcctgtagaggccacaattgtggtttttagtatggttttgactagttgataggacggcagtgaatgatggaaaattgatgcctttattgtgcacggctgcatatgctattggctactatgtggtggagaagtactcccccgaaataagttgattcctaatgtctagattcgtagccagaaattaatacttattttgggacggaggaagtatgtggtactaaagtacactaatttcagtaatttggaatactagtgcccatcagcccatgtatgtgattgtttagaagtgtggctttgttcatgaactgaatgatatggttctatggtacatctaagtaagtacaatggggacttaggcacgtagctgtctttatttggtacttcaggccatttacgatgcttacctttgttgattagtgtgcctcacctttttgtttcgaagtggcagggtataaaatgtattacttattaattcgcctaacaaagaagtgcctaatacagcatgatccttaaaaattactttgcaatacaattttctcttacttttgtgttttttgcgaggaattttctctacatttaattggagtaaatctatgttccttgaatgtttgatttgatctgttcaatctccctcccacaggctcaatggattcgcaggagccaagagttgatgctgaacaaaaacctgttctttctgataaccctgaagagcaggtcattactttatgatatcatttagagatgttctatacaatcttctgattgtcataattgccttttttgtgctgattgttgtagtttttttttgtttgctgaaattgctttttatgaccttagaccattcctagcaaagatgagaaggtccttgaacccaccatttcacacgattcaaatggtatcaatctaccaagtgaaggacaagcccaagctggcacttccaatataggtgggggacacaatgctgcatatcctcaaaccatgtattcttctcaggcacagccattctattaccaaggtcagatcacaaaccatatgttcttctcaggcacactattctctaattgatgaatgttattgttgagtccttgacataattgataatttgtcttttatgagcaggtccaggatatgataacccttcaaatgaatgggatggatatcctccttatgtgagtgttgaaggcttggaagcaggtccagcggtaagcaatctgtttttttggttgccagaagtttttcgtcaagcaccttttctaaaattgttggcttttattgaaggttgtatacaatgatgatcctcaattgatgtaccatggtggctatggctatgacccttatgctcattattctcctatctcaacgcctgtaccggctgctgttagtggagatggtcagctctactctcctcagcagttctccttctcggctccttactaccagcaatcagtaccacctggcatgccatatttaagctctcctactccaatatcacagggtgaggcaatggtgccgattgacccaacacaaggggcttttatcgccgaaactctgagtcctaacagcttccttttcggaccaagacctggttattatctatcttatgccttgttcagctgatactcctaattcaggtttcactttttaggcatgattttaaccttttatctcatgatgataatttcagaatggttccgatcgtctgaaggaaatgggtcgtttccatcacctgcggcttcacctcaacctgctggtggcgtttcagggccctttggacaaagcaacttccctatggcttctggaatggtattctatgcacatgccatctcttgtctatttcttttgtcaaatgaaatagtggttcaccctgttgcgagctactaattgtcataggtgtctggggattaatccattcagtttccaaacaatcttgcctaagtttaattcacataacaataagcttagtagactaataaaaaatgctatgcaatctgcagtgccttttctgattgaaatagatggccgcatattctctcctattctgttttcgtgtgatcttttaggccataattcagttaccataaacatggtcattcttgaatttggatataatatcttctgactagacatgtaatggcaagaatgcctggttagaattctgtaaattcttataatgaatggtcctgattcccgatatggccaagttgcctctagttcaaatgcaaccttaagctttggttttcttcttgccagtgaatttcacagaaatttacttagaattatgaattgcttttcctgataaggacactgtttactatctcaaaatgactactatcacttgtctgataaggacactgtttacttgtcggatatttacaatgacacaggcatatttacttgtatgatctatcttctgacactcttccttttttcccctctaatttcagcaatctcctcagcacaggcccttctatggttttgggacaccaagtgactcttacggaagagtgttctctcatggtggatatttcccacaggccactaattatgggggccctttccctagctttggcctgaatggtacgagttctattccgatggaaaaaggccgcacgagaggaaggggcaatgctcttctttgcagctgcaatggttcacttgacttcctcaatgagcaaagccgaggcccacgtgccactaggcctaagaagcaaccagaggatggcggcaaggatgagaagccttctgcaggcgttgattgcgagttgtacaacaggcctgactttgttacagagtacaagaatgccagatttttcatcataaaatcatacagcgaagacaatgtgcacaagagcatcaaatatggtgtttgggctagcaccacaaacgggaacaagaaactagactcagcctaccgtgaagcaaaggagaaagaagagcattgcccaatttttctgctgttttcggtaattaaagctgtgacctactttcttattgttcctttactgccttcatttttttgttagtggttttgttactttgaatttgttgtttctcttcagagttaacagtttgaatgctatgtacaggtgaatgctagtgcacaattctgtggtgttgcagagatgattgggccagtggattttgagaagagtgttgactattggcagcaagataagtggactggccagttccctgttaagtggcacattgtgaaggatgttccaaataatcttttccgccatataattcttgaaaacaatgataataaacctgtgaccaacagccgggacacacaagaggtacataataacgataataattcttgttttccccttttactttgatatgcatgttgatattacaatgtaatggtttcaaccatttaatctgacacaaatagatgtctgcattatattatattaggtaaaactcgaacaaggtatggagatgctgaaaatcttcaaggatcatgaggaggatgcatcgatactcgatgactttgacttctacgaggagcgtgagagagccctgctggacaataaggcgcggctgcatcagcaacatcagctgcccagctctactgtggttgagcccaagaagcccttgactgtggccactgatctagttggtcatataactaagagctttgcgcaggcagttcggcttggtgaggccaagaatgtgagccctaattcagctgacaaaggtgccagtggggattcatctgtcgctgcaaagcctttggaagttaaagaggccggcttagcataaagccccagggtgattggttcatactgaaaattctctgatccatgctcttcctctttgaaatactaagaaatgggcgaagacaatgtccagcgcttctgtctggtgaagcattgtacactaggataggatggaagcctagctccttaaatagtttctttttttacctttcttttgttccttatcttttcctgttggtaatatttttcgttgcgtttatatgatgatcgattccttagtggctagccttaaggagagctgcagtttttgtgcaagcctctgtaaatttcccagttcaatcgatctcaagatgaataaggccttttgcctcctccagtaaaatcctctttaatctacttgtcttatactgaacaaggtgtgtctggaaaacaacataacatctgtttgggtgacctggtgatggtaacaataacaacttgttaataataaagagagtgtgaccttgtggtggtcgcttatgtgatctgtgtctgttctggagactggttattttcagtgatgatttgcttgcttccagtgcttacaaattttgtaacccttgtactatcttacttccgagacatgagataccaggcaggtatagaaatggtagaaacatcctgcatgggttgcatagtgtgtctaactggacaatactccctccgttttgatgttaatgaatttcacatttacattcatattctatattcattaacattaatattaatgtgggaaatgctagaatgacttacattgtgaaacggaagaaatattatttattgcccatctataaaaaaaaatcacaattatgttctggtctggccctcctgtcagtcacaattccattctggtcgtcccgttcagccccaactgtgacggcccataggaggcagggggttggcggcccacacataccctgcctcccccagtccactgccttcgccccctgtgcatcatctagtaggtgattttgggccactttgatctgatgctaaattgctaattgagtatttggtactatccctgtttcaaaatatagcatttaaaaattatcctaaaatataaaccctttcacctatcttttattcttaaccctttacaaccaatcataatatttttaatttcatctacttaatatccgtgtccaacccagaagaccaacggtagtagttttcagtagttcttagtagcaatttggattggagccaagttttaccacatttatagggttgaggcatgtgtatactatagtttcaaaccaaaatgaccctcttgcccacaatccgggcaagggaagaaacccaagaaatatgttttcctaaaaaaaaaatccttctattgcattgtttaaatcacttgttttaaattcctttataagtttgattttttaaagaaaaatatttaatctatctctataatcaagtagataaaccattggtaactacaatccatccaataacctaaatcaaacgggctattgcccacaatccgggcaagggaagaaacccaagaaatatttttcctaaaaaaaaaatccttctattgcattgtttaaatcacttgttttaaattcctttataagtttgattttttaaagaaaaatatttaatctatctctataatcaagtagataaaccattggtaactacaatccatccaataacctaaatcaaatgggctacataaaaaaacgtaaatattagaaaatgacctaatatcaaataagtaggagtgagaaataagtaggagtgaggatttgaacccaggccggctagcccaccaccttgtgaagctagccaaaagacctctagacatttctcaaacgtgctacatcatttggtgagcttaccatgcatgctagaaattcgacgcgtgggccaaatacaaattcatttcttcacttgagacccatatttcatacagaaaaatcgaacgaaaaacaattagccagaggacacatttagtgtattagttaatttttcatttgctgactgcctgacttttgttcagtcactttacatatttttagacaatggattttcattaatccggtctctatatttataaacgatatacacagtcaaaatatacacgagttcttagattgtatatatatccggtcgagagagaagaaaaaacaagtcaacaacatgtagctggcaataatattcatgtagaggatgcaggcttttcaattgaaaaacaagatggaggagagtaccagctagtttggtggagactgatgatgagaatcgatcgcgaagagtttagaaggctaatatcttgagatagtttttgctatctatcggcctcgaagttgtcgatcgatgcagatctcatccggacccatgcagcatgcctccctgccgaccaaatctctgtcagattgcattgctaagatcaccaccatctcatcttagctactaccacagcagcatccattgaattttgcatgcacttacacactgtttgtccacacattgatcagcttgcttctcactgtgtaggagtacatccagagagctgagctgcatgtaggagtaggtctcaagattcctcttgcatactcctactactcctcaaatctatctgcacaatgctgtccagtatgaaccactcctccatgcccggtacaaccctggcatggcatacacagtgtcagtgcagctggagtttgattctgatttatagtggtagcattattagcaacatttgatattgacatagtactactactcagtactggctttaaatatactatagatttgcatgtcatttctgcggtgaaatgcagcccacgaactggaaagaactggaaaccggactatttgcatccttttgctactgtttgtactcactactcacacaggcagcaagcttactgtttgtgcatactgtgcctgcaagttcaagctgtgcagcgatcttgatac

SEQ ID NO: 9192 - DNA, 7754 bp, Oryza sativa
tgatgatcccaactcagagcaaccccagaatatactacctctgttttttaaatagacgatgctattgatttttttatcaaatcattcgtcttattaaaaaattacgtaattataatttattttgttgcgagttattttatcccttaaagtattttaagcataatttatacaaacatttgtataaattatttgaataaaatgaatggttaaatatgtattcaaaaattaacaatatcatctattcagaaacagagggagtatatgcttggcttgatttcctaatcgaacctgttagatatcggaaaggctcatgtcgctgtttgcctgtttaacatggggatttaaatctattatattattaaaagaatagaaaaaggagtctccacgttcgctctcatggcctagaaattctcacattaatcggagaaaaagaaaaaagacagagtccatatagaaatacaatttagaaatagctgaaattcggaattaaaaaataaggaatattagaagaggagactagagtccatatagaaatacaattaggaagtaactgtaattcggaattaaaaataaggaatattagaagtagagtatagagtccatatagaaatacaattaagaaaaaaaaatagaaattcggaattaaaaaataaggaatactggaagtagaagtagagtatagagtccatataggaatttaaaactaactaaaattcgaaataaaaaggagcatccacgttcgctctcatggcctagaaattctcacattaatcgaagaaaaagaaaaggcagagtccatatagatatataattttgaaatagctgaaattcggaattaaaaaataaggaatattagaagaggagactagagtccatatagaaatacaatttagaaatagttgaaattcggaattaaaaataagaaatattagaagaggagactagagtccatatagaaatacaattaggaaataactgaaatttggaattaaaaataagaaaaattagaagtagagtatagagtccaaatagaaatacaattagaaaataataaaaattcggaattaaaagtaagaaatattagaagtagagtatagagtccatatagaaatacaattaagaaaaaaaatagaaattcggaattaaaaaataaggaatattagaagtagagtttatagtccatataggaatttaaatctaactaaaattcggaataaacataataaaattaaaagtagtgtttagagatcatataaaaatacaatttacaaataactaaaattcgaaattaagaaaaacatgggaagaatagtttaaagtcaatataggaatacaatttagaagtaactgaaatttaaaattaaaaattaaagaatattgaaagatgagtttagagaccacatagaaatacaattagaaataataaaaattcagaatttaaaaaaagaaatattaaaagacgagtctagagtccatataggaatatatataatttacaaataacaaaaatttgatattaaaaataattaataactaacacatatataaaatacaatatgcatattacacattagtagtttagtaaagttattgcaaaatttaaaattatgttgtcattttaatatatttgaataatataatgagaaaatatatatactattacatgagagaaaatataatgatgctagccgcgaatctgcgcgggccaccataatagttaggaagtatagtaagatggacgggctgactgtttctaccagttcagattctacagcccactggtatgggccctgggctaggaatatggatggtgattgggccgaagatagtttatttctcttctctctcggcctatagtcttaacaatcttatcttacgtgttttaaaggcccaacacgaccaattttgtcaaagatcacggttaggtagcagattaaaagaaaatagtaacattttagagagatataaatacctgcacaagcagaaaagaccgcgtggcctaatggataaggcgctcgcctccggagcgggagattgtgggttcgagtcccatcgtggtcgtgtttttttttaacctttttgaactttccaactcctccgtatttctgtactagtatttcttttttccaaactaatttatttcgttgcgtcgtacattatgagtatatcccaattgtgttcacgtgtgttttattccttactccattttatataatataagctccctaagcagcacaaacatcgtctaaaggacgtgttgcggctccactactttagctacggtgcaaaatagtcccttcgtattttaatgtataatacaattaaaatatttaaatataaaaatatttatgtcatgtctaaagggcatttattataattatataaaataaataatcattatatttttttaataagagaatggttaaacgttagtaaaaaaaataaacggtgtcatatattaaaatacaaaaggattatgtattttttgtcagtgcagttatggtaggagtacgttgtagcgcaacgtgcagctgaatacggtctattataatagatatttaatgttataatcccatgatatagcatttacaatatgtatgatgtaaaatatagatatttttatgtaaacgagatgattaagcagacgccatcaacgaatgccttatcctatcttattataaagttatcccccactaacttcttaagcttaacatacaaagatgccatatcatcatccactaacaagatgccacatcatcattcactaattaacaagatgtcacatcatcatccactaacaatcatcgcatttaaacatcatgcaaacatgctatatctttatagtttttataatttaagagtttttcaaatacaaacatgttaaattatcatccaatataattcacataatgtttcaatgtatatattcatgcaaagatgccacatcatcatccactaacaatcatcacatttaaacatcatgcaaacatgttatatctttatagtttttataatttaagagtttttcaaacacaaacatgttaaattatcatacaacataattcacataatgtttcgatgtatatcttcatactaaattcccgcagcaatgcgcggggtttcacctagtttttattatacaagctgctccttacgagataatcctaatccgtcaccgcatctatctgaaaataaataaagcggtaaatcaggtagcaccgtgaaaaagatcacgtttatgttgattattttgaaattagaaggtcttcataaaaaaaaatagatggtcaaccggttggattgaatccctcctgaccacatgaatctctcaactcatagaaaaaaaacatcatcattagataacatttcataatctcattcatgtaccaaccacacatctccatcatcaaatagagtaattatccttctgtgccaggtattcgaaaaaaaataatcctgatttaccagagcagttgtaaacaattttagtctttcatcatttatcttttggctcatcaaccgctaccaaaatttttaaaaattaaagtttagttttcaattttttaaaccaaagtttgtttttattagcttttgaatcgccaaaaacaaaaatataagttttttatccataaaaaaaaatagcatgattcatatttttccacgtcttatcagcaaatgagtatatgactaagaaactataagcagtataaatatttaacgtctaggactgatcaaacttttaaaactatggtaatctcaataatgtctcaaacaattagttcaaaaagataaaagaaatcatatacgtaaaattttgctcgaagagtaatactcctctactcatattagtacaatatcacaaacttattgtagattttataaatttaatctaatacattttttatcttatcttaaatgtcaaatatattaataatagccatgtgcgtcattagacggtagtacgatcatacataaaatcccagtcaaagacagggaagcagagcagagcaggaggaggaggaaaacttgtagcaagtgatcatttcatttggtcgcgttaacttgtcgtagcatcaggcacgccacatgctacatacaacaaaagcgatcgcatgtgttgttcgcgtcgcctccctctcacgacaagcaaacccaacccaaaccaaacacgagccggacgagacggagcgctccctccctctctgtcgcccgcgacgccgcgaagccgcgggcgccaccgccgccgccgccgccgccgccggagatggacggctccggcagctgggacgccatagactggaaccaaatcaaggtcagtttgcttccttccttcctcggtggtgcgcttcatccctcccttcctcctgcctctccatcgatttctctcctcgctctcctgcctgcgtcttcgcgggtgtggctgtctgcgacgactgcgcttgcgggaggggagctggcctgtgggtttgggatcctcatgcgcgggcgcggggccaccgcctgccgcgcggagaggcttcatcttctctcctctcctctcccgataagtgcgcgagtcgttgcggggggcggttttgatttggagatagggttcggttgctgttttgggggtgatctccgatttcacgttttgtttctattgatgattttgttctctccgctttctaggagccgaggccgccgcggagttcgtcccggggcatggaggacttcctcctcgaggatgaggaggtttacgcccaggtaatcgcctccttttcccccacatctgtgactgaattcctccagtttcgatgtgcaagcttcatttcggacggaaatctccgaatcagttgcgtgacgtggtgctttactaaccttgcaatatgctttgtcgattgccctttggattaactcatcaaattcattcattactgcctagaatgattcgccggactatcctgattgcaatgcacccatccattccctgttcactgataataagtaggccattcacaattgacaattctcctctcaataacacaaccggggcagcagaatctgtcacaatgggcagcgcatttctagtgctattgttcaactgcagcagtacaagtagtacaccaattgcctatcactcataatctgtaggccattcacaattctgaatgacacaaccggggcaggataatctgtcacaatgggtagcacaattttagtgctatggttgaactgcggtggtacaagtttaagtagtacaccgaacgggttctaggccgcttacagtggagttaatggaagcaataatgtacctagtctggatgtacattttatcagggaaacttttacgtaaacactaacgatttttgcacattttcacctactaaggcacaccaattttctgtgcgtaatctagtgatcatgatttcccactttcaaattttgatacatttttgcggagcctgtcggcttccagatcatcaccttttcaagggtatttaatcttggatagttgtttttgagccttttggttcttataaaatcctagggacaattatactccatgagtttgtaatcaaccaatgtgtttcagactgaaaccaaaagccttacacagacagaaacagctgcttctgacttttgctcttttacatctctaatttggtccctcttatatctccttatttagggtcatggtgttgttctactaaacacagatgaggctggcattctttcagtgacaaatttccgacttctctttgtggtaagcaatcatattattagttttatcacaattattagaaacaattcgacgtgatttggatgcctcctgcatgtctatacaagttcattctactatacaacattctccgtttgttccttatatgttctctcaatttttttccatcgatttgaaatatgaataatgtcttgtttgctttttgagtgggaatttagtatattatgacccctgtttttttttttggcttgaactaagcattctaatgatggacagactgctccctcagtcctttccttttcatattactcttgttcttcttttataaatgctaccccttttacagagccaagccacaaaaggcgttatagagttgggtaccatcccactaactgcaattgagaagataaatgatgtaagtctataatttccttcattgggaagttcatgttttcaagtcttcttttgggttcatggccactattccattttctttaattcattctataagtccttagaaaatattgattctgtggcaggacgtaaagcttcaacccttgccccgccagcatgataagaagcagccccgtgaacttcttcaagtcatcggtaatatatttttttctttttttactttgtaagtcagctttgaacacaattcatatatttacagtcctacttaatcatgactgagtagatcttggcagaaatttgtaaataatctgtcttgagaaggtattcatggtgtgcctgaaaggatctatgttgacatagtattaatactgccagagacctctattacatgtcctcttgtaattgaatccatctttcgttggtgggatatgaattaaaaacaataattatcttcttgaaccattctgtgatttctgtgcgataatgccattttccttgttcttttaccatagtatcgccatttttattggtgatttttcagtctatgtatgtgttaataattttacctgacatctaaagtagtttgcaaatgtatcttgttttgaccttacctttaacttgatctttttttcatccaggtaaagacatgagggtcattgtgttcgattttcttcctaaaaccaagcaggtagaaatcctgtttcattctaatattcttttgtattatattttgttctattctccatttgttgggtgatgcatcgttaaaacctcatatggtctcatactttgttatgtcatgtattttaatcttttgtgtttcatttctgttacttatcttttcagaaaaacgaagtgtttgatgctttgagaagatatagcaaacctactcatctgtgggatctatatgcattttcttgtgatccctccactgtttatcagaaatctgatccaaagatgcggctcttgaaggaataccatcgcctttttaggaaatggttcccgcatagtggatccgagttcgaaaaagacttgcgtaatgaatggtggagggtaagtaaagtaaattccacctactcactatgttcgacgtacccatctgcattgattgtgccaaggagcataaggtacttttataccattcataatatcttgtggtaattttattctcttacacatgctcagcaccaacattttttttattatctgttagtgatgaagatttattgcaagcttcttctttccgatccggcagacgcttgcctgttatttcgtggtgtgaccctggtatgcatgcttacgttttgccaataaatttcatcattattctctgcagtcttatgctccctatattttggaaaggctgatgactgttggtgaatggtcttatgaattatgacctcattgccattccttttatatttatatagttcataattgttccgctactttcagattttgggggtaacactgtaacatcattaatataaagtatcatgttggtttcagttccctttatacgacatgcataaaacttgagtgtgtttgtgttacaggtctggagctgttctggcaaggtcatctcagccattggcaggattgatgatgaattttcggaagt

SEQ ID NO: 9193 - DNA, 73764 bp, Oryza sativa
attcctgcagccctaattcacaatggttgcagaataacctcacaattttctctattcccagaggtctatgctgctcgtgaaaaggttggagtctacatcccaaaagacagatatcagcaggaggagaatgagagaaaggtaatcttttggatttaatggatctgaatggggaaatattcacaaacctgaaatatgtactgtcaacatatctgttatgtaactctagatgttattatggtattgagaagatttggagcagtttggctgatgatgctaacttttcttatttttcctttttaaggccatggctgatcaaattgaacagatgactacttcgttggaagcaaatcagaaggttcgtaaagtgcttgttgtgtatatttgatatttgttcttgtttaaaattgatcttttgcttgggtttcagcaaattaatgatcttcaagaaaagtacgactcagagcttcaacattctgctgatctaagcaaaaagcttgaagccacagaggtaatcatgattgcaagttagttcctttctccttcatgctattttgtgatcgaaggcttatagtgttgtaccatgatagaaatgtctggaccatacaagcaacttactatccacaaccaaagaagatttgaaacaagcccagtataatctgaaggagaaagattacataatctctgagcagagaaaagcaggttcgattctttgcacattttttattcctgcaggtcaattgttaataattctaacagtattttcatccatctgtgttgatcagaaaatgctttaattcaacaagcctgtcttctgagatcagacctggaaaaatctaaccgtgagaatgctgcactctattcaaagattggtaagctcttttggcttaattcgatgactattccaaaatgttgcttactatcatctttgtcattggttctaactgaatgattaccatgacaaaatagctcgaggagataaactaaatgctgcaaataggtcagtggtgaactcattccaagctgaccttgcttcaaagttggatattctctccactacccttgccacatctatagatcagcaaaataaacaccttaaatctgtggagaacttatgcaagtcttgtgttgattcccatgacacggtatgcattgctacttcataaatctccatgcctaattttgcaaattagttatgtgggctcagtggttccatattatatttatatgtttttttttgttaaatgtttaaggctacttcggagataaaaaagaagattttggcttcaaaggcactttatatgtcacatatggaagccttccaaaatgttgtgctcctgcataaagcaaattcaaattctacactagaggatatatcatccctatctgctgcaagctgttgcagccttgatcaggcaagcaatcttcttagttatccaacaaatacagaacctgatgctctttactctgtgactaccctttgattgagttattctcatggcattattgttaatgacagcttctagcttgtgtcgagggagaggcacagaagatatttggtgatatccagaatttgctagctgatcatcgaagcgaagtggcacatttcactcaagagttgcgggaggtcagttacttgatctgactgttaaacattctaaattgtcaacatacttgcctatgatcagctcttaattgaagtttgctcctgttattatgcagagtttccgcattagcttggataggacgaaggacatgtctagtttcatccttgggttgttcgataagtatgtggaggaaacttcgaagttgcagagccactccaatcacacacatgaagcacaagtcaaaagccttgaagatttccagaaggcttatgaggtgatcgatcccccttttgtctgcttgattggcaaaatttggttgctgtatctaacatcaattttatgcaggagcaatcaaaatcagaagaacaaaagcttctggcggacatcaccagtttggtttctaaacacgttactcgacaacgagaactggtgcgttgcatactttcacctcataaatataagtctggccaaccttttgaggcatgcttttgatgtgtgatcataattttgtatcttctcaagatgcttctggggcgtgtgaattcagttgtagtttggttttgatggaagcctggtgtattttcctgcaggtgggtggtagactaaactctcttggtgacgccgctcgtggaaacaaagcatttttggatgagcacacgtccgccatggaggtggtcacgaaggacgccaagagaaagtgggaaatgtttgcagagcaggcagagaatgactgcaaagttgggtccaacttctctgcagctaagcattgtcgcatggaaaccattctgcaggaatggtatgccttcagttgctgcttcttcgttccttcttcccattagtttgattggctttctctaactaatgatttgtactggactcagtgcatgcaccgtcgacactgctgctcaacaatggaaagcatcacatgcaactgttaacgatctatgcagaaaacaaatagctgaagttgaagcactcgtcaggcaagctcatagtttctcttaagctagctgttgctggttacaattggttaggaaatattgtttagtgcttcttcatcagatttccacttatcgagctagcatttcaaacaatccattcttttaataatcgtgtttgccaagtagcacataatttcacaacaaaagggaacacttctgaattcgttgtgaatgatggcagtggaagttttgaaaagtttaaaatctaacgagcgtctttatgttgtatatttcaggagtgcaatcgaaaccaacgagcagcacgaagcagagattgcatcttcccgtgccacggccgaggagcatgcgtccaacagcagcaaggacctactccaagatgttgacagtaagttctgagatctcatcacagttgcctacttctaaaacacggagttgcgtaaagctaatcccaacctgtgtttcccatatgctcgcatcagatatgctgcaggaggcgcgcaattcgtcgtcgagagtggtgtcgacggtggaagctcatttgggagagagccagcatctacaggagagccactccagccataccgccggcatcaacacccacgccgacaacgctttccagagcagctacaaggtgagcgagactagtacactcaaaatcttgtgaaccgatgacaattttcatttcaccgaccagagcctgatgaacaactccgctgttgcttgtgcaggactacgagccgaccggcgaaactccggtgaggtcggagccggaggtgccgagcaaagacgcgatcgagtcgctgcgagcgatgccgatggagtccctgatggacgagttccgcgagaaccacccctacgagccgagcaaggaccgcaggccatcgctcatccctcgctcgccgctcgccaccatcaacaactgatgaaaatccattggaaacgcaacgcaatgcaatctgtctctgtgtgtgtactagtgtaatcttattagccgtaagtaggtcatcaaatgctggcttttggtgtcctttggttgttgtggctcagtgccagtgccagtccagcttcttgttgtgggttgcgagctatctcagcttcccccggcgcccttacctaactttctttcacattttattattttgatgtaccaatctgttgcttttctgtgtgattattggagctgcataagagatttgttgagcattgcattccaaatctcatctcattgcattacacttaaccacacatgagaaacaatcgacgaggttttgtcatctaaattaaaaggaaaatgagatggcatcaggtgaggtagagctgcatctcggagtggttctcctgctcgatgacgtcgaggaagacggggtcgacgacgatgtggctgtcgatgctgacggagaagcggcgggaccagagggccacggcggcctcgccggcgatcttgacggcggcgtcgagctccatgtggcggcgcgcggtgtcggcgaggatggagcgggcgtggtgcgccagctcgacggcgtcgaggcgggcggggaggtggagcaggcggcaagaggtgggcggctgctcgccggcgtcgaggcgggcggtgccgaggtgggcgccgtcgtagaggatggagacggtggaggggccgtagcggacggggacgacgttggggttggtggcgtggacggtgagggtgaggccgatgtccagcgccgccggcggccggaagtggaaggtggagaggctgatggagatgagctcgaacgtcgggtcacgcggccggcacagcagcacggccgccgccgccgccgttgaggcggcgcccacgagtgccgagccccagctccaccgccccctggacgccggcgccggcgacggcgagctgtccatgtaggcgtattggggatttgggttagccacctttttcctttcctttttgcgcgtggccttgaggttgttttggcctgctccttcagagttggaatcaggttcttcgcgtgcagattttgttacttctactcaagacttgattagctttgttaatccgtgaatcgacggctggcatttattctggtagttgagatagtgaaggttaagctaagagtaaattgcgtcagcggtaaaggaacttgttaagtgtgtgcgatttagtgtaaaaacttgtaaaatgagcaaaccggtacataaactttaacaatcacgtgcattttgataaaaacactgttacataccaatgattcatcgtattttattggttgtattgtaaacataactgctagattaattgttggcaatgagaatgttttgtagtgctcatcagcgaatttttttgattagctggatcgctcagaaattttgttagttggcatacacttagttttgataatcattatttttttttcaattttaaataataggttattttagtatgataaccgagcaaacgcaacctatctaaaaccttgttcagaactcaagatgatctaactggctgctttttctttacatggctgaaaaagtatggtttaaaagagagatcttttaaccaaaatgtatgcactaaccaagttattagacccgtataattatttttcaaattcttgcactagatcgtacccacttaccaagttcgtgtactataaacgcaatttactcttaagctaattatgatttttaggtcccaaataactggacagagttctgtttagcttccttatttgatctgaaaattaactgggcataaacagagaagcttcactgcacctcttctacagcctcatttcagtgtcattcactataaaacaagtaaacagggagtataaattcttttacaataatcgtttcaataaaaattcgtgtacaataaaatgagcagtgttatgtgtatgtgcatgtactgcattatgaattcgccgattccttgtaaagaatagagagaatctacaacataagaatagagagaatgcatattaacacttgagatatgtcaggttatcagtgtagtatatactgcatattgacacttgagatatgagaagtagaagggattctcaagccgcatatgtggccctcaggtagtctatgatatcagcgctctcgaacatcttgacccctgtgttaggatcttcgatataaggagcctgccacagcagtaattcatgtcaagcgcaaagaagaaattttacaatttaaggcataacatttgatggttgccaacctggaaaatgccgtatttcttcaaaaattcctgtctcctggggctgccgcgtgcacagctgcagaaattttcagctaccagttactccaagagtgtagtgcttgcaattgcaaggctttgtgatacagggttgtgattttacagcaggaaaaaacactgatgatagctaacagcatatccagcaattttgtcattggtgtaacgttattgagtacctgtgtagcaagtgtggcaactctaattcaacaagggtctctcgtactattttacagaaaggagatccctgatgataaagcatgcaccggtcagattctggatctggcagtaagccacaggaaacggcaaatgcaaacgtatcaatatgcagaggattcagacctcatatgcccatagttctattggctcgggtggaagctttgcaggagtatacttagaaccctgtaaacaataactggtcagccctggatacggttcatgcaaaacaagactatatggcttgttcaatatgtaccttcccactacgtccactcattgcgagccctgctgttatagtctaggaaagaaagagcataaggttatttaaactgcacaactgactgttaactggccaaataaaggttgctgagtaggtgtgaaattcaagaaccatatatcaaataataatcgattagacgttatttcaacaaaggtaaaaggacagaaccagatcataacttactgttaatataccaagtgatagcataattggaactgttccatcacctgaaaagcaagggcaaatgcaggaggttagtaggaggccccagggacagggagatgtacagatgagagatgaaataggcaccatatttgtcggccaggtattttatgatggcatcagattcatacatggcaacccctgtgtttggatccacctgcagcataagagtaccttagatgatgataaaaacaaactgatttcacactacttcttccagacagaaagaacacccaaatatcctaagtgaagggaaaagtggaaaacagacacatcgctgtagcaaagtaaatccatacgacaaataaaaataccattttgcaaggtattcaagactctgcaaacatgaatacatggtaatggtgagattctgagcatgcttgtttgtcaaatatatttccataacatttttttagtaattcatagctgtgtaaaagtagaacagaagtaattgagtatatgacctaagaaactgaagaaattatggaggattacttgcataccatgtaaggaaattgttgctttccgcccatctctaaaacctttggacggaaagtggggccatttttagggcaggggtaaaacaaaacatcaaggtccaagacggccaccatctctctgacctgcaaattttaaaaaaattgttcatacatgacagaaggtaaagtgcaagatgcagatgtcgaaggctaaaaatactaacctttcggcagaatgggcagctgaagttgaggcagaattaatacagcaacaattgaatggacggtacaaattaagttagctatagcatgagagaatacccagaagaagattattgggtctgaacaatacatgtcttttatggaaagagagaaaagatgaagcatatatacccttcaaactcgtaaatctcgataggcttttctggtcgaggacactgccctatctttgatgactccttaaccttccgacctagaataagaaatgacacatatacatgtgttactatgtactggtttgaagtctgatctcagcagttgggctggtaatacagtaacaatatagtgtctgttttacgaagcaattgagaataaactaggtcgttgtatggtgcaaaatgacgaccttgtgtgtgcgttcatcgttggtatttgctttgggaaaataaaataaaaagattgtaccttggaaatccaaagcatattcatctggtgccacctcgtcaggagaaaccagcgataccgaatatctgcacatcaaatgaatccaaggccatgaatatatgaatcgagtaacaataagatttagaaacaaaattcagtaggtattggatcgaataaattcagtagaaatagaaaataaagtacccaagggcgaagacgccggtgccgaggcggaagggaatggcgagggaggcggtgacgatgtcgtcggactggccgggcttcacctcgaaggtcttgggctccggaggcttgaagtcgggaggcggcgcgaaggaggaggcggcggcgggcttatcagaggtggaggtggaggtggaagcagcggcggtgtcgtcgagctgcgcggagaggcgcgtggtcctgcgcgaggtagacgtggaagcggcggcggaggagaagcggaggcggcgcgcgaggaggagtggcgggaggtggagcgcggtggccgccatggtgcgcacagcacaggaggaatcgaagacgacgcaacaaaagaaaagaaaagaaaagaaaatcggtggctcacttcactgcagccggaaatattttgtgctgctgaatgctgatacgatacgataccacacgtgggattattttggatcaccggtccgggagataagtacagacagacaggcactgtacaaggtctctttctctctctgtatgaggcttgacagtgattggcacttgggcttaacgtaagcagacgacagatgaaaaagaaatggacattctatatttctgtcacattgtttagtacaatcataatggagtggccaatataatgtcacttgtttggttcaggcttcagagtgttttgttttttgttagtagcgcatgtatgtgcaccctgtgtgaagttctttggtgttgtcaacaattattatgtgttgagagactagtatttctgatttccttattaaaataaatgtggcagagggtcttcagcctctgatggtcggattgagatcctctttagggtattctcagccgtccgatttgcagcgaatggatgagatcgatcgctacagtacaatatagtaacacgcaaacagtacctttgtacatcatattttcctgcttatcactgttgctacggtaaaccactgcagattactgtttcgtactgtagcacaagacatgctttattgttctcctatgtctttagccctaaagtcacaagagttggatccctaatggtcagctttgagtgctgccactctgaaaccatactatcctcggtagagtactcacttgaaggtctgaggatgaaacttccgtgcccctctttagtggctaaccatcgggccccttctcgtttacaatctcgtcacccttattcttttccctaacactcataacgccccctcccctcctaccaaatctagaggtttacatatagtgaacaagttgacattaattatcgggttgtgatgatgaatgtgatggcattggggatggctacgacagacactggagagacccgatgaactatggggctagatgtgcgccaaattgtgtaggctgcatctccaagacacgatgggcagtggtgtgtatgagggcttggtgaacaatgacaaccacatggctagtggtgcatctagttggcctggcacccgtttcggtcggtttgactccctcatgtgaaaggttggtggacgtggcttcttcttcttcaggatgttttccacccccaaccaacaatgtccacctatggctgccgttgccagcggctacctttcctatgtgcctcctctcttatcctcttttaaccctagatccgtttgcctccccgatgacatctccacataccttcttcatttgccaactcctttcctcttcgttttttctattacggtcgtggaactatggtcaatgcatttctcgtgccattggcccctagaaagtccgcttcactcttccctttcatccttttttgtgtaaactttgtgccaatactggcatgcctccatggttggagtccctagagccattgtttttaccgttgcttcaaccaatttagctctgccccattgtctaggagtgtgtccaatcactttagccttgtcccctcctttggatctgctcaatttagcatgctccatgtttaatagcttgggtctccatgttggttgaggtctagggctctaggctcttccggtggttgtggtgactagcgagttgtgcctttcttctatcagtgtgatctccatttatatccttttgtccagatccgtgttcttctacatctttcttcaatagccctccctcctttttgtctagctccctgctagtttacatcctccttcaacaactcttcctcttgtggggctccttttcccaaaagggcgttggagtttatcacgcttcttgtttgtctacatcttccttcaacagctcttcctcctttttttgtctagtttcctgttcgtctacatcctacttcaatagcccttcctcctttggggcttccttccccgaaaagacgttggagtgtattgaactagatgacaatttgatgaagtttgatcgaagataattggatgtgggaggcctagagaagtaacatttaatggagtgtggacccacaagtgcatcggtgggcattgatctaagcaataacatgataaagtgggattcttgatggcttggtgttggtggcgttaggcaatcacaaccttcgatcaccgggatatcgagctagcttccgagtagcagaaagccctccggtaatattcaatacacgcacatcatatccttgtgagcacctttaaaaggctggacccgacatatcttgagattgacgaagtcgatacggacacattattgttgatgggtacatcgcataacactaaaatgcgagcactcatgtcaagtttaggacttaacctagatgaacaggttctgtagcaagaaacctaaccagttgagttatgctcactttgcttttactatgtctctttgtcctttgggaaggttgtggtgactcccttcttcttttttttttatttctatgtattccttcactttattctttaggactcgtgcgcttgcacagccgaagtaggtcataaggatgtatggtttaaaaataatatatttaaggccgtgtttttttaggtgttgggaatacttcccctctgcatgtaaaatagagtgacaaattaacgcatgattaattaaaaatggattatatgatttttttacattaatttttctatagaaactttttcaaaaaaaacataacatttagtagtttgagaagtgtgcacgtgaaaaacacagtagcacaggttgtgaaccttagttaaaacttaaaagcacagcctaacaaaactccaatccttgattcttaccagtgattcttcggaatcttttcatcgttctccaatccttgattgcggtgttgtatacttgtattaggcatactccgcattagtaaagaaattgcttagatctgtttttgtataactggtggttagattcgcagcgttgaccagcattcatattccgaattccgagccgcgtgaaactaacgcgatgcgacgcgacacgtagaaatatccatggtcggccgggcgatgcgcagtgagccgccgcggaattgaatttggatgagcaacaacacaagacaagacagacttgttcttggttgtgtccatgtaaacttccatcatcaaaccagcacacgtacatattaggagtatttgatacatacgcgccttcacaatttgcaattgccaagaaacgaaacgcaacgcaaagcagatttgaaaggaggagcttacttaggctgctcgctcacgacttgttccttccttatctctctagctgcttcaccactctactaatgctaatttgtcttgtcctgagttagttgttgttgttgttctcttctccctttctgtttgtgctgctggtgaaaccgctcgcttagcaatgaagcaactacgagttacaacaatctcttcttgattactccctccgttttctaaatatttaacaccattgatttttttaaatatgtttgaccgttcgtcttattcaaaaaatttaagtaattattaatttttttctatcatttgatttattgttaaatatacttatatgtatacatatagttttacatatttcataaaagtttttaaataagacgaacagttaaatatgtgtaaaaaatcaacggtgtcaaatatttagaaacgagggaacaattgcttacgactcctaatactaatagtataaccatcaatttcctccctgttgccgtacacctgcagctttggaagcttccagttaatagctccttcactcctctcctcctccttccccgatcgagatcatccaaaaatttcttgccaaaggccgcacctttgcagttctcactgcacaggtataaagaaaaggccacgcctttgcctcgtcagttatctcttcgtttcttcttcttcctccttcgacgagagcaagcaagaagccatggcggactacaaccgctacggctacggcggctacggctccaccccgtcagcgccacccgcctcctcctacggctacaccaccacgccctccgccccaccggcctcctcctcctcgtcctacggctacggacatggcggcggcggttacccgtcctccacctacccaccgccgccgccgtcgtcgtcgcaggcgtatcccatggggatggggggcttcctggtgttcccgccggggacgcacccggacgtggagcgcgccttcagggccgtggaccgcgacggcagcggctccatcgacgagcgggagctgcaggacgcgctctcctccgcctaccaccgcttcagcatccgcaccgtccgcctcctcctcttcctcttcaacaaacctgcctcccattccccctctcgcatgggtaaacctgctactcttcttccctgtgcgccaaatcatatatcctctcttcatcgcttcaatcacgcccagaaaatgaaattttcattttctttgtttgctgttctcatgtgagcattgaattccaacataaggtctatgtttggctggaatttccaattccttcagtgatagattggatgttcctgggagcaatttgttgcaacttactcgtatcatactgctcgctgcatcgaatctgaaacgatagagcacttattactgctattattaccagtttacagtttacacaacctttataactatacttttattgctagtacaactgaaagatagaatcatgcaagtacaattccttttgaagctttcctctccttctactacatgggaaattgggaatgtctgtttctttctgtaaaagcttctaccgtagatcattctcttctgtgcccatggccccttgctcttagattggatattcaccttttatgagtgttaccgcttcaactattgaaattctatatcaggattgcttacaagcattcgtgcattagtttcgtcaatgcagctctgccattttagttgtcaaaataagttactacaaaactgactgatttctcattgccacctgaatttgcaggtccagcagagttcgtgtcactgtggaattgccttgggcaatggcgggtgagtgccaacagtatttctatagttttatctacgaacacaacagacaaattacattcttattattgtaaagcatttagtttttggtgcctttcattgtgttttcatcattgcttcaactggacactaaattgtagacagcagtacagcccatccaacctgtctctcgctgttaagaaatctgcttaataatgcaagtggaggtttttatgtttgtattttttttaacaaaagaaaaacagagagaggaaataacaatgctactggagtggagacccagcaacctgtttctgtctggaagagctggttgcaattatgtctttgatattataattattgtctgttaacttatctaagcaagactttgcaagattatatggtgctcaattaatcaataggtgtcatgttgcctattcttctgttctttcatttagtgttacctattgggctaatttctgttcttggtggcaacatccagggcattttcgacagatacgatagggacgggagtggaaaaattgagaaagatgagttgagagaagctctacgcagtcttggatatgcggttccaccttctgtccttgagcttcttatcgcgaactacaacaatggagtctccagccgtggcgcgttggactttgacaactttgtggagtaagtatatttctcacacaaaacgaactcatcagtcagtttattttctgaatgaaggaatctgactattgtttcgtatgcctctgtaattttaattctgcaggtgtggaatgattgttaaggtatgccacttctcttccatttgcagccctccaattatgattggatcatgcaaagaagcagcaaagaacctaatgactgatttttttatttatttattttttggttccgcgtagggtttaactgaaaaattcaaagagaaggatacacgctacagcggctcggcaactctttcatatgacgggttcttgtcaatggtcattcccttcattgtcccttgacttcttcgggtgtctcaagacccaaagagctttgaatttgtacagcttttcagctatgtttctgcttcctagttggatttgtttgtgcaaataggccttggtgattttattgactctgtgccgtactgtgtacttagtaccattttgttttccctatagcctatatcgactgttacctgtgattgcgtctcggttctgacatgctttgatcttagttatcctcaaatgtaattgccttttgatgctaacagataatatgggagagtaaactcagcatctatgttcagtcaagttcttaaaagtctacttgaattatactgtttctgtatcttcaaaaatggggtcaaacggcgccgcatcatgatttcgatgctgcacgattcttgcgagcagcggcaacatttgctatcgattcaaggtcaaaccagaacgaacggtagttggcacaccaattctccccatgaacgaaactattcataaataacacaagcctcatttgcataaatccgaagtgcactgaataaactactacaaaatatgataacatatctcgatgttctcttgggtaagcacaaaactgatatcagtgcaagcagatctaatgtaaggacaagctcagttcaaccgcccagcatcttatcagcttcaatgtggagcaaaccagcttagaacaccctgtacggtttccccattgtgcttttgatgtacaggcacctcacctgcaaagcacaaaccataacaagttagactgattgtgtttgcttgttgggcttacactatataaatttcattacatgtaaacatcagaaatgtaaactactgatgccatgaagttgagaacagaactcacattctgccagttcttcttcaaaagggacacgaggaagttgacgctcatttggatgttttgctggatctgcttctcctccatcgacaagttacccacagcaacacccatgcacagaaccttcttcagctggaacttgactgtagctttcgtctcattgaccttggattcaagagactcctggtgagtaaccaatgtagggaacttgcctgcagagccaacgacatgacccagttagcagagcggtgctagtagaccatacatggcaaaagtgtgcataatcaagagcacacaacactaacagtactttaaacaagataccagcttaatgtatgtactatggtgtgttcagaaagccaaacagcagccgaaaaatttacttaacatataaagatagtggtccttgcaacacatgcacaataatttgatcaattccattgccgggagcccaaaaaattgaaatgtgcatacaagtacatgaaaaaacaggtattcaaaacaaagatcatgaaaagaagagcaagcatgtcagaaaatggaagacttgcctgccttgtttagaccaggaccaaggagacgggggatctgcttgatgatggcctctgatgctaagaaagcatggtacttcttggcaagcttcttcacaagcttcttgttcttgttcatcttcttaagggcctcaacatccatgtagtcgagcccaatcttctcagcctgtttaaatgccatggtgcagcatgttagtaggaagaaaattagggagaaacagtaccattagacagaataaagacagatattacagagagaaaaatccaaattgcatacaaccaaacacattagatgctaacgaaattgagtataacatatgttgacatgtaaagaaataagcaccagggaaacaaacaaccacattttaagaaatggtaattcagtaacactacatgtgttcaaattgagaaaatactacaataatgtaacctgtaaagtctgaattaaacaaaatggctacaacatcatatcttacctcctcgacatgctgggcatcaccaagcatgcagaccttcatcttggggcgggggatatggggcagcttaacggagccgctgaaacgcttgtccttttgtgggtcatagttcttgagaccaatttgaagctcaacggtctcggtgaacttcctgttcttttccttgcaatcagcaacaacctgggagatggcttccttgagagcctcggtttgtaacttactgcaattgatcgcacaagctcacattcagaatttgttatggaaaagaaagaacatttctgatactcatcaatcagtgcaccatactctggtataatctagaaatcagccatctctactgtttactaggcaaataaaacattctttatgatgcaacccagtgcttagttacataagcaatgctacaaaaaagatatatcaagtagtcacctttgttgataactatatacaactactggatccctctttggctcttgatgccactctgaaggtctatgtatgaaattcggcataaactaaagaccttttcctccaaattataaaactactggatccctctaaggtctatcttagatttattttttttgaaaaataaaagcattcaactgtctaacaagaaacgatctatgacaccagtatcccccaaagcaatgctactaccagactaaatcaacgaaaacaactaatcagtaagcaagttgggaggagtagagtacctcatgtttgcggccgataactcaacaacactctgcagtagaataaaatcagaaaaaaaaaactagtgagaagaagcgaggtacagcgcgtaaagacaatacaatcaaacaatcggaagaggtgaggttgcggatcgaggagggaggcggccggagacggagagagagacctcacctagggtttgggcaggggcggcgccggcggaggagaggcgaagaggggacgaggcagaaatggcgtctctgcttttatcgcctagagctttcggattagacgccacgtggcgatgtcctgagccgttggatctcgctactgggccttttgggccggaaaactatctaggcacatgcttaactgtggcccatgtttagtatgggcttcaacttgagttaattcggcctttggctgccgtacctctgaattctaaccaggactactgtttcgtctgctctcttcagcatttttttttgaagaaatcagaaatgtaactgcaaaaaatgagaaatgcaagtttaatttgtttttttgagttgaaggtgcaggatagacgtgggtagctttagtttacatcgctttgtagtttggactttgtcttagatagaaagtggaatggaagatcactgtcatatgagttgctgtctggattaattatgagtagcaagcttagttagatccaatccacttactaatcgctatatgtacatatcacatgcattattagaagaatatttagaatagtaatatgcctgacagacaccttggatccatcattgatgatttgcaatatagtacatgtactagttcccttggaaacacagacagaggcatgtgttaagcatgatcgctgcttccgtccaattatatatcatcgtaatattcctataatcctatgtctatgtggtggcgatgcccatcgattgaagcgatcacatgatcgatgatcattctgatcacttaattcctgatctcaaactactaatgacaagacaatatagtgtaaaaaattaggaagaaaattaattaaactgcatgaatgcatgcatggatggtcctatatataatacggttgttgcaggatgaggatgaggatgagaacggtgacggagaagctcatcggtaattcggtaggtagctaggttgacaagtattctctccgtaccttaaaaaaataacattgtattaggatgggacacattctaattttatattctacgtctagatttgtattacgatgtattatattttagtattagattatttttttttaacggagcgagtatacactagtacatctatctatccagcacgcacgagcaaaactgaaaccgagacgtacgtagaacaaagcagatcatgcattttcagcatgcattataatattatttcgttatctcaaactgaactcaatagcagaattttaattgcgccacatgcatgcatctccataattcgtccattttctttagatattggaaagattttcggtctttggctacaaacaagttgcaaccacttattacataattctttttttttcggggaaaaggaaatagattactcaggaattaaatcatctcttacaagatttgaaatcaaaagacatgtagctatttccccaccaaacactagacaagccatcgctacggccacttattatacgtaattcagcgaatggagagtataaaaaaacatcgaagcactagacaagaactaataataccaacacaaaatagataaatatttattgaattctatttataaatcttcatatgaagttggcaagtatctgcacgacacgtagcatatattagttccttgtcgtccatagcagaagacacagagcaatttaatttgatcgatcgatcgctagtaggatatatactattattctcaacgtgtatatagaagccgtaattatatactccctccgttttaaaatgtttgacatcattgactttttaagtacatgtttaaccattcatcttatttaaaaaatttaagtaattatttattctttacatatcatttgattcattgttaaatatactttcatgtacacaaatagttttacatatttcataattttttaataagacgaacggttaaatatgtgctaaaaagtcaacagtgccaaatattttgaaacggagggagtatatgcacgtacgatcctgtgtcgtcgttgccgcgtcgagcatcaggtaatagcaatactactgctgcctgtcgggcgctaaaatagaaatgaaagagagaggccatgcatgcatgcaaatgcgatggatgaacacccaccgaatcttcaattctcaacaaatactgcactgcatgcaccatgttttccttctgaattataggtatcggtcaattttgaatagtcactacttgatctgaacttgcgaagatgctcataggggtagagtttacgtacgtgtgtttataggggtgagtgtgcgtgtgttgtgagtctctgcgttgtaatgtatatatattttttttaaaaaaacagccccatccgaagggcaaaacaaaaacaacaagcggcagagatccaaacacgtgggcgccgactccgcatccgcctcatccacgtgtcgtgccactatcccttcatccgacggctctccttcctccggcacgatatcggacggctgtcccgccaccaagctcagacgatgacaccctttccccctccctaaattaaccaaatcaaaccaaaccaaaccatgtttgtcatcgctaatcaatccacgtgcatcgtgttcgaccgacgtcatcttgcctctcctcctcctcgtcgccatcgtcatcgccatcgtcgcggtctatatatggaggcgaggcgaggcgaggagatcggtgtcgtttgttgctgccagaaagaaagcccaagtctgagttggaacttacttggaagggagagtagtagaggttgcgtcctactgctacttcttcctcctcgatcttcctctacttgaggagagagagagagagagagagagagagagagagagagagagagagagttagttttgggtggatttgtgatggggtcgaacgagcagatccaccgggacaagctcatcatcgacacggatcccggcatcggtgagtcccttcctcttcctcttcctcatctcattgcgctcatactagtttcttcctgatttgatttcaattcttgtgtggaaacatctcctctcccaacgacaacaatggagtcatggggatagaaacgagaggccatagatagatagatagatggataagatgaggagagcgaaaaaatttcaatctctttttggtatcttcccctcctgatcccctcctcctcacctcacctactcctccaagaaaggagaagagaggaaggacaaccaactgaaactctctctcacaccactcatgtggtgtggtggggttcctccttctcaatccgccgtttggacggatccccactatccggccttgtccatgaaaacgatggatggatcctgcatgcacaagcaccaaaaagttgcaatcctttagggaaaagttgcaatctttttttcttttcttttttttttttggcttaagcgactggtttgtggttttgtgcttagcgatgcgctagaaactggtaaattgaagagctgctgctgatagttcatgactattgtcgtaattatatcttattagcatcttcagtctaatggtaaagcacctagttagtgccaggactgtgtgctaatgcggccgacaagtgtcaacactacgccatgattcctctcaagtctcacctaggtgtcgttcgtgggggccacctcttcatactttaactacagtgaagaaccgttttgtttcctgatttttgcctagttgatggttaaaaaagagcagctttacgagtgtgtgtgtgtcacactttcaacattttagtgtaaattgagaagttacagattcccctttcacatacattcaccttttcctgatcgtgcaatagaaatgcatgacatctgatgcttgtgctagccaattccaattgaccttcttatgttcaaattctaaatgttctatttaaattggacgcaaaacaattcaaggttaaaagagagatagtttcactcctgttgcaaaactacatccacttcttgagagagagagagaccgatacggcacaaatactagacagataatttgaagaagattttgttgtgaatctattgcctcaaactatgtgctttctgatttctatgtcttcagaaaatacatctgaatttcaaccttctaggaaactacttcttgctaattcttttccttacaaactggttccagatgatagcatgacaatccttatggcgttcagagctccaactgtggagatcatagggctcacaaccatatttggcaacaccaccacaaagaatgcgactcagaatgcgctcttgctggtgagatttgagatggttgaatatcctttgttatgtttcttgctcttggcctcttgttaacagcggcatgtattgaaaatgacagtgtgagagagcaggacatcctgaggttccagtagcagagggcagcgcagagcctctcaaggtacgctggttcacgatatgcttatacagttatatgtaacaatgtaagacttagcgtgtacgacgagcaacatgaatcttgatacatgttctcccgcacaaaccgatcttcatggctgctttcaaatttgatggcttttccttcgtttatgcttgcttacattgtcaaatatcaattttaaatggctcttgagtgctgacttgattagcgtcaatcataaatgtgtagctaatgtgacatcttaaaaataagacgaaacagtcttcctagtttattggatgtacagggcacaaccttcttttttttttgcccgtgggagttaaggcttaatataatattcatttttctatttataatatagattgaacagtttacttttatttgcataagcatcaacattttatatgccaccgattcaattaagaccgcagacttccgatcatactacatttcctattcaattccagtcaacgccccatgcttatctggatgagcttgttaatgatgtgctcttgtactttagggaggagagccacgtgttgctgactttgttcatgggtctgatggcctggggaatttgtttcttcctgcacccactagtaagaaggttgatgaaaatgctgctgagttcatggttaataaggtctctcaatttcctggagaagtttctatactcgcattgggacccctgacaaacgtggcgctggtatgcttccatttacaggataaacctgtttagcatgttgctttatatgccgtgacagaggataagtctgtctgtgttctttcttaggccatcaaaagggacccttcctttgcaagtaaggtgaagaaaatagttgtactgggtggtgctttctttgcggctggaaatgtcagcccagctgctgaagcaaatgtaatgtcattattgcatattagactagtgcttgtacatggacagaaaaaatacattgacacaagtattaagttttcgctgcataactctgcagatatatggagatccagaagcagctgacatagtttttacctcaggagcagatgttgacgtggttggcattaacataacaactcaagtctgttttacaggtttgttccttgatagtgtcatttgcatggttcgagtccagctgtggggtcaattatattcatcaagtaaaatctgtttctttcagatgaggatctcctggagctaagaaactcaaaagggaagcatgcacagttcttatgtgacatgtgccagttctatagagactggcatgccgaatccgatggctttcatggtatatcgaaatcctctcgttttggtattattctgctagttaccattcaaactgaaatatactttagctgattatttctatgtgttcaggaattttcctccatgatcctgtgagcttcactgccctagttcaccctgagtacttcacgttcaagaagggtgttgtgagagtagaaacccagggcatttgcactggtcacactttaatggaccaaggattgaaaaagtatgatattgtacttatttctaagttaatcacaacatatttacctttctagcgtcatgacattttgacaagcacatctatcactgatatatggctactgtaattgttactgattgcttgttccaactatgacgcaggtggaattcagagaatccatggtctggctacaagccaatctcagttgcatggacagttgatgtgccaaatgttctcgcattcgtgaaggaactcctcatggctccatgagcgattttacgcctatttcttgtgcttttggatacacaagcaaatttgacaaatacagagttgtgattagatcctggaaaccggaagctttctattcccctatgaataagaagatatgttgttttgatttcttgagttcaagtctggtggctcaaaacaacctggttccacctaagaacagaataaggactggtttgttctgggctagtaggcatcagacctgaggaccaaaacaatctgttatcttattatatgtaataggaggattagaagtttgcttcctagctacaagcaaaatatatgtagtaaattgaaattctgcatacgaaagacagcattattacaaactgtttcagacatttgtgccacagatatacatttcaaattcggaaatcagtttgccactcgccgtgttactgtgtgctaattgtgtcacaactctctcggttgttggttgcgtttgctcagtaattgcttgaagctaaaaagtatagcagcaccacgcttgagtagagtaactttttgacttgatttcactacatggtgagagagatagcatactggtaaaaataattttcatcgtcagattgcagatgaaacccagagcacaagcaaggacaagtaaagctggtagtacatgacacaagcacaagcacacagtgtattattattgattaagatatggtgattcttctccgatacaagcattacttagtctagtagttgacatatattaaagattaattctttgagcaagcatgcatattcccatacaagctagtatcagcatacttaggtagattgctggcatttgtaacagggaggagcagagccagagtacaatacttaagtcttcttcatccagctgttatacatgatgatataatccatcatcatccatgtgtgttttacttgaggatgtacttgagcacaccgggtatatggatcctgtagaagtagtcctcccaatcgatggtctttgggtcgaagttgaacatttcatcgtcttgagggttcctgctcttccccatcctctgcctcagcctctccaagtttatgtcgtcgaagcttcatatataatccaagcatgcagtaatgattacttgttagtagtaatgtacaggtatttgtatatacgtgtataaaagtagagaaatacgtaggtagtacgtaccatcctttgaagaaggcgaaggggccgtagacgtcgacgaggtgcatgacgtagcggtactggcgggcgaggttagagtagaggcgggagaagaggccacaaaggaggaggttcaccaggtggaggatctccaatggcagcctgtacttcaccagcatgtacacctgcaaaaatcaataccaacttgtaattcttttctatcttttggatctgtttgatcgtgtgcatcgtaattatacagacattaaaatgtttatcgtaattgtatcatcttgacaacacacttcaatgaaaagcttctactccgtcagtttcatatcctttgattttttttattcaaattttttttaactttaactaaatttacagagaaacatgtagtagtattcctcacacaaaacaaatatattatgataatataatcaatgtttacatttaatcgaactaatttggtatcgtagatattgctattttccgataaacttaatcaaactaacaaaaattaactaagaaaaaggccaaagcgacttataatctatagaagagaaataccattaaaaaataaccttgtaattcttttggatcgatctgtgtgtttggtaatgtgcattttaattatatatcatcttgtcgtaatagactgaattcagtaacaaactttcattattaaaaaataaaaaaaaaagaagagtaaattaattaacctggaagctggcgatggtcttgaagaagtgcatctccttggtggggatgacctcgccgcgcttcccaaccctcggcttctccgtgaagtgccgccgcccggcctcgtacagcaccgagtacgccgccgggttccgcagcgacgagctcacgtggtacaccgccggccgctcctgcccggcctcgccggagtgcgccaccgccgccgccatcatcgcgttcaccaccatgtcccccgggatgacgtccatcaccaggtccaggtcgcccaggaagcacgacaggttctgcttcgcgtacccgatgatgagcgtgtcgatcgtccgcgtcccctgcatccaccccggcaccgggtcccgctggatgctcgtgatgatgctcggccgcaccaccaccacgccgccggcgccggtgatcgccggcgccggcgacgagctttgcagcagcatcctggacagcaccatctcgcccatggccttggtgaagacgtaggtgttggaccacccgaagtggcgcgccctggcgagccccagctccttcatcgccttcctccgcgccttgtcgtcgtcgtcttcaacctcccgacgcacgtcggccaccagccgaagctccgcgtccacgtccaggtgcatcccctctcgcagcgcccacccctcctcgaacgccctctcctggattagcccctcctgctcgccgcccgcgtaagctgcatgcaattaacttcaatttaattactaactgcatctatatatatatcgatcgagcttaattaatcagctgatcgatcagtggtgcagtgatcgagtgacttgactgaccagtggagacatggaggaagaccttgaggcccctgcatttcttggccaattggcacagatgcttcactcccagcacattcacatccagcgacacatcatacctgcatgatcatttcatcatttgcaaggcaattccattccattccatttcatcaattaatatataactgaattgaatggatttgtactatatttgaatcgatagtaccgaccgacctgccgtagaagttggtggtggcagcgccattgacgatgacgtcgaggttgtcggcgaggtgttgaagcaacgggggatcgaggcccaggtcgtcgtagatgatgtcgccggcgagggcgaccaccttctcctcgatgaatcgcgagaatcccttgccgtgcttctccttcaccacgctgaacagctccgtctccgtcacctgcacagcacgcatatgttttcctttttcacattaattaatttattaatcgcatcattttaattaatttcctagtgcgtctataagttaatctgcggcatgtagtttcgcagctactagctgtaaccagtagtacaagtgtgcagttatggtagtactaattaactattctttctaggacgtaagtatagtatcgtagagctaatacacagtgcatctgtgcatgcctcctcctgttaaacatgttgtcagtgtcaacatgcatgcaggcctcatgcctgtactcatggcaacaaacacacgatatttttcatttctttttactataatgtaccgggccttgtcagtaaatgttactggcagtagtggagtactaatttccggcgacagatatcggactcgtcttttcgcttatagttatatttattagttaaaatttaaatttttaatttttaagtttattttgtattttttattaaagtttatttttcagcctttacttttagaccaataagaacatataaaaaaaatattattcataaattattttttttataaatatgctgtttggctttttcccgaataagtaaaacgatagagccgtattttttttaagataatgagcagcttcgggcatgtgcattacaaggtgaatgcacaccgcaagtggggccttatatgtctgcatatgcagagtacagctagctctgcattgagtatttgagtaaagtgttgctgtgtaatggatggatagctggatatattggaccatacacatgaaaaatacagtatactagtaatgtgcattattatgcacggtgcaggttgcagcaggatagtacgcacatgctgcagtgaaattatttaagcaaggaatgaattcgactgcaggcaacaagcaataaccaaccatgcatggatatatatcgatcagaacagcatatgcatatgcatgtactatgtgcagctataggtagattacatatcacagtcttgggcgtggattaatttttagttcacgaaaagaaaatttttaggtgtgatattgaacgtttgactggatatcggaagaggttttctgacataaataaaaaaactaattttataactcacctggaaaccgtgagacaaatttattaaacataattaatccgtcattagtacatataggttactgcagcaattatagttaatcatagtctaattaggctcaaaagattcgtctcacgatttcatgtaaactgtgtaaataatttttttatctatatttaatactctacatatgtatgtgtccaatgatttgacgtgatgtttttgaaaaaaaaattaaggactaaacaatgtttcgatcgagaggaaaaaaaaatcgtgggatcgaagagatgaggcaacagctgcaacagcaaacctgccgcatgggccatcacctcattattactactgcataccttactgcttgacactgttaattggtgtgaattcatttttgactatcatttttttaaagaattacaatattgtctttatgaacataactagtatagttatatttagcataaaaagtaagtagtacttaaataacgaacctgtttagattgatgttattttaaactgtatcattgtttgataaaattgataaatatatggtatttagtttattacctagagaattccggcaacaccacatttagtctatcctattaaaaaggcaatatatgctgtcaacttactcaaaattttttagcatagcaaaaatttgaaaatgttcattttagcagtattctgaccatactcaataaattaattttaaaagatttttattcgtttggacgcccacgcctcatcatatgctagcttccaactaataatgcctacattctgctccatctgaaccatcgatcccttctacggatggctcagatcagacaaacttagaccaacctaagattcgtactagtcagaagttaatttttttaagacttcaccgtatgtcactgggatatgatgctctgcttggtagctctacactgatacacacgtcgaactgtttttcattgcggtaaattatcaacattcccatccttgcactctgtcacaactatacccgacactgttatttttcgaggaataaaataacaggataactataatgatttttaaaattcaattatatttatttatgttttccaagcttttaaattgtattttctaaattatatttatttcaaggaatgaaatgacttagtaaatatacgcttcccgagcttctaaatggtagtgtaaactttgttataaatgaatttaaatttgatttgcaattttataatatttaattaatttatttttaccatcgaatgatattatcacgaatcatcaacctattcagcgtaaaaggacatggctgtcacctctcacatagtcacatatcgaatcaatcagtaggcatgagaaagctacacggtttccatgcatctatatattgctaataacgagctgaatttcagctatatatgtactagtactaatacatgtttatttatgttcaaaagattagtcatatcaacacaactatagtatgaattatatataccgttgtagtaacttgtaagttcagcggactacttgatcagagcgagtgcgtgatgactttctatttttctaacattttaacagtaaaattagtagatttgcaacgcagtaggtgagcttattacctactgcttgtaagtgatagtgattggatgtgtcgaggagtacaagataagaagaccatgcagacaagttggtttcttggcagaccggcgaaaaatacagtaacaggccaaccaacacatattattttaacttacagaaactgatggagcaagaaaaaaattgacagcaccaactagccaatcaactgcagccatgtacgtattttaatactaggtgatatacgtctccttttaaattctacctccatttattttcaacagatgacacagttgaccatttttaagtttatttgactattggtccattctacaattaatatttatacaaatagatattatgtatacttaaaatacttttgatgacagatacagtggtactcttttcactttaattgactaaataaatgaatagtattgttagtcgaagtttgaggaaaaagtcagccgtatcatatattaaaaaacgaagataatacgaaattgattaagtacgtataaaaaaataggaagagatgcatggatggatgagatgaatcaacctcagattggacgcgttggtttgcagatgcttggtcgatggcgcgaacgagcaggtagatcttcttgacatcaggctgcaccctcagtatcttctccacaagaactgcactcatatgcagcagcagcagcaatgagctccatcagcaatgagcattcatatccagtccttgcaagaacaagaacaagaacaagaacaagaacaagatctagctagctagctagctactatatatatgcacacacaattaacgtactcttgccaagaaagccagttgctccagtgatgaggatgctcttgcccttgaagtactctatgatcctttctgcatccaacctatcagaagccatcattttaactaatcactgcagatagctagatcagctagcctctccttcctccactcctcctgtgtttagctagctatatggagtatatagcttaattagggatagagagatggcctgtgatatatgtgtgtgctgcttgctagctagctgctggcttatgaatgagaaggagcagcagcaaagctaagctaagctaagcaagcacctgtgactgtgagtgaggcacgcaagagggaggctcatgtgcagatatatataggcaattagataggcaaatcgatctcttgttgcttccaatataagctggaccaattcggtcaaaaaataagtaataaaaaaggagcaggattatcgatcactagtgcttgatcagacgatcacctaacatcctgctaggcgtgtcagagtattactggatcatctgtgcatgtgtgcccggaattactgaagagttaatgcagcaggagggagatagcgctgtccatatgcacagctgcagccgaagggagagttaaatggttcatcagtacacactcctgaaatacgactctctttttttcattaaaaagaaaaaagcctcaataaaatggttggtctttcacatgcggagtagcttctatggatcggtttttaacccgttctttaagacccctgccccatagaacaagaacctacccatagataagaacctacccatagatcgattcttaacatatatttttacgggagtcaacaagtaactttattttttaacttaggtctgaaatttgctcccgcgaggagtgcatcgaggatctagggatgatatttaagcattttaaccgctagattacaagtactttcgctccactgctaaattacatcacatagataactaatatcaatttttaatttgagaaaaaaaatggttacttaattacttcagtatccatcatatataccaaaattcaccggtatgagtttgataaatactaccgttgtcctaaaatgaaactttttctagttaggctgtgtttagttcacactaaaattgaaagtttggttaaaattggaataatgtgacggaaaagttggaaatctgtgtgtacgaaaattttgatgtgatggaaaagttgaaagtttgaagaattattttgaaactaatcacggcgttataaacttggataagttcctgtctatatttataaataaaaatgagtatctctagatttatagctagaaacgactttatttttggacggaggtatctttgggtgtgtttagttcacgttaaaattgaaaatttgattgaaattggaacgatgtgacggaaaagttggaagtttgtgtatgtaggaaagttttgatgtgatggtgttgacgagaaaatcgaacacaccagcctgggagatctgcttatctcctgtgcaggtccaaatcttgattagatgcgagcgtgccagtcagtttgatcctgcaactgacaagatatgcaaatagtagatcaaaacagccgatcggttgacaagccgatggagtagttctagccgatagccgataatagccgatgccgataccagccgatagcgatagggtttaagcaatcggctatatgtccaacgtagataatgatatgaaagcaatcggctgatgaggatgtaataaaataacaataatataatccgatagaaaccaatcggctagaaacaatatataataagcactgatctgaaggttaaagcatacatcggctggaggtccgatgtcattaaatccacaatattagattaaacaatgaaatctatgttgcgatcggctaaatctaacttatatgtatatgcaatccttatgagccgatgcaacgtccagataactcatcggctgaaaccccgatgaaacccttattggcagtcaaaaagcaagctagagattatggttctaagcatgacttagtagatcaaacttaactgatgcagcactaagtatgaaaagaaacacaatatctagacaatcaagccgttgactgattttcagggtggtagatgtctaggctaatctaatatagcaaggcgatttagccgataccggcagaaaccctaaaacgagagacagccgatagagctaaattgagatgctaggactagattaacatagacatatgataaatagccaggcaaatatattatccaaaccagagtaattcagaggtcgaatgtactgatgcagtcttgaacgacgccgacgtagacgatacaattgcctagaccgacggaacattggacttatcccttcgccgaagatcgaacaccgatgcagccccgcgtcaagtgccaagtcccgccggacgataaaataaagtagaaaatgtaaaaggtggcgatacgccgaattgtattgatcgtggagatagattacatagaccttgggtgtacatatttatatccatgggttgatacaagtccttgtcggacaagaaagaaactaacctaaagataaaaggaaaacataaagtccttatcggacactaaacacaccttcctaaagataaaaggaaactaacaaactattcctaattaatagataaactgccatgtcgcatcctctttaaactcggtcacttcgggataagcttcctttagtagattgatttccttaaccgaatatagcaggaatccgactattggcgacttgataactcccatcggctgattccgaaatgctgcagccgataatgattataagctgatgacgtctttgccgattaccaaatttcactgttaacagatggacaagttgaaagtttgaagaattattttggaactaaacacggcgttataaacttggataagttcctgtctatatttataaataaaaatgactatttctatatttatagctagaaacgactttatttttagacggaggtatctttgggtgtgtttagttcacgtcaaaattggaagtttgattgaaataggaacgatgtgacggaaaagttagaagtttgtgtgtgtagaaaagttttaatatgataaaaaagtttaaagtttaaagaaaaaattaggaactaaaccaggcctttgttattttttttttcgccggtcggcggcgtaggaaaaccccgaccaattatattaagaaaatgaggagatgttacataaaacaaccaacatgtttgttgtgaacacatcccaatcctagaacaaggaaaggtttttgccggcaaacgcctaactacatgtatacatggattttatatctcttcaatcgtgatgcctccaaagccagcagctcaccatgcccaccattcttcagaaatgcactaggagacctcggcgacggtctgactgactccttcaaatatcctgccatttctctccttccaaatcatccaagtaatcaagatgtttgtgtatatctttgttatctaaaatatgttgtttgtgtgtatcttctttctattggttgtgaatttctgattggtcaggaaaatcactgttttgcaataagatgaaaccatgaatgccgccagaggaccacattcacatgagcactgcagtcttgcctcctcctgctgctgctgcaatttgcaatgctgtatgtatgtagttgcaacgaaatgatcaaatcttaaccactgcagcaaacaaattaatcacaacgtcttcaatttaacaaaaggagtatgggccaactgaccagttcatacataatggtgctttccattgattctgatctctcagctgcctgccttaatctgcagttgacttcagtccaaccacactgtgttcgacttaactcgagcactttcgggaaggatcatttaatcttattgtacgtgctgcattcttccttcaaggcaatggattaattgaccactgtgttattatctgatttttgtccccactaataatcagaagaacaaaataacgacaaacaaaaggtatctgttacacctacctaatcaaacaaatgtaattctagaacttgttcatttgactagtttgaagttccgtatccgtatatccggattatccgcttcgaactgtatccgtggtttctttttctttgaagcgaacggaaactatccgctctgtttgcttctctagtttgagctatactagctaacaaaagcctggtttagttcccaactttttcttccaacttccaactttttcatcacatcagaactttcccacacacacaaactttcaacttttatgtcacatcgtttcaatttcaatcaaactttcaattttgggcccagcgaaaactttttttgtccagtgaaaactctcaattttggcgtgaactaaacacacccaaaaatggattcggaattcagtatctgcatgtagtactccctattaggacacagaacagtaagtggtaagaatgcatgtagtgatcaatgaacagcagcgtgattactccctactatgtcttgcttatatgataagcaaaattatttgacacatgctaatatgctattcaccctgctgctggttgctggcatgcatgccacagtaacaaagttgggctggattgatcggtaagcagcataaattaaaaaccaagtatatccatgggcaatgccattgggtagattggtgttgtgatatgttctacattaattatttaccatacttgggaggctcataaaattgtccagcattcagcaccctaaaggagaagtgaacactaaactgaacagggctggtactgaaaaactttacccgaccaacaaataatggcaaatcaacatatagctgttcaaccttcagtgtggaatatctatagttaattgatccatatgtaacaatcagttatgggtgtagcatatgcatttctgcacaatgagctaggtaaaccaaaatcatctttttatttggagcttcagttcagagttgggccatgcattatgaaaaacagagttcagagttgatcttaactgaacatggccaatcatgcaaaactgcatttccctcttgctatgttcctggtatttcctgtcacaaggcaggcaggaaatcaggaatgtatccctgggatcatgaaatttcagatagtataacggatcttgaggagtgcacatcgaaagctactgctagggttggtaaagtacaagaggaagaaggtgcagctctttgaatgcctcttgttgttgcccttgccattcttccactcctcatcactgaattcacaacttactattgctatgtcctttttatactactgataattgatctttacactgctttatccatcggtcctgtaataatcttgttcatcatcttaccagcacgatcaccaccgttctatctatctgttggctgcttggcataattctatttgcatttggtgagtagtagagtttaagttgtactgctactcaacaaggctgcaaaagaagaagacagagaatgtatgacaaagggtgttgttgtcaatgagtgattgcacgaaaccaagcatgtcgacacttgcgagcagcagctggattagctaacaacaagaggcagattggttacaacagcagaccctttttcttgatttcagcactggagactgatagttccatcagtaccactcaagaaactttagccaccaactgcatttcatgcatgttggatgtctgcatggatcacatcatcaaaaagattgaatgagtatgttagattgatactaccagtgcaattctgaagatactgttgtagcaagccccagtgtgtggtgccagtgaagcagcagcagcagcaagtaagacggcatgagatgcaaatgctgctagacctactcggcgtgccttgcatttattggcattattaggccggcaggggaaacagatttcctgaaaaataacaaccgcctgccaacaatgtgcatccaacttgcgctcctttagcttcaacattacagtaccatctttttttctttctcgagacatgtatatagcattgcgattcaaggggtgccattggctgtcagttttcacctctctctgcttttcttcctacctactcccctccattaaaaaaaacacttgatttcaggttcaaaatttatccaaaagacaatcgattcctatcatcttatatctatccttaatcgaagttttatcccttcaatacctcttacttaccagagagactatggtatttcccccttactagtaaattttcttaggatgactgaaaatataaatcttttcaggtcaaagggaggagaaaaataacataattccacttaccgggaccctgtttggaacacaagaattttgaaggaatcacgtgcaaattccgacggtaaatgtaaagacaaaaaaaaaatctgaggtccaagaagggaaacaatttgttgtaatcgcctccaaatttagacgtataataataataaatgaaatgatttattccatgacagtagctagcccaacgctattatacatttattctcctaagtaggaacaatgtacgagtatttaggaccacttttcctaagtctagtagtattatagtacatgtatgatgaacgagtccacctaagcttaggtatagccatcaacaagggccagttccaactgttcaagtggcacaatgcatgtgaccttgatttattgctgttctcaatgcctcagcagtgcagcaattgccttaaaataaattcagtgttgtgtgcagctaaacctgaatctgttgtacattgcagggagtaacatgttgatgttggccagctaatgcagaaatgctaccaaacctacaggttccgttcatttgggttcataacaacggacacaactcacccatttttcacctaaactccccagaaccagttgcaaatttgcatgcagtgtttcaggataaatttctggagtagcttgcatcaaccacaagagatataggatatggaaaatcataccagatgatggaaaggctggattgtagatgtgttcttgactgttctggtgcatgtcaatccaaaaataattcaacttgacctgagcaagatgataaacaaggcacggttcacattcatcccacaacacatggtttcaaacagcaattatatcgatattaagtatcgctttgttctcaacaacataccacaagccgccctaatcaaccagcaaaatgcaattttcgcgaaattgcacagctgttgcatttctaaacgaccgaaaaaaactatagctgagacaccagataacaacagatactacaaattgctggaaacggttgtccccatcacagaaactgagagcgactactcagtaatgaaggtgccaaagctagatcagcttgttgctaaacagctacagacatcccagaaacaaatgactccaagataaaagctaaacgagcatgttctacaactccaaaggcacagtagttgtgtaaacatgcagctccactgtcgcgccagtttaatgtttagggtaacaagcttggatttgctgctccagctgcattggaaagcaaaataacagatcagttctataaatggttaaggtaaatttgcatcgtcaggtcataagactagtaagatttgacagcccaagaaatcgaaaaatgcaagccagaattaaatgaccattttccattcagaaatgagaaagggccaaactggggaggtaaaagatcaggtctacccatattatgagaagaaaaatacaagttggggaccaaacaactctaggcctcttggaattatcccatagatatatccacacgcaaggatgggataaaataaaatagttataagacaaacaaggtttttgagtgcgatatctgtaagtcataattattaccacaccaagtggtaccacgtaaaggcttaagtacaaatgtagcactggaaatgacaaagaaaaaaaaccaactttgtaaagaaataaatataccatgttcatcttctgccaactgccattatctcgcatgctatttaatgcttcacagcaactataccactgtactacctcatatatgtgtcatgaaaagactaatgctattcattcagcaaacagactaatcattgttgattgtttttgtgtgttgcacggaaagtaacagtattaattccatcatatccaaccatctctacaatttaatgttccaatcataaagcaaaccttacaaatcacttccaaaccttacacaaaatcacttacttttaagatgtccactccaactcagtgcaacacaacagggagtataggatgtaatttgggaacgcaaggtaatacctgaagcatagcctgaaacttgttacgaagatcatagaattcagtcctcaccaaatccaaagtcttgaggcacctgataatggaaaaggcccaacacaaagaaggggacaattgtcacaaaaataacatattttattttaggctattacataaatgaagatataaagatcaatataatgtagatttagggccgttttggtttgaggccaattcctgccctaccaagtatttggtagccttgaatagtagtacttggtagccatttggattggaaccaacttttgctaaatctatggagttgagataaatctaccctaccaaaaaaattgtagtgccaaaacttgcccaagaattggcactacaaatattttggtaggatttcaaaccaaaatgaccctactttactgaatagctgcacaacatacagagaggatggaacaacttggttccactacaaatatgcatgctaaaatatttgggggcatattggacaacctgcaaaacgcaagagttatccgtcatgttgcaaccaccccaatgaccctactagcaaaaatcaaagaagaagcctcagcctgggtaaaggcaggtgcggtcaagcttaaggagataaaaccctgggaataatcgactagcagagtgtagtgttttttgggctggtgcgcgagcatcacatcccctgtttttccctttcccttttgtaaatgttttttgtcatggcccttctgctttattaatacataagtggcaaagcttttgccctttcttcaaaaaagaaaaaaatactgaaaaatctaccagttctgtataagaatcaaactatttcatttcaaatcaaggcatgcctgccatagagtttacattagtcacaccttttaaagtgattctattatcttggaaattggagtggagcaattacaatcctaagtcaacaggcagagtagaatcagccagttgttgctttccatgaagatatgttacaatagaaaaaataatgcaagaaattacgtcaacattataccacagaaaacactaacaataggaaaatgtaagaaaagagtgcactagatcatcgttaagatatgcatataacgatatgtgcaataatatgataaaaaaatgggaatactgtattaataggtactaacccatctctgctcctctgttggcaaaactcacggaactgaatgcaagtgttcttcactttctgagcaccaacactgcaaacatgcaaggatatacagtcaggaaggctcctcaaatgctttaatggaaagacgagcaacaaatttgattatatcttcaacaatgcaatattatcattgacctactagaaattctgggacgatgatattactatcagatttgcatgtttttattgatcatttccgtctggcttgtgagttgcctactatcaacaagatttaatatttgtagtgatgtgtatgaatgccaattggtagttccagttctaaatatataaggagatctaacatgaagaaccatggtgagttattttcatacataatttgattctgtagaataacactccagtacataaatatacctgaacccaaattgaataggcgaaaggatttgtttgtcaatttcttatttaaatttctgtttcaagaaaaaaaatctaatctggataaactccagacaacctgtttgaataggttcagtgtacccttacaaaatgtaccttaaaacatcattctgaggatatactgataaagagcaggattaaattctaggtactattaagatctggagcaagaagaaaatttgatagcacctgcagatatgaccaagtaaggagatctccaaaattcagtaaacaaatctcaaatggaaacatttttcttttgtagccatcaggaagatatcttcgggtatagggaaattagggatctcgaggaaggaaggtgtaaaggtacaaaaccatgactacaccaaaaggaaaaaaaaaaaaggcatttaaacaggaattttacatgctgtgtcatcctactactgtttgtgcatatggtgcatagaagctctgaaggaccatccatggtgaagtagtttatggtctatacacttaggaataccattagacccttctctcactaatctatgatatattctctagcagtctaccttttaatgaccaactaatctaaaatgtgataacactccgggtttgaaaaataacaaaaaatagaattctaagtaaaattagatacaatattcgtaaatatgaagcatttcaaactataggactctcacgtgtaaaccaagtcattttggaatggaggaaagttcttcgaaccattcaataagtgtgatggaacagaagcatgttttcagatctatgtcaaggaatgctggaacaatgaagcatatgacaatcctccttgaatagatctggagcaccacaaggaacaggagaatatgaatgctactatttgaaccgtctgatcaacatgggagcgggactgaatttgtcatatctacatgatagaatgatacagctatcaaacggacgacaacccatcccaaattgctcagaagggcaattcatatgatagaacaatgtgaaccgctgctcttcgaactgtccaatcactttgggtggaatggaccatttttgtcagattctacgccataaaagatgcaataatcaaacatatgacaatcctcccaaagttgactacatgcttcgcacaacgctttaaattctcccattcgaaagggatctcatacccaatttcgtgcgccaagtgacaataacagcaataattatccataacaacataaatttccatatccagaaaaggacaggggaaaagctcaccttgcgctgctccccttgagctgatgcacatacgagtccaccctgtcaaaatccacatttggcttctccctgcacacacacacacacacacacacacacacacacacacacacacacacacacacacacacacacgcagcaatcaaatctcccaaaccaaaatcaagccaatccccaacacgaacacgaacgatccgatcaaaagcaagcgaaacagttacacgcacagctgcctggagagctcgcagatgatccgctcgccgtcgtcgcagaagagcgtgacgacctcggagacgaagtccggcgcggtggagtcctgcagcatctgcagctgctggaactggtcgtccagcaaaccctaactccccaatacacacaatccaacaataacatcacacatggaaccccaaaaaaatctcgtcatccacacccggaattccgccaaaaatggcgcaaaaaattcgtaaaaagagcgtgtgaagcgcctcactcaccatggcgaacatgttgttgacgagggcgttgagctggctggtcagcgcggcggccgccatggcaagcagcagcggcgagctcctcactccgatcgggaatcggcggggcgagcaagcgagagagcgagagagatggatggaatggaagcgtggggattgggaatcggagcgatgcgacgggtgtgatttatatggggaggagtgggcattggattcccaaaggcaagttttaattttcttttgtgctgttgtgagctgctcttggaatttaattttaatttctacttaatttgaattgatgagcatgagctggagttggaacaataatcgcataaatttggttagattttatttccccagccctttcctataaaggaatgagcccttggtataggaatgattaaatgtgtatatttatttcatgtttaatgccggtataattcgtgtatatctgttcattactgcgatcacacagctatgtgtatgaagtaaattaaggtgatattaaaaaactactacaagtaacaagacacccaaagctgcctttttagttgactttagttcatctcaagcaacagcttggaggttttattgcataattaaaaagtaacaagtggcattttcacttgaaaaaatgtgccaaatctttacaattcgtataatttatgtaattacaaataacaagaaaaatagtagactttacaaattgcaagaaaaatagtagactactctgtcagtctcaaaaacataaatacttgagatttttacggatattaaagagatagtaaaattaaataagggattgttgtcactggttgagataagtaaaataggtgaaaaaaagtgatagatgattgtgtctggttgaggtgaaaaaaagttgctatgccttagcacaaattttaaattgtagaagttttaggaggggtgccaattaaggaactgtataacatcatgtgcactgcagtttagtgaatcgaagagcaaacatgagtgatgttgaagcagcaatctagttggtggatactataccaattagttaaggaactataacatcatgtgagtaccaattattttaccagaatctaacaatatcctatgattgcaaatgcaatgtccacgggtcgtacaatcctagatattcttatgcgtgctaccctgaattgtaaattctagcaataacgtaactataaatattcaaacttactagtaataatccataactccatatatgttttgcggtttagtgcattattgcaaatcaataacaaaagagaagaagcgagtactgataattagcaagctcgtaggtttaactatctgttgctgttagtaaaatccaataatatcccaacaacgtaaatgttatgccaaaggggctgtacaatcccatatattaatattttgtctatgacaattataagttcctacaaaaattataaatcccgatagcaacacaccgcgatagatatgtagaattttagagtgttcaagttaaaatgaattcgtttcgtactaactcaaactcaccaaattaaggcccagtgtaaaataggttattaaccaaaattattgtagtggattatctatacaaattatgaatcaaatatttttgaagtatggagcaaataatccataataagggtttattgatagagctttagctctcacactattctgaagcagaagcccgaccaaacagtttcagcttcaccaaaaatgagaatggagctggatgaactagggaggtggagctagatttagactgctccacaactccactccaaacacggctcttgaagttaaatttaagagttagagtccctaccaaacatgctctaattgagtagctaaaaagaagatggcctaaaactgttctgatttcatttgtcaaatcttcttaagtaactagcaaagaacagcctaatccgtgataaaaaaaaaagaaacacagacgatacacaggtttttttaaaaagaaaacaaccaatcacagaagctacagagtacagacattattgggacctcgccacagtgactacatcacaaattcacaatgagaacaaaacaaatcctccatatataggatcggagctaacaaaatcactacgaagctcagaatcgaaaagatggcagcatcacagcgtccacaaaatgaaatgcgtgtgcatagagaggttcagactttggcagcgaagtcgagtccttccttcttgagagcctcgacgtcggccaccggcggctgagctctggcgaccttggcaatgacctgattctcctccgccgagccgccctcgaggaagacgccgacgaccttgccgtccttgatccagtacgagccgaacttgggcttggccgccgtggggtcgttgtcgccgaacagcacatcctcgccgacgttgtcgccgtagaactgccacgagaggtcgaacgaccgggagtagaagtagggcaggtagtcgtactccggcaccgactcgccggcctccttcgccttgatcgcctgcaagttcattgaagccagtgaatttggttatcacaaagaacttctgaatcctgatcaatggcggcaacgaggatgaagaatcaagaacgaacggatggctcaccttcacggcctgctcggctgatttgcgagcatggtcaacatgctctactctcctaatctcattgtatagcttcatcgggaaggcggccacgtcggcaatggcgtatacaccaggaacgctcgtttcgaagaatgcatcagtctggaagacacatgcagatttgaaatgttcagctaattcgaaggtataagcaagaacaagctcgaaagaaggttcagttgctaattagggtgactcaaatggacaatagcctgaaatacaatcatcacgcaacaaatgtagcagatagagcagaatctgaaagatgaacagaaaccggacaaaccttgattccacccttctcctctgcaacttgacccttgaagagatgagtcagtggcctgccaccgacaccgacaataacaatgtcagcttccagcacgtttccattctttagcttcaccgcagtaacctgccaacagaaaaaaaaaattaacaaggtgaacatttgccttcacagcaagatgatactggactaagtggtaactacagagtgctcacatctccattggcatcagcatcaaaaccaacagccacggttccctttatgatatggattcctttgttagcgtagtatccctcgtagaaagcagcaaggccagaagtgaagagacggggcactacaacagatggcatctccaatatgagatttcattggccaaatacgttacaactataaagatgagaggtatttgtttccttgctgttgagtattcagaaaacacaatttatagtagtaaatctttctggatgcaaagaataaggagacttactgcaccaaggttcagggtacaccatagtgacatcaaaattgttggtcttcaaggctgcgctaagctcaagtcctatgtagccacctccgacaatcacagcctttccatccttcttggcttgcatagccgcgaccaacttgtcagcgtcctcaatatccctcaggtacaatatgtcgttggcctctgctccttgaacaccaaagtcagtgagctttatgacctgatcaagcagacagatgttcatgacatgagcaacatcttaatacaaaaatgcgcgtctcgcgtattcccaaaaaaatgacatgagcaacatagctctggaaaaaccgatatgaataaacaaacattacaagttcacaaccaaaatttactaaaaagaacaccattcctcttttctttgtgggttaaagcttaaaggtacagttgagaactcaccgaggagccagtggcaatgagcaaagtgtcataggtaaaggttgcatcagctgaactggtcaatgtcttggaggcaagatcagccttgacaatttcggtgctcaggatcagctcgatacctgcaacattacaaatggaaacaccgtatactctctcattcagtttgccatcaatctgtcagaaagactgcggtattcagaaaatggtgacttttagcaattttatttatagaggaatatttttggccatttaaattagctggcattcctttgtttactcgaaaaggatcagagatcagaggatagaattaatgaaacgacacttgagttataaaatactactactggtacttttcaagttttttgaaggtttggttagcttccaagttagtactactggcagtctggcactgaaagcctgtgaattaatgtacggcaacgggtttgtgaagtgaccagaagaactcatggataaccatttcaatttgcaatcaacaaagtactctggcatgaagatcgaacagcaactgcagattgcaaattatatggaaaagaaaagagaaaaaaaagcagtaattgtacctttctcggaataccattcaggcaagagcctctctccgccgctcccgacgcaggtgtggaatcccggaagtctggctgcatctgtagagagaaagatggatcggaatgaatcagcagcaagaaatggaagagagtaattagtagtatgttgagaaaataaaataaatatgcagggcaggggaggggaggggagggcgtgacgtactctgaggaaagaggtatcccttgctgagagcaggacgctcgtagggagccacctgcagcagaaacacgaagaggaaaaaaaataattaggaattactagtccagtattcattcaggaaggaatcgatggatggatggatggatggatggtttaccgattccttggagatgatggcgagttccccgggcttgacgccctgcttggcgaactcccgcgcagcgtatccctgcacaaatcaaaatgaaaatgagttcatcgatcgtgtgagtgagatgatgtgatggccatgagaaggcaagcgcgtattgaagagagtagaggaggagggtggcgatgttaccgcggcgacgcctccgccgaggatgacgtaggtgaagtgcttcgcggccgccatgtcggagtcggagtgggacaagaggagggagacgacgatggaggggaaggaggacaggtgtggtggtgggagcaagggaggaaagcgcgcggcggaggcccggctctctcgctcgcttgctttttatacgaccgaaccgacgatggagtgacgaggcattagctcgatcgatcggaggaaggaaaggtttgctgcttccgtctcgtttcctctctctccgttcgtttcccccaccaaaccaactaattttggcgcccacgcggcgcgctcttgttcgtcaaacagcgagaggggcgagggcggctagtctcgccggcctagtcgcatagtacataccggatctacgacccagttgaccgttctcacccccacccgggaaaaaagggcaacaacgaatgcgcacacgccattgctgacgcccgttaattagagcacgattgatcaattattaatactccttcattgcaaaatactatagtaagataaaacacaatctgaaactatgaatgtgaacataagtacattcagattcgtgatcttaagtagtggtgtatttagtcttaggttgtttcattttagaacggaaggagtaaatattacaaactatcccaaaagttatcaaaggttaacatttatgcttgctaattactagtcctcctttcgctttcaacaccacggggacaaccaacgctactctactcctttcattttctaacgcaacgtcacagccaacactaacctccttgtgcaacactattacaataattgtagtacgatcttaacctcagtggacagacagcgtcagatgggaacacctagtagatgctcaggatgcctaacctcctctccgtgtccaggttcacgatgcacatgccccaccactgcagcaacaattctttaacccaattccagcacgcaccggccggccaaacaaacacgggattgggattcccccttccttgtctgtttacacgggcatcatcaccatgtcaacatcacaacgtcgaccgactcatcggttaatcaagactaccgaaaaaaagttagccggcgccaaaacatgacgcccgcgaaaagccatcgttctacacggcagctaaatgacggttactcagctcagtctaattggtatcagcattcagtggctagtcaaaataaaacttacgcccttacacccatgcatggaaaaatcgtccatgtatcctcatctaactggctcgttacattttttccattgttaaattgcaataccaatcccgtgtacagcaaaaatgttacagtcccattgcccttgggttatggatgggaaagctagttaaaactcggaacacatacctcatcaaaggcagtgctttctaataatatggtgctgcctctgggttgaggtttgaaggaccaactcgatgcaccacagcagcacataaagttcagaacatttgtctttcacaggcttgcaaagggtggaagaacctcatgcgtacaatgtcaaacctgcagaaggcacacgaaatgaccacatgagagcactggtgatacaagaaatggaaccgttctccatacagtcaacatgaaactggtgataaagaaatggaaccgttcttcatacagtccacatgaaaaagagagagagagagagagagagagagagagagagagagaacaatcccatggcaaacaggggataacacaaggtaataataaagagcaccactggtcactggatgcttggttttcctacaggttgtctagcaaagatgacctcctaaagtaaatttagaagtatttaggtctaacccaacaaaccattatgaaattagctttgataaccacataagtaaagcaggctatattcttaatgttgttgcaactggcagtattatcttaatgtatgtactatattctttccatccacaaatataatcacttctaggattttaacagaaaataaggtttaggtgaaattaatttgatgcccctgggactctacttgatagggaaaataccatgcctagaaatacaactaagtgagcaataaatgcagcggtggttggattgggaaagtagtactccagaaatgtacaaatttcaaatgctagaaatgcttatatttgtggatggaggtagtaggtaactttagaaaagggaacaatttaaaaaaattaatgttcacaagacatctgtgccagttaaggattagtttgcattgtatgtattttgtaggaaaacaccaagcaaagtcacttgttcaagacaatccccaaaacaaaatgaattatgaggttagattatggtatcaagagcagaaaaactgaccaattgtttgagcttatgtctttggaactgtaacgttcaagatcttcacatcctgatatggtttgtcattcttgtcggtcttgaccttctcgatttgcttttaagtttaaaacaaaacatattaggaagcacaataaaggatatgaaaattcacacacagtcactaagttggtcaaaaaggctggtacctgaacaacatccatccctttcacaactctaccaaacactgtgtgtttgttgtctagccatggagttgccacagttgtgataaagaattgggacccattggtatttggtccagcattggccattgaaagagtaaaaggcctatcatgtctcaagctgcaagatagccgccatagctgtcagttgtcactataagcatattcaaataggattattcatatggattgtgttctcttcaacaacaataagcacagtgcatgcaaaatttacatgactatacagatatctttcctggaccttgcatagacatctgtcatctaaacggtacataagatgaaaaactgcattgttttctgcaaatgagaaaagaaaaacaggaaaaggcatacaacttatataccttttgtgaaattcatcttcgaactcccttccccagattgattgcccaccagtgccatcccccaaagggtctccagtctgaatcataaagcctttaatcacacgatgaaatatgagattatcataataaccattccggcaatgggtagtgaaattctccacagtttttggacactcttctggatataatctcaagtgaatatcacccatagaagtatgcatcacctgaaataggaaatactcatgtaaataaatgcgacctaaaaaggaaaaatgttcaaagactatcccaccaagatatcaaatttccataaaatcaatagtagcaaattaccatttttagaaatgattgagaaaacataccaaattatcagggagtgatgttgtagcagtcttccctaaatctgatacagccaaaagctcttccggtgggggtttttcattgaaaacatccctacccttggttgcgtcttcaggctcctcaggttctctacgactgtataatgaaaaaagaggattgagaagcgggatattaaaatttaagaaaaaccatctggagagaaaggagtctacagaagcagcatgcggaatcagccaatacgacctatccaaagatcattgaattgatgtacctaaagagatatattcgatgcttcttgaaggcacagcatagcagcgttgggtcagataaaggctccttgctgtcattgacattggcagctactgaaggaatttttctaaccttcttattccctttatcaccttggtatagagcaatcctcagaaaacgttcattgttttctaccttccccaggattcttgaaaccttatttgtgtgcaaatttataatctgcatatttatgggaaatcagaattaatcatacagaaatatgttcaacaatagcaacatgccagatatttacatgaactcaacagctagataggagcataatgaatacaaaacaagctgctagaaagctaatacaaaacatgctgtttaactagcagctgatccataagatggaattccacaaggacaaatattttcttgagcaacatttatcattccgaacataaaaaataattatataaataactgaagtacatataatgatatcaaacacatactacataaaagaaaagatgtgcagtaaaaaaatagcatacctttatgcccaaaagggtagcataaataagaaaattgctgctctcatcaaatacagcattaggctgtggaacattttcggtcttttctatttccttctcaacagccattcttcgcccaaaatcaatagcatcaagacgatacatcgggatatcacttttctgcagatcttgtgccacctataattgacagcattcagttggggattataacagaacatatttatctgtaccatgcattgtacagatggaatttcttacctcaagggactcatcatatacacgtcttagtttcccagttttgaaccaaaatacccgtatcctacgatcaggggatgtaacaacaaattgagtgccgtcattgctcatctggacaacacaagctcgtttatcagagtaatcctgtagctctatcaataatgaagcaacaaatgcaaataacttgagaatcaaatagaagaagtacctcaatagcagacacgctagtcttgcattttgcgatttcaaatagatttgtgtctgtttttaaacgaaagttcaccctgcacaaaaaacaaaagcaatatgcattgataagatgatggattgatgcattcaccaagagggacagaacagctgttagcacatataaatatagccattacaaaaggaaccaacccagagcttatacactgccagagtgacaggtgaaatgaaaaaacaatccataaatactaaagtaggataatatgttattataagaaacaaaagtgaatcagaaaagattttaagttaagtgcatcttcaccaaacataatagtacctaactttttttaaaaaaagctggttcgttgattaattagcacctaggattgttccagctgcagacttaacagaaaaggaaatggtaggtgtaatcatggctcaagtacttggtggttcagtgcaatgttttgggaagacaaaaccacaagctacacaaacgttgaaaataactccaagagagaaacaacatacgcgtcttctggaaatttgagggtagacggagaccagtattccaagagtcctttggcatcagcagatatcacaacatcgtgaacatggttatatttcataacctttactgggccagcatgaatctgcataaagaggcagctcatgcagtaagaatcatttagttactttaattcacaagaaatacacatcgacacacagaaagcaacaacagattacctctttggagatgatgggatcgtttgaaccagaatgagtatcatatatgtgaacaaaaggtgtattacgatcactaacagcgagttttggtttaacatctccttgtcgataaacccactcaattgcacccggaacgaatgggagacgcatcatgaacatcatgtcataattcacaacgtcatatatcttgacagaccaatcgctggagatcgtgcagcaaagtaggccatcaacactcacctgcattactgaatcacgctataatttgaggttgttcatagttccataggcaggagctgtgactaagagtagcaactagcaagataaatagactaatatatattgcgaatgcaaatgttttccctggattagggaagtcaatataagaatctgaacactcacagctaggccttcaatgggactgagatgagatcgaaaatgtttagcaaattcgatcccagctggtttcttcttccaaaatttcaaatgtcctgggtagagaggagaaaaggatggtaattaagctcccattacatgaaaatgaatcagcttattattgaatcataccacaggatttgatcaatccatagatctaaaagtttttcaaccaatactattacgcaagtctatcaagcccgtgattatggttcagtgaaggactatcccttatgtagaagggcttgacatttccacaagataccatccgaaatctaacacatgctgccacaagctaacaaactaccacaaaggcacaaaccactagtatcgcacactgaatacggtacgatgcagagacgtgagcgcgagagattaccatctgcgctcccggtgatgaagtagtcagcaggagagacggcgacgtgggtgacgacatcccgatgcatatagctcttctcgtacctgcaaaaccaagccacggccgtcagcctcccagccgacgcaccccctaccaaatccgaacctgaaacggcgaggagaacactcacatggccgcggagggcagggcgtcgaggaaggcctgctcgaactggagcgggcgcttcttcctcggccgcggcggcacgggagccgggccgatcatctcctcctcctcagccgccgcctccttccccacggcggcgggtgcggctgacacggcgccattgccgttgccctggtcgcgctccacctcggcgtcgtccgtggcggtcgttatcgtggagctcgccggcgcatcgctcgccgtcgccatctcgaggtggagctccgctagggttctggggatttgggggagagaagtctcgactcctcgagaccttctgctccggcgacgaggagcaattatttgtgttacgaaactaataatagggggtttccagaaaaacaagtccctactctccgcctcgattctagccgccaatggccgatctgacggacacagtgacacgggggattcaaatgaaaagtaaattcttctcttggggttttttacgcaaatgtttacaacagccagcccacaggccgtaacccacggcccatattaaaacggtccagtaggcccaacccagttagacgaattcctcaaccttatcgatatttttctctcctttttttttccgaggattattagggagttttcggattcaaaagctccagtacaccgaaccatctccgcttccgcggcgcgagccactcgtcgctcgaattgcccccatccacacagcttcccccgcgcacgcgagagggaggagctcgtggcgccggcggccatggccggagcagccgcggcgagctccgccgcctgctcatctccggctccgaacccgacaacgcgatacccggttaggaggcgcgtgccgcggcctccacttgtggcagccagtcgtcactgcaccgcttcaccttttcccactacaatctccatctccagctcgggtctcggccaggctcgtcctcgcgatccgtttctaaaccctcgccttcgatttgcggctgcggcggcggcggcggagggggagatggctgcggaggcgagcgccgcggcggcagagggggcgcaggcgaagcccttctccgtcctcttcgtctgtctcggtaaatcacaccaaccctagcttcttatcgtctcagcgatgggccatgaactgattggggaaccgcttgatagcgccactcgatttgataattgtccatgtggattgaagttgcctgtgattgcttcgtcccgctgattttgggtgcttctgcgactatcagccctagtgtgtccgcaccgtgcgtgcactaattcggggacggcattttatctctccaatttccccatcgcgtttgcctgatttctccattggagtttgtccgtgatagtattatgcacattgggaagtgtgggagtttttctggctgtacgtgatatggttatcaagttttacggatatgctcgcatgtgctagtattagtaagcaccaggatgggttctcacagtttttgttcagctcaattcggagattttggtcagttggaataccaaaatgcattctctcaagggttatgtgtgcactgtataagttgcaatttggtttagggactatctgctttcagttgttgcattattctgatcatttgattacgacaatctgttccgtgtagtgatatatagctcagacttcacagcttcaaatttctagttgcttggtttatcaggacgagctgtataattttgtgtcaggtgcttagtacatgtgaatttcgacatctttccatgtacaagcaatgtagtgtttgctttatcagcgtataagattgtgcgctaccttctttgacatgtttatttgtctgtgtacgtttgcatgttttcacgtgcattggtgcgtctccccctgtttttcagaaaaaggataaattcaccccactgccttatcttacctatgtgtattacagcctgaaacgtgtggtgtttgttgcctgtgttgatgtaaattgtgtatacaggcaacatctgtcggagccctgcagctgaggctgtgttccggaacctcgtgagcaagcgtgggcttgagtccaagtttctcatagactctgctggtacaattggttaccatgaggttgtattctgtaataccatgcttgtttgtacattgctctgttcagcgatgacatcatcattgatgaggtgttgcttggattcagggtaacaaggcagactcaaggatgagatcagcttcaaagaagaggggaattgaggtgacctccatatccaggcctgtcaaaccctccgacttccgagattttgatcttatccttgcaatggataggcagaattatggtactctctcaactcctctcatctgtgtttcggtacctcttttttttattatgttcagctgccttatgtgcttttatttggagcaatgtgcagaagacctactcagttcatttgagagatggagacacagggaacccctcccagacagtggacccaagaaggttagaatgttaatatgttataagagttcttgactcatttataacatgagattatttccccaagttctgtgtgaatttgctgagtccaattaattttccacaaaattcctgtattgcaaacattccattaatgttcatcctgcatatacttgtttgatcatttctatttttaattttgttgtcttaaccccagaacctgaggtcttacagagtttaggcatctatgggaacccaaacagcatgttatatgccgttatatgcacaatctgaagtatccacatttgctttctcctaatacatgttttcccctaaaataatcggtgatatgaccaattgaccatgccctttgtctttcaatatgacatggaaggtgaagaattaatatactgcaattattatttattcccctacttgattttctccaacattccttagcatgtttcacttacagtgaagtgcactttctaagtttgtttcgggcaaatgctgaatcatcaatttctacaaagtagtctcttgcattgctcttgctccagctgatgatggctactttgttctagcaacttgactgattcaccatatctacgagttagatttcttttaccagataggcagatactctcttatttctggtagaggggtgaccacatagctgcttgataatggatagtgtctggcctagcgtttattctctttctgacacccttatacaactttacagtagttagttatctcatactgcaatctggaagtccagttaagcccaaactcaaccaaaccaaaaaaaaaaaatggcaatccaaaaattagtcacccatttggtttgtggccaataaatgggcattgccaaaatatctggcttggttgaattgagtacattgccaaaatgcaacatgggtaggcaagcgaaacaaaagcccaatttttccaaaattttgacaatacctattcctgacattgccaaaaatttggcaaggctaagaatggataagaaccaacatgccatatggttaagcagttaagctgatgttggtattcatgcttgaaaactaacacatgaaatgttctttttacctttactaggttaagttgatgtgttcctattgcaagcgtcatactgagtcagaagtcccagatccgtattatggaggccctcaaggatttgaaaaggtgagatgatgaagtgcacgattgttttgaagtctgcaaattacatgttagatatgttccatttttctgactgaagttagatatgtttcattgtttgacccagtggggatgaacatgagcatccatgtgtgcatgacagcatgaaacaataaaataatgttttctgttcaagcatagtattttatgcatgaaagtgtacctccagtactgacctatgatcttcattagctctgcccaaagtctttgggcctgtttggttggtgccctcactagcatgcttgagaagcatagaagaagttgatgaaaattcttcagcaaggcttctaaaacatagtgtcaaatcgtagacaactttgagccttacttagtcctttgcacaataattaattgctctaaaattttcacctttgactatcaagatcataaacagaataacatagagtgtgatccgtgaagaaattttgaagtgatccttttttagatatatagatgaactcctgggtttaaggcattgttcaaagtaatcccaatggggtagtattagtagctaagtaatattatcagcaaaaatgaaagtcggatttatttaagtttttgccaatgttccttcatttccttcaaataagactgttgctgaatgcctgattaatattctttcatgcatttgacttaatatggttcttcctcaaaaccattaagtgtactcatagttccttacgtgcaagcaacgatgatgttgtctgttgtgccgattatacgaggacaagattttacatgagaaagatatgcgtgatgtacattctccagtagtaacctatctttgcacaatgtttttcaggtgctggatctgctggaagacgcatgcgagtcattacttgacagcatcgtggcagagaatgcaagcgtttctgcttgatctcaatgaagctatctggaggcaatgtaagcatcattttttctatgtaaccatgatcagaatctatctatgccatttgattgcgattcagataaccagaaacactcacatcagcatgcatgtacccatgttcatacaatgtcaggctggagacatatacttatatctttcatgtacaccatgatttacactgtaataaaatcaccaactcgaattagagaagctgattggcacggactagttttgttagtaacacattgcacatacatactgtccagtgacgtcacgtcaccggcggtagcattgcacgtgcaggaagaagccacccctcgccggcggctggtcggccatccacagcctcccctccttctccgccctcgccctcaccatgaactgcgcgccagctccagctccgccgccgccgccgccacggccgaaccaccagtcgtgcacgtcccacatcacgtccaccacctcgccgtcggcgagcacggcggcgcggttgccgcggaacccccaccccaccctcctcacctcagccaccctcttcccgtcgatgctgacccgcacctccccctcaccgccgccgccgccgccgcgggtcgcgtgcaccgccacctcgtgctccgccccgccctcccggaacctgcaccgcgtggtgtgcgccgtcgccgcgccgcgcagctgctctcgccggctgaggacgacggcgccaccgccgtcgtcgccgaaccggcgggagaggtcccgcgccgcgccgccctcgccgaggagcagcgcgagctcggcgtcggcgacgacggcgaggtagtagtcgccggtgggctcgggggacgaacccgacgcgtacgtggcctcggcggtgtcccagtggacgcccacggccgtgccggcggcggtggcgagggaccggctcccgcgcttcttgtgcagcacgtggtgggcgcacctcgacgacggcgagagcgcgtcgtcgaaggcgacggcgaggccggtggctccggcggcgctccgcgtccacgtgacccggatgaggagctccttcccggagtgcagcgacgcaccgtacaccgtcgtggtcgccgcctccagcgagcgatccagcgcgccgccgccgccgccgccggagtcaccggccgcggcggcggcgatgccgaccgagctgtcgccgaagcacgacagctccctcatcgcctccggctttggtttttcttccggcgagattagctgctgctgctgcaataaaatggaatgcactatgtattgcgcacgtatgcgaggggaagaagaagaagaagaagaagagaccaaaaaagaagatggatttgattcgagacgcgttgcgttttgatctgctactctacttgtgatgccaaagtcgatgaatataaatttgttgcgaatttcttccttcttgtttatattggcatggtcgtgtggtgagcttgcagagagaggtggcatccgaggaattgattagtcgattaaagtatgcacgtcaatggccagcggcaaccaatatctgcaggtctggtcgatttaaggatggatctcatcatctcctatagatgtatggttggttggtgatttggacaaactgtacacacccaatgctagctgctttggccatctgattgataatcctcatgccattggtggcactgctacttccagtttttctcttgtatcttaccacacgagatcacatgagatagtgaggtgttaaccttgacatgctgatgcttacatcagttgggaggacatgctttcacggaaatttttaatcaacacgcaatcgctagctgtatatcaaggtccagttcgattatgggcaagtgacaggacgatcgtatcatatattctgagaccgacctgatgctcttgacaccctaacccctaaccatgcaatttaattagtatattccattgagatatattgcactgtttgaagattgctacagcgggatcaccatttagatccctcctaatcaagtggtgatggacagagtaagcatgcatgatgatttcttgcaataatccctgtaacccaactatgctgacagcgtgttcctgcctaccatcgcttcggcacatcatgattctgcatccgtgcaataatctttcctagtcttgttctaacacttttttatgctgatgaagacccccaggaagttggttatgtttggttcttcacaaaatccggtttaatgaaattttgctgtttttctttttaaataagggttatggcatcaatgatgaaaaagaatattaataaccctcgcacgataaaaacgaaagaaaaaataagtcaattttgcctcccttgctattggttgaatctgatttgtatctctcaagtctgaaccgtcgtaaaactaggtatatcaccgtctcctctgatactaaaatcagtttagaatgactcactcggctattttgagattggttttggttgatgtgatgcccaatcaaaaaaaataaaaagtactacctccgttctagaatataacaactattggctatgaatctggacacatagttgtctagattcataggtaaaaatacttatattttaggacggagggagtagacgtgagccctcctcgtgtaagtgactattctatccgtcccaaaaaaagacaaaccctggtttccgtgcctaacatttgaccgtccgtcttatttaaaaaaattatgaaaaaaattaaaaaaacaagtcacgcataaaatattaatcatgttttattatctaacaacaatgaaaatacgaattataaaaaaatttcatataagacggacagtcaaagttgaacacggaaacccagagtttatcttttttttgggacggagggagtacttcccatcttcatagggccacatgtatacatcctctccctctcccctctcttcactacatgactccatctctctctggcagctctcccggagaggactcaaaacagacttttcccaaaataaaactaacaaatatgtggaccgtattatgatgggccgacgctgtgaaaatggaaataggaatgtaggaggaaggaataagttcaccattagtccctcatgttgatgtcgaggttgaatcacatccctaaaccgtaaaactaggtacaacacatccatcatttttcaaaaccaatacaaaatatagtcctaagataatattgaaagcggttttgagtgacatggcgctgatgtggcacaagaagaaaataaaagataacacgaaaccccacatgtaagtgaaacaacgatcttttttttttatcccctttctcactccgtcaggtggcggcggcggagccgcgtggacgacgaggcaaaccatacgggcagtgtggatgttgacatggctggtgacggtgatgctcaagccgaagcacgatcatcgagctgtttcacttacatatgggtcccatgtggttatttatttatttttgcttattgtgccacgttatccaaaaccaccttcaatattgtctcatgactatatttgtaccgattttaaaaaataagggatacgtcatatggtttaaggatatgatttaaactcgacatcaagacgagggacctaaagtttacttatttataggaggaatgaagccactgcagtgattctaacgcctaagcagatgcagatactatttcaattttttctggttgatcttttttattgaaataaaatttctagctgaacattattattactagtacaattttttttttctaaatattactagccatcgattgtgccacgtgatggccggaccaccgcccacttgcacttgctttgtcgttgcctcgccggccatccccggaaacgagcggccggtggacgcggcggatactcttcttcctcctcccctctcctggtcaggtcactggccagtggtcacagctcgccggagaggaagacaagcttgtggtggtcgccggccgattggcaatcattcggcaacgacgaccgatgctggttcagccgccgaacgccgtggcggtccgggcgacggcggcgggcaaggagcccctcttctcgttcggcgtcatcgccgacgtgcagtacgccgacatccccgacggccgctccttcctcggcgtcccccgctactaccgccacagcctcaccatcctgcagagagccgtccgctcctggaacgcccacaaccacaagcatcccgtcgccggcggcggcgtccgcttctgtgtcaacttcggcgacatcgtcgacggcttctgccccaaggacaggtcgctggctgccgtccaggccgtcgtcgccgagttcgaccgcttccatggcccggcctaccacatgctcggcaaccactgcctctacaaccttccccggagcaagctcgtgtcgctgctcaggatgccgtcggggcgcgcctactacgacttctcgccgttcccgggctacaggttcgtcgtcctcgacgcgtacgacttcagcgccgtgggatggccgcgcggccacccggtggcggcggcggcgaggaggttcttggacgagaggaacccgaacgcggacaagaacagcccgagcggcctcgccggcgtggaccggcggttcgtgatgttcaacggcgccgtcggcgaggcgcagctgcggtggctggacggcgtgctgcgcggggcggcgcggcggcgggaggcggcggtggtgtgcagccacctgccgctgcaccccggcgcggcgtcgccgtcggggctgatgtggaactacgaggaggtgatgcgcgtggtgcaccggcacggctgcgtcgcggcgtgcctcgccggccacgaccacaggggcggctacggcgtcgacgcccgcggcgtccaccaccgcaccctggaggcggcgctggagtgcccgcccggcaccgacgccttcggccgcgtcgacgtgtaccccgacggcctgacgctcgtcggcgccggcaggatgggcagcacagacatgcggctccagctccactccccagtgactgagctcagctagctaagctaaatcctctctgctgccgccattgtgctaatgcaactgttgtaatagtggcaatgtgattgacagcacgtttcatgcatccctaaaaaaaaataatctagtgtccaattgatgtctcgtcgtcgtccatgtcgcgcggttagaaatcaaagtcgttccgaggaggaagacgagaggcagcgtgggcccggttcggcatagagggggatgcggtgttgaccagtccaatttatccacgtgtaattttgctatatatttatcaataatttttctctaaaaaaataataaatattgtaaattgcatgtaactataatgtaacttatatataactttcatataattttgaaccgttatatttgtttcaagatttgtgcaacagtgcaagtgaggaattaaaagtcacggcgtgtatacatgtgagatgattcgtctctacgacctccgtttcaccgaaataatatattacggagagagttctaaaagtccctccgtttcacaatgtaagtcattctagtatttcccacattcatattgatgttaatgaatatatcaatatgaatgtggaaaatactataatgacttacattgtgaaacggaggaagtatattgtagttacatgcaagttacagtgtcattacatcacaattgcactaaaattatactccctccgtcccataatacaagagattttaagtttttacttacaatgtttgaccgctcgtcttattcaaaaaaatttgtgcaaatataaaaaacgaaaatttgtgcttaaagtactttggataataaagtgtgtgtgtatatgtgtgtgtgtgtgtgtgtatatatatatatatatatatatgcgcaagcacaccgtactgcggactctagcgacgactagcatcactagcctctccgaggtgtgcatatgcaccatgcgactgcctgggcaaagaagaagataagattgatatgatatacacgacataagaaataattaagtagtactaaccacatgtattctggtgtctcagattgtacacaggatctgatcgatctcgtatggctatcgccgaatgcattgtcgccatcgaaaaggctttgcgcgagatcgacgagtgattgatgccgcctgggttagttcaactattgctgcatcgcaccgtcgactagtcccgtcccgtcgcgccgttgccttggaggacgatgacctgcatttccgccacacgatgttgccgatcggtctacaccgccgccgcgccgcgcgtgcaggccgccgcgccgggatcacgccgtcacctgcaacgcagccatggatcgacgatgaatctcgctgctgttgcggaatcgacgatgaatcgccgccgccttctccgagttctattatatcgcggtctctcctagtgacctgattttcggatccgatgcactggtggaacgaggaattgtactcaggtcattccggtttccgtggctaaattaaggggtacgtaatttttttcttgtcaaaaagttaaacgggtccgctcgttaatccgatatcaggatccatcgaagctaatcacagatcaacggtggatgatagcaggtgtacatactcccatgtgtgtgtgtgtatatatatacacattaacatcaatataaatgtaggaaatactagaatgacttacattgtgaaatggagagagtatgtcacaaagaaaataaataataattctaattttttttgaataggacagagtatcttttttaaatttttaaaactttcgaaaatttgtgaacaaatgtattggtgatcccatccacacatcatacggcggttggctcatttcctttccaagaaatgggccggaacggacagttggacgtggaaggcccaaaatcaattgggcccagtaaggagcccaccctacgttgcgcggcggataaagagggggagggcgacgagcgcctcaagctccaacagtagcgctagcttatcccctcctactcccccccctcatcctcctcctcctcgctcgcccatggccatggccaccacctccgtcacctcgctcgcgatggccatggccgcggccgcctccgccgacgccacccaggccccgcacaagctctccgccctccccttccaccacctcctcttctcccgcgcgccgcccctcctccgcgcctcccgccgcctccccctcgcgcccctcgtcgcctcctccgacgccgccgccgccgccgaggccggcgtcgaatggagcgagacggaggaggccgatgagggttcccaggaggaggaggaggaggaggtggtcgaggagcaggcggaggcggaggaggaggtggtggcctccgtggaggaggaggaggaggaagcggtggaggaggagttcgcggcggagccccccgaggaggccaaggtgtacgtcggtaacctgccgtacgacgtcgacagcgagggcctcgcccagctcttcgagcaggccggcgtcgtcgaggtcgccgaggtgagcctactcgcgcgccagcccacaatcaatttcccccttcttctttttaacagaagaattgcaagatactattgccaattgcataaattctcaaggctcagtatttccaattacccaattattgtttttatttaggtcatttacaacagagagacagggcagagccgtggatttgggttcgttaccatgagtacgattgaggaagccgacaaggccattgagatgcttaaccgctatgtgagtgcatttctgaattgtcgtttcttaatccattgaagtattttattttcacaattttcaccattcgcacatgctgccgttacacataaaattggaagtaccttgataactgaaacaatttatattatctgatcaaagggtaaaattatactgttggtacatctcatttaggttaaccattgtgaaatgttcccatacccgatgaactgcgttcagtaaaactgagctcgaagatatttctgtcatagtgataaaatgatagtacagaagaaattgtataagttgcacagtgttctcagctgctggctgataaatttatgttttacaggatatcaacggaaggcttctgaacgtaaacagggcggctccaaggggctctcgtgtggagagacctccaaggcagtttgctcctgctttcagggcttatgttggcaacctgccatggcaagtggatgactctaggctgctgcaattgttcagcgagcatggagaggtggttaacgcttcggttgtctacgatagagaatctgggcgttctcggggatttggttttgtttccatggcctccaaggaggagctcgatgatgctatttctgcccttgatggacaggtgaggacggcaccatctacattaagcatacacttgaatatcaccattataacgagtatggcaaatatggaggctctataagctaataccgtttcttttatgcttcttttattatgctcaattgttcatgatggattacaggaattggatggccgcccacttcgagtgaatgtggcagctgagcgaccacagcgaggcttttgattccatatggcgttggggagcatgtctgcacgtttgaacaagaatgctaaagtgttatgcgttaaggcggaagctgatggttgtcatttacagagcgcgcgttagcttcctgattttgagtcctcccgtcctttttatgtgtcttccaagctgatgttatgttaaattattctcaaaaatatgagttcaactttccaagtaggatatttataatgatgatgtccttagtattttttttccgtgataatccaaaagttcacttgtcgaccatatatctgagaaaaggagcaaatgcatggcagcagccagtgcttacccctatgcattatgcttattttttctctttcagaaatgttgttctctggatttgcaagaaccaaatactttgataaactattgttcatataatgcacaggaaaccacaatagtcatggacactccaatccctttaatgtcacaaagctgatcaagtctgcaggatacgttacatctaagccaaccgtgttgtgaagataacaaatatgtcatgcacattgtagtggaaacaccattagaggcaaaagagatcaacacaagcacatacttccatgcttcatgacgaaccaacatccaacattgttgacaagcaccaagcgattcacacatacggtaggaccaatttatgtacaataataacatcttgatgtaactgggatcacgcattgaaggttttacattcagcagaatattatggtagtgcattcagttagcctgcagctgcgcatccttgcttgtgaggggcacatagcgcacagccgtctcatctcttatgctgaccttgccatcctggttcttgtccaccactttcagctcctggaacatagtcccaactgggatcaccattctgccaccgggctttagctgctcaatcaacgcctgtggaatctgcggtgcagcagctccgacatggatggcatcatagggtgcgagctctggccaaccttctctgccatctgtatcagttacagagatcgattattgttaggtaaataatgttttggaatatgaagtactgctgaagccaacccggatgcacaatataagtttatgagatggatgggcaaagttgctccaagtctgtgtctagaaagcataagtatcacagatgaagaaccactcactgtttggtatggataaaaagattctctttgaaacctaaaacaacttgttaccacgttagacccgacaaaagtaaccctttaaaacaaattacagaagttcaacatgtttatttaaagtatcatttaacccttgcaactaagcccttgtctacaaaattgtactctacgctgcaattcagttcagaccttggcacttcagcatgtttgtcattactactagtggagaggaaagtgaacaattaaaagctgcaaacttgcgctacttaccggtaatatgtatactgagggatccatcagttaactgtggagccgctgcacttttcttgatgttttcaatagacgaagtaaccaactctgggatatgttcaacaccaactgctcgcccttctggtccaaccataatcgcgaagcaagctgttaggtaccctgtgcctgttgaagttatcaaagatacgtaaataagcaatgcgagttgacaaacatgtatagaaatttgctatctgttgagcatttcagctaggaaatattaaacaggtcggcagtcctgaatcaatatttaattccataaatcagtatgacagaaaaaaagatgaaagaaaccaacattactactgaatctttgtggtatagggtaggggccagcccatcatagaccacatgaatacataccctcacggaaaagctgtgagatgaagctaaatattgttttttccacatatgttggcaaacatttctgcatttcaaagcctaaagtgtgcagtgataagtacatctattagataagatactactccactgacagatcttgggtaatgataaacctatagttgaagttgtaactcaaaaacaaaagcaattctatattttggcacttaagattcataacatagttttgtgaatgagaacatcaaaactcaaaagtgtttctgttgtgatgatacataattgaaatgatattttaggagcatagataaaacgttgaagtgattgagcgaaactgaatatatgagatacgggagacctgatccaacatccagagcacgcatgccaggctgaaggtgcttctccaggagctccaagcaagaggcgtgcatgtgaggcgcagaaatggtggcgttgtaaccgatgggcatcgggctgtcgaaatagggagaagcaccaggaggcacaaacagccccctgtcgatggtctccatcacctgcgcgaccttgctcgacttgataatcccgtacctctggagctgctcaaccattgccttgttcttgtcgctagccccgcttgaccacagtcggtgctgcaacagtatcagcaccaggagcaacatgaaacggttcttcccagagaaaaacagcaacatgagagatgaggcatatgagattgaaatcaatccccttcaacgctctaaatggcactcgacaactatggttggcacatacactgaaatttgttgtagattatcttatcttatgtgaatcaagatcatcatcaaatatcccaaaggtacaaaggaactagtaacaattaacagtcggcataaaattctaattcaattcgttgtaagtccataatcaaatgttggaatcaggctgccggtggtgattagaattaacaataactgacaaggttttagcctaaattatggagaactctccccataatttcgctaattactagtaccacaagaactcagactagcgagtaatatagccttattaggactggatcaacaattaagcacagtaaaatcacaattacgtactagcaattaaagaagatactcacggagcccgcagatgctgaggatgatttggaggaggaggaggagaagcaggaaaagatgtagcggagtacctccatggcgaaagtgagagaacactcgatcgggtggtctctcctggtttaatcttaatcttggggccgattgggagcgcgcgggtgggtcgcggtgcagctgcctttgccggtgcagcggcggagacgtgggggatgtcgccgcgggaaccggattcccgccgcggcagtggctggtggctggcggtggtggtgggggattgggagagagagagagagatggattcttctcaaaccacctagcgagagagaggtgtaggtagcttgtgggccgattttatgggcctaatccatgggccggaagagcgttcccatgggctaggcctccatgtggccgctcgtcatgccaaacctgaaaccggcgccgtttcttcccaacacaatagtctttgttccggtaaaaaaacgcaagagttttgtttgagaaaactaaaattgatagatttttttaaaaaaaatcattacagtctaagggtacgaagtacgaacaaatgaatctttagaccagcactctaagaaaattgttatgtatgaaggacaccatttataaatttaagaagcgtgtgcaattttttctaagagaagggtatttttttactcggcctctatatccaactggatatatgcagcattttttttaaaaaaaatactccctccgtttcgaaatgtttgacgccattgattttttggcacatgtttgaccgtttgtcttattcaaaaaatttaagtaattattaatttttttcctatcatttgattcattgttaaatatatttttatagacatataattttacatattttataaaagtttttgaataagacgaacggtcaaatatgtgctaaaaagtcaatgatgtcaaacattttgaaacggagggagtagaaacttagtttgaaattcactcctatggagatttaaacttaggaccttatgtgctacacagaagtgtgtgcaaatgaaaattgaaaattagaaaatatcggacaaaattcatacttaacaatctttttcaaattaataatcaataatcattacacagcgtaaacataatcgagctagattgcaaaaaatacgagcatgcaatcaaatcaactacaggtgattaaattaacgaactgcttattttgttacgacgtcgatcaatcgcctccaaacggtagccagttactgttgtaaaacacacaattaaatgagcttagagttcgtcgtggtggcggtgctcctcgtcatcatcatcttcgtcgtcgtcggtgaccttcttgatcttcttgggcgccgggttcggcgaggtcttgatggggtaggatgcttccatggcgatgccgcagagtccctccttggcggacacgtcgcgcttcatccggatgtagcccttctcaccccagtctgcgccccacgagttcctgacgatccagtacttggtgccgtccaccgtcgtgccgtagcccaccgccgccacgccatggtcgagctccgtcccgcatttcccggcgaacaccccctccgagtagaactggaagtgcgagccccccgcctcgatcgccaccgacaccggctggttcgccaccgccttcttcagcgccgactccgagttcgccggcacgtcctcgtagccgtcgatggtgacggcgggggacgacgccgcggagctcttgcaggagctctggcgggcgcggtacgggtaggcggaggaggcggcgacgccgccgtgcttggcgatgtactggaacgcgttgtccatgaggccgccgtcgcagccggcgttgccggtcttggtgtcgcagtcgacgagctgctgctccgacagcgcggtgaggttgctggtgcggatggcgttgatcccttccacggcggcgatggtcgagaacgcccagcagctgccgcactggccctggtccttgaccgccccgacggcgcccttctcgcgccagtccaccgccgccggcaggtcgcgggcgccggcgtacatgaagccgctgcgcctctcgcgcggccgcggaacatgcggtggtgggagacgcgggaggaggcgtaggcgcggcggaactcgtcggcggtcatgtcgccgaagcggttgaggcggagcttgtagggctcgtcgcggcggttgaactcgtggatgaggcggacgttgtccttgaacacgttgaaccgccgcgccttctcgccgaggtcccgcgccacccggtgctgcccgcgccaccgctcgtacagctcccacagcgcctcctccgacgccacgtccttgtcgccgaactccatcgcgctcgccgccggcgccgccgcgcccagcagcacgacgacggccacggctaccgccgccgccgccacgacgaccactactctacccatcgcaacaacacttgtgatcacttaattgtcactagctagctagcttagtaggttgaattagcttgtgaggtggtggtggtagccatggaggtcaggggcttcttatatagaggaggatatgatgctggattgctggctgcatatgtgcaaggtagaggctagagccgatcgaatcaaggcgttgcttgccggcaacagtttagtcatcataattaagaggtcaggtactacacttgtaatggttgattgctctcgtgagtgacacacagtgatatagctaattttggattatacttgtgcaccaatgcttattgttgtatgtgcagttttcagaatctagaaggcttgcagcagtgcccaatcaattggtggatgtgatgtgattatgcagttgattataccatcctcagggtttaatcaccagcagagaggtcatgtgattaactcgaacagaaagatactagcatagagtagcatagaatatgttgatatggcactaataccagtgcagtaattattgggaagtggatttttgtctttcgagtgtacattatctcgttttgtgcatgtcattaaaaagttatcaaaaaaattaaaaaaatttatcaagatagatcaatatatgatatattttttttaaacatgcgagttaaaattcgacttatataattaaaaaaaataaatttgaccgtgaattacgcattctattcatagtcaaatttgttatttgtttctacttgtataaattgaaattgaatttgcatgtttgtgaaatgacatatcacatattgatcaatcatactaatttttttaaaaaattttgatgactttttaaatgacatgtaaaaatgaggggatatcctcttaagggatgatttgaatttccctatttattgtaactttggccgtgtttagtttcctccatattctcaactttctatcacatcaaaaacttttctacacacataaactttcaacttttttttccaaactcccaactttcttcaaacttccaacttttttcagaaaacacaccctttacttaattggacggaatagcagttgttggtggccaggtactgactactgaagatgaatttaacactgaatacacgtaggtacttggacatgctcgttttttaattcatcgacagatagaattaagcttaactgcagtagttaattgataaagcagccgattgattagtcgtataaaccaagtgtttctgttagtttcgcagtactaactagtactacctgcgatgctgcgaattaaggggggtgtagattatgcgggaaacgcacaaataaagaattagcgaggcgtttacgcgacggccatgtaaatatacagatcaagcttgtgcgacactatcgatcaccaatccacttactcgaaaattaactcagattctaattctgtcaccacttaataactgaacctgaactaagctatgttaatttacagatataaatatgcagagctgaatttcagggccagatatctgggaaaattttggatcgctcgtcaagcaaagcaagtagcagaaacaaaactgaaaagattaaaaattagagtattgtaatgccccagcttagccagtcaatttaggtcaatcctaatgttccttgattgtggcgtgagatttcttcaacaagtaacctgatcgaagtcgaagaaggaaggaaggaaaggaagcaagcaagcgtgttgatttcctccaggactggttccatcaacagctgatggcgacatggaaattaaagcatttccatcaacagttggaatgttggatgcatatgtggctctgcatgtcttaatgtctttctctctgtgctgaataatgatcaggagatcggaatcgactaattaataccgaaatgccaatctttacgcatgaatctcatttatcatcaggtccgttcgtgtgtttgtgttggatcggcacaactgtattgattgattaattgagcttcctttcagattcagatttcatcagccacgctggtacatgcagcttctaactaactactgtctactaccagtactgcattatgcacaagaaagtgaattacgattttttgtttttgacataaagagctagcattagcaagataaaatcctgaagcaatagaaagattggaagcataagatctatagcttggggaaacaaaattctgcattcatcgttgtcactgaaaatctgggggcaaatgagaatggctggctttcctagctctgctttctcacatggatcgcttcgagtggcacgaaacccattattcaggctacgtttcgatcggttcccagactgagcaggatgaacaagcaacatcatcagcgaggcagcgacattctgcaagtatctggtggcctttggaaagagagagagacaggaaaaaaagaaagcatcgaggctgtatattgagcctgcaaactgatcagatttaatcatctatgtacagtcattactgagcaaacttagcgaggatggcgaa

SEQ ID NO: 9194 - DNA, 14764 bp, Oryza sativa
atgactggtaatactagtattcgtacagtactggtaatatatattgcgaggaattaattgaaagcccatatatgaacaatgagattctctctcatcgttctgccttttactggcggtagctacgtgaaagggatagacattgactgtagtactagtatctatatgtatcttgactgcaaacagcagctattagtacgtataccggtctagaatgtaccataaaagtactcaagctatatggtcaataatcactcaattggactagtatctgatcctggatatgcgtttgcttaattagtcaattatgaatcgacaatgcatgcatctggattcctgattgcttttgtcctcgatcagcaatcgatcgattgatctagtctaggcatgcattaggcacataagtatgatctgcatctgcatgctagctacctgggaattttatcgatcaccaaaaactatatatcctgatcagtcgcacgcgcgtgcgcacggatgttgaaatgtacgagcgccttgggtccgtgtgaatgagacaatttatcgatcgatctcaaggaatataattaatcgatcggcaggtcaaactcaaaacgaatggatgattttctagctctgaatttctcaagtctttaaaaaatagtagcaggctagcacacccaccttcttcaattcgtcgtcgagcggttgcgatgccatcgtcgatgacggtcatcactgacgatcaatgctgcgctggatgattttgctttcaaagaatccaaatataatatatatactcgaaaacgacttcattttttgactgaagagaataacttgtgtttacctgctagccaattggctagagactgactggagagagcgaatagccgtgagacagctagctagctagcaatctggttttaccgttcatctttttacctagataacttcttgtttgtagatagatgaaacacatcctatgaatctggactttgaatgggttatctcagttaattccaacctatcctttgggtaagagtacttgactgggtgacctccctctaactcgaaccaacaagtctcttgtcttgtcttccttccttccatgcgtgaatttttctatggttaaaattaataactacagtagctagctggtacaaatctccaactaaattttataggcaggattttttcaaggtagcatagcatactagctcagattctgaacttaactacaaatgtgtgataaggataaaagatttatacatactgcatgttggaatttgaagtccattaatgtagatattggcttaactttggatgaaagtttacacataggattgaataagatttctccttttgttgttcgaacttactctctcatcatctttggtcattacgttcaaaattttgtaataagtggtttctatcttaattgaagaaaatgccagttcttttttttttaaaaaaaaggccagaatattcatcatataaaaaaaaacttaactggcacaataatatctactcctgtctctcaccccagccgcccaatgaaaatgctctgatccaattctcccaaaatttccactgtttcgtctgttactgcagaaaattaccactgtttcgtctgttactgcaggatatcgttccgaaacagggctactgtttctataaaggcacgcacattgcacgtacggctgcacaccacgctcacaaaaagctctagataacatgctcggggtgcagcagcatggccggcagcggcacggcatctcgaagccaccgccggcgaagaaggggaaggcggcggcgaggaagtacaagccgccgcaatgccctggcgccgtgagggtggtgtacatagccagccccatgaagctgacggcgagccccgaggagttccgcgccgtcgtgcaggagctcaccggccgccactccaacatcgccgaccgtcactacgttgactccaccattgatctcccgccgccgccgccgccgcctccagcatactgtgccagttatgctgcgtcggccacggcggcggcgcctcccgtcgcagctgtaccaccgccggtgctgactccgccgttgccgccgcaaacatttcagtcgtatgatcacggcggacaagggcaccgctggtagacaacactattactcctaattagtagatgaataataatgtatatatatggaggttaaattatattattatctaggaaatcaattgaattcactcatagtgaaataattaagttttgtctagttgaaactgcagggctgtaaaattattgtatatgaaggtttgcaaattattatattagtattattttttcggtcaggccggtgtgaagaaaagccccaaccaattttatgaaaaaaaacacttatgagaggtttttaaattatcaattagaattcaaattatattatccatttccactctattttattagctggttttgtatgagaaaccaacatccaccttttcatttattcttatgcttatttgtaccgcttatattagtaaaactagcatgtggctagcatcattatattctttctcatataatagcatatatgttttctcattatattattaaaatatattacaatgacaacataattttaaattttgcaataactttaagaaactactaatgtgtaatattcatattgtattttatatacgtgttagttattaattatttttaatatcaaattttagttatttgtaaattatatatattcctatatggactctagactcgtcttttaatatttctttttttaattctgaatttttattatttctaattgtacttgtatgtggactctaaacttatctttcaatattctttaatttttaatttcaaatttctattacttctaaattgtattcctatattgactttaaactcttcttctcgtgtttttcttaatttcgaattttagttatttgtaaattgtatttttatacggactctaaacactatttttcattttattatgtttattctgaattttagttagttttaaattcttatatggactctatactctacttctaatattccttattttttaattctgaatttctattttttttcttaattgtatttctatatggactctatactctacttctaatattcgttatttttaattccgaatttttattatttcttaattgtatttctatatggattctatactctacttctaatatttcttatttttaattctaaatttcagtaatttcctaattgtatttctatatggactctagtctcctcttctaatattccttattttttacttccgaacttcaactatccctaaattgtatttctatgtggactctagtcgcctcttctaatattccttattttgtaattccgaatttcagctatttctaaattgtatttctatataaactcatatttcaatattctttaatttttaatttcaaatttcagttacttctaaattgtattcctatattgactttaaactcttcttcccatgtttttcttaattttgaattttagttacttgtaaattgtatttttatacagactctaaactctacttttaattttattacatttattccaaattttagttagttttaaattcctatatgtactctatactctgcttctaatattccttattttttaattccgaatttctattatttcctaatggtatttatatatggattctagctcctcttctaatattccttattttttaattccgaatttcagttatttcctaattgtatttctatatgggctctagtctcctcttctaatatttcttattttttaattccgaattttaactatttctaaattgcatttctatatgaactctagtcttctcttctaatattccttattttttaattctgaatttcagctatttctaaattgtatttctatatggactctgctttttctttttctccgattaatgtgagaatttctagaccatgagagcgaacgtggaggctcctttttttaattccaaatttcagctattactaaattgtatttctatgtggactttgctttttctttttctccgattaatgtgagaatttctagaccatgagagcgaacgtggaagctcctttttttattcctttaataatataatagataataatttataggtaaaattttatatgtgttcttagtgataaaaacaaatattattaaattaaccacgattaaaaaacataaaatcagtttaagttttaaaatgtaaatcttgacttataaagaccaacaagcttcctcaagcccaaactgcagagccacattttcggcccaacagatatttgggcccataagtgaaaaaatgggcttaggcccattcctctcctcctcttccgcgtgtgtgtatataatcttggtaaggtggtgcggcgccggtggccggagatgggcaacgcgagcggcaggctggacgacatcgccgacgccgaaatggatgacggcggcggaggcggcaaccgcgccggcgctggggactactcctcctcgctgcgccccatggaccgtgctggcctcccgccgtacggcggcgccgggggaagcggcggactggtgcggcccccgtcgtcggcagcggggtactccggcggcggagggtcgtcgtccccgccggggacccccccgcggccgcactccccgcgcatgttcgtgccgcaggtcagatcacgctaaactcaattcgatctcgatttcaattccacccatccatgtgcaatatacatcctcttgatcgatcagtgcatgtgacgcgcgtcgcacttgtaatgtgcatgccacaatttcatcggcgttgcattttggggactcctcgctgattctatgatttattttggttgctaacaatttgttttttttaaaaaaacatgatctgaaatatatgttctttagaaagttcataatatgaaatatattcgttacaactttgacaattaaaattgtagaataatgtactgttgttttatcagatttatctagaataatactccctcctttttcctttttagtatatgatgttgttgactgtttgagatacatttaaccattcgtcttataaaaaattaatataattatcatttattatgttgtgacttgatttatcagttccttagacatgattttttatatatatttgaaaaaaataagacgtctcatgtattaaacagaggtagtacaggcatacaactttgctcagttgctctactagcgaacatgtttaatcttacggtcgcttcagatgatctaattaccttgtttcttgccaagtcagtctacctcttcccaaatgtcattgttctaagttttgtgtttttaatgcactgatataaatgtactgcagagtcctgtaactccattgcatagagctgtagatggacctcctccagtatttaaccagatattaacgagtgaacaagaggaggatcacgatggtccccctgacaagctgattcctactctgcttgtgtggactcttggagggaagaatgtctatatagaaggatcatgggataactggaaatcaaagtacatttttattttttggagagatagcatatagtatttcccttttgtttctagtacctaaactgaagcttaaggatagaactgattttgttctgacattgttagtgtgtatcacaggcaactcgtccataaatgtggaaaggatcactgcgtcatgttagggcttgcatctggagtttaccgttatagattcattgttgatggagaaagaagatttcagcctgatcgtccccgtgaagctgacattatgggcaccatttcaaatcttattgatgttcatgtgagtatttttttttcattcaacttttttccccgttgcacgtacgattgtttgtgcgaacttgatcagcaaaacttactcttgaccatgattatttaaacccaagaaaatgtgctagggagattcccactcaagtacttgatgatgattaagaaagggaccaagctcagatatctgaaaattatatttctcgcctagtaagaatcaattgaatgatgcaaataatcgttgcactagtataaccaattgtccccttgtttcgttataatcaataaaattatgttcttcattgtgtcttgcaagagtctaacttggaggcacatatatatgagagaaacaattctaatgtaattaggattagactacaactcaaagcaccaaagaaggagcacaaagcctgggcattgcacagatcattcccacacatcatgatttatctgctagcatttgaaacacacactacgaatgcatcacctatctctgcttcttgaaaattcagtgtttgcgtattgcctgaatgtataactggtgtgcatatgcttgcaggattatgtcccggatagcgtggacagtgtgtcagagctgatggctcctccatcgccggactccagctacggtttcctggctcctgacgacaaggagttcaccaaggagcctcccgctctgccgccgcagctccacctgggcgtgctcaactcgcgaggaggctccggcgggaaggagggagagtgcgccatgcccaagcacaacgtcctcggccatgtcttcatcggcaagggcaccccacccatggtcgctgccctcggcaccaccttcaggttccagtccaagtttgtcaccaaagtcctctacaaggccatccaaagagaggacagatagctttattagctggcaatgctagaacaaattagtcatgcattctgttcattcattgttttggaatagtaataataatggtaatcttgagggcgtggaccgtgatgatttcatcagtgttaggaacaaaaacagacccattgatgtgcttttcagtcaccaatttgtttgctgacgccatattaaggatctaccagaagaataaagatggtgatcgatactctttcatacatttttgtgtgtgtgtgtgtcagggttggtcagttttgtagttgtgttcgtttgctcacatctcttatcttgttgcgttccaagatttgttatccctttgttatatttcggtttctctaatatgtatattttgtagggagaaagaggatttctaatcaaagggcataccaatcccttttcagtttgtcatgatacgatgatatcagaaagcttaaattgagcccacataaaggcgatgggcccaaagcccagtacgagcatccaaccaggaaaaaggcccaagttgtagtaacacgtttcatatggcccacaaggccataacacgaaagcttggaaagtcgggggactttactgataaaatgcactccgcgtccaaaccgcgtcgagggtacatacgtcattctgctcatttaaaaatgtcaagaaagcatccatcatcggaaaattccaccgttttacaggcccacatgccgtaaagtcacagaggcttgtccttgacggaacattcaagattacacaaatgccctcacacacatgctgtactttgacgtttgggatgagttttacgtaaattctgaaagaataaaactgtttttatgtgaaaatcctgtagaatttgcttttgtgcatacatagagaatcaatggaacatgtacaatagtacttcctctattttaaataaaaagatagttgctctctccgtctcattttaaggctctgttcgtttgggcaggtttccaacttctattcctcgttttccgcgcacacgtttttcaaactgctaaacgatgcgttttttgcaaaaagtttctatacgaaagttgcttaaaaatcaaattaatctatttttgaaaaaaagcaaatacttaattaatcacacactaatggattgctccgttttccgtgcaggggagttgggttccgaactgcctgaaacgaacagagcctaagtgcagacatgatttttcgtgcccaacttgatcatctgtctcatttgaaaaaataaagaatttaaaaacataagtcacgggtaaagtactattcatattttatcatctcataacaacaaaaaatactaattataaaaaattttcaaataagacggacggttaaaattagacgcgaaaactcatggttacacttaaaatgggacagaggaagtatatttttaagcgaaaggactgagggaatagctaggtagaatcccgccaatccagggactgatttttttttatcctaccaattgagggattggctcaaagcaaactcatgccaccacaaatataggatgatttggacattgacaagctaaagaaaatgcaactttaccaaataagtaagtaaattttactttggaccattttatcttcttatatactatatattttagatcatttcaactctcttctgaaacatatgagagcgattttgagtatgtcggttccttaataaactatcatgattatatgttttttgacatatgacaatttaggtgtagatggataaaagagttcggggtggtttaaagtgtaaaaaaatgttaataaaaatatgatcctgtaataaaatgaaactattttcatgtctatgttttgaaaaacattatacccattactaatgaggaggggtagtttgggaaaagcaggtggtcgaaggtaaagcggaggtgacggaagacgcggtataaatcgggggtgggaaacttccaccggacgccacgccacacaagtctctcctcctcccatctccgcttcccttcttcttcttcttcgttgatccactcacccgccgcgcgcagaggaggccatggcggatcagctcaccgacgaccagatcgccgagttcaaggaggccttcagcctcttcgacaaggacggcgatggtaacaacaacaaccaccaccaccaccttgttctctctttctccatctctatctgttcgttggatcgatctctctcgtttgcacacgctggcgtctcgcgcctgtggcattgcctccaccgcgcgggtgcccttccttcctcgcgtcgtcgggtggcagatccgatccgggcacggatctggacggaaaccggtcgctgtcatcgtcctgtgtgtccagtggcgaattgtccgacatggacgcaacgcttatctgctgtgctgacttgaccatttcctgactgcgccacctccctcgacttcactatcgcaatcgtgtctcgctgcctgtttggttcgggaacacttactctacatcataataacttttcaacttatattaggccctgtttgattcagctagtttgcttagttactccctcatttttctttttcgtgcaaaaacttcggatatataattttctttttaaaaaattaattttcaagtttacagtagttaattaatcatgccgttaataagctcagcaaagaataatatactttcattacaatgatttttatgtacgaaaaggtttattacatagtcgaaaacagagaggagtgtatgtgttggatgtagcttagctatcaactgctccctttcgcatgcaactttggtcattttcttaggttagtgcatttggtagcttcaacctttttatggtgggctgtagttgtatcaataacttgatcgctactgaaagctgttcagtttaggtaattggattcctagcccttggaataccttctccgttagaaatttgtccacagggaaatcctgtataaatttcatgggggcacgttgaaaaaattatacagcaagtacatgcaaataattttgtggtttaccttggaccttgttaaagaccataaccctgcaattaccttggtggaaattgtcttcgactggtttctcgttaacctggtaatattttagctcactgattcactaagtacggctttaaggttgaacaacacccaccttgaaattttgagctgaaatgttcgtggaaattgtcttggactagttattgttgaacagctaacattttagctcactgattgattaagtatggctttaaagttgatcgatacccaccttgaaactttgtgctgaaatgttttgactgcagcaatcccttcttgatattactgtcagggtgaatcacccagttaaaagcatccaaatatgcaaatatcactcagccttgtaacttttaacggaatactctcagcatattcaaatagacataatcgtactatttcaaactctttacaactggtgatgagccaataaggagtcccttttctttttcttttttaagttaatatcccctaatggcctgtttggttaggataatcatcctacaatgatttggttattgttgagtcatcccctgattttgttgggatgatcccattcttcaattttcttcttagcatgcccttctgaggatgcaattgctatgtaccaacacattccattcttcaaaccaaacaagtaattacgtttggacttcagtgttaggatcagacagtccattccgtatggatccaattagacgcatgttgacattattattagttattaggaagtgtagtgtgtgcctagtttttctgttagtatctagttataatgactacactgttcagcaattgattgtacaattggttgcttgtgaactttacaggttgcatcacaaccaaggagttgggaactgtcatgcgttcactagggcagaacccaacggaagctgagctccaggacatgatcaacgaggttgatgctgatggcaatggaaccattgattttcctgagtttctcaatctgatggctcgcaagatgaaggacactgattcagaggaagaactcaaggaggccttccgggtgtttgacaaggaccaaaatggcttcatctccgctgctgagctccgccatgtgatgacaaatcttggcgagaagctaactgacgaggaggtggatgagatgatccgtgaggctgatgttgatggtgatggtcagataaactatgaggagtttgtgaaggtcatgatggccaagtgagccatggaaccatactctaaggcagaggagattgtgtgttgcatagtcctagttaagatgcaacacttgttttatcaatttccagtgaagcatcctactagctgtagtcgctaaaaaggattttcctgctatgttcctctgaagtgtgttttcagatctcttgtgttttatgtgaaccagtaattcttgtccttggtatgtccagattgcagttgggcctgtatgtagttatatattttttcatcaatttatgctcgagtctagtatcaattggatatctggtattttttttattccattggtctcttcttcgatctacatatgtttcttctgcttgtatgcagaagaatttgttcaattgcagagaaggatcttttggggtttgaattggatttgaattgagcaaatgggaaaggcaggcatgcctttcaaagagggttgcctggcaggttgcaacaactactagtaattataagtgttgaatgatagactgatagctgcgtgcagcctctgagagtatggcagtaggtagcaactaccacatgctcctggccttcttaaggcctttttctgaatgtattctgtgcttgtaagagtcatacacgattgcgcatggagctggacaagaaatttaaggtgctttgcctgcacggcttccggacaagtgggagttttctgaagaagcaaatcagcaaatggaatccttccatcttccaacaatttgacatggtactacgctggatccaaagatcaggtttttgtattgctttgttgattgtttacatgattttcctggttttcaggtcttccctgatggcatattcccagctggagggaaatcagagatagaaggcatatttcccccaccctactttgagtggtttcagttcaacaaggttaaatgcttcagatggaacccaaactgaaacaacacttgcaatagcgttgtcagatcttactttgtactatagtttcagttttgttgctatactatacagtgtgccttggctcaaaccaaagatagacaaacatttatttactgttgcatgttcctacacaggacttcactgaatacacaaatctggatgagtgcatttcatacctgtgtgattacatggtgaaaaatggaccttttgatggcctgcttggattctcccaggtaaaaatggaacctagctatgaaacgtatttgacccacttggtacttgagtgttattattatgtgcatgctagagatcttgggccaagaatttgcatatgaaattccagataagtgcattcaccatttaaattgtcaacttttgaggtgctgtaatttatgagttcagttccgacacactgagcaacactagattatctgaagcttctgctgtatatagataatcactcactccttgcagtcgatctcttattttatttctatatccaagttgcaaaaactttcgcatttttttttacagaatcctgtgtactcacgtttttctattggaccagacactcacataggaaagccaaaagacatgggttgtggtcagacctttagattttttaatcagtactgacttactgaacaatatcataattcagttttgaccgaaatcccttactgtttgtttaacatcttgtttacaactgctcatgtccttcagctcatctgttaatttctttttcattccagggtgcaactctttctgctcttttgataggttaccaagcacaggtacacttgtactcttaattttgcagaaggtttcaattttggttgtagtttgaaggaacagagggcaataatgtgtgaatattcatgaaacgactgtgacatcaaggtcccatatttgaacctagcagtttccatgagctattcagttgttggtgatgtgttttggcttcaaattgttaaatgctagtacaaatataaagtcccactcctataggctatggtaaatactgaatagtatcgtttagctaggtgctagcttttgtaagctgcaccaacatttcattcactagaacatggacttgagcagggtacttcttttatgggataagtcctttatatgagagatgttattcaaagtctgcagtatctagttccatctggattcttacttaagctgaatgacttagggcaaagtactgaatgatcatccaccaatcaagttcatggtctcaatagctgggagcaagttcagggacccaagcatatgcaatgtagcctataaggatccgatcaaggtgaaatcagtgcatttcattggagagaaggattggctcaaagtgccttccgaggagctggccgctgcctttgaggaccctgtcatcataagacatccccagggccacactgtccctaggcttggtatgcatgcaccctacccagcacttgcattccatcttgtttttcttttcactcctcttaaaactgttcaccaacattgcttgcttgttaagtattaatgagtggaaattgttcattcacagatgaggcaagtgtgaagcagctttctgagtggagctcaagcatcctggaagacatcaagaatgcagatgatgttgccaaggcttcaattgtggagaagccatctgagggtaataccgtggcagagtccggtgaaaacctggtggagcaaattgcagcttgagtatggtaactgacagtcttgacactgtctggaggctggagctgattgctgcttcaaattaaaccggattagtccgtcatgaaactcgatctatccaaatgtttaagtctttaagagctttcttttttagcgaagatgtttaaaaactttgttaccacaaatatatttgcctgggtactgcttgtattctctgggggaactaattgaatcgactcataaccggaccaaatggattcagggattcatcactgtagctccagctacttgagagagtaattggtgtaaaatgtccacaaaacattctgaggttcaaactgagatgattttcaattcagaggctgagtgaattccattatcagaaacaaaaacaaaaaaggcaaaaaaacaaaaacaaaagtgaaatgatttcaatcctgattctgccgcccatccaactttgggccgcgagttaagatccaagttgggcagtttggccacacgaacgatccaacttcagccgctagatccaatttaaacaggaaccaatcgaagcagaaaaggaggaaaagtatctggacgccgtgcgccggagacggagaaggtgagccacatctccgtcgagtggcggcggcttacggcgaagctgttctcgatgcaagcgcccaccatccatcctttgcttttggggataattttactatcctttagaaggtatctatatattttctagtataaaatttggtacatctaagcactaagtatcttaagatactaaattacctcaagctactttctcaaggaccataaaattcctcgcttctgacctgcatttcatctaccttcaattccattccagaagatcctgttaaataaccctctcaatacaatactttcatttcacaatgttttttgatacagtagtatactattacagtgccaaaaacaacgatactacaaattacacatggtggaaatattcagagcatatcactgatcatggttatactgatcctatgtcaacctacatctgtggaagataaaattgagtagattttctgctctaaaaggaacaaatcaaatggtgagcagtgaagccgtgacctgctgttgcctaatcctgttgggtacttatatgaatctatccatacatgggtaacaaaaggatttactgcaactcggaaattttgatatgtacagagaaatc

SEQ ID NO: 9195 - DNA, 23296 bp, Oryza sativa
taactttagagcgtggaagctgctggtaggtttcatcaaagttatagtagaataattttcatcttgtttccaacaaatgccatgttcctgaacgttcctttcacttcaacgatcgaagtagtaatataagcaatcaaattgggatcaatcaagagcaaagtcttctttactttcactcaaaacgaaacaagaatatagcaaagataagaaaggaaagaatggaacggaggaaggatggcaactttatctctattatatactactaggtactaaacgagtatcatatagatgtaggcacagcagaacacaatgtcatggttacttggttagtgctaatcacgtctgaacatgtttgctgctgctttaagggacatattcttaggcttgtcctgaaactcgggacaagttcctttcatcaacaagtttttgttaagctcccctcgtgtatcagacgctgtcccctctgaatccatattagtgtccaaaaagggttcagatcttctattgctaaaaatacatctgttttttttttgtttgttaaggaatagttgcactgtccttgttgctcgctgcatgttcttcaaatatttccctgtctaaattactccaaatggttgaacaaaaactagataagtttgcaaaagatcaacacaactcatctcaagacagccttttgctaatcttgatccatcaagtagtccagcctccagaattggaacacataaaagcggcgccggagttcatctgaaacaagttacctagccctgtctcgcagccatctttttcattcttttttgttcttcttttcttgaatgaaactgagttgaaccctttggagcctacaaacactgacccacaagctagtattgcaagtgctccaacgatcaaacactgaaaaaacaaaagagagttgaggagcttgctttgcacaagcaaaacccgctttcccactcgctaatctcgtgatgtgtcccccacttctcatcagacaatgtactactagaatacaaaattagtacgcattgcagcggcaacaaaaagttcatgatagtacgagcacttgcagatcgattagttaatctatcagtttacctgctcatcgccgacgtgatcttgcagatcgtggcttagcacgtacgcggatttagacaacgtgctgcatgcataatctgaaaagaaaataaaggaggaaccctattcactatcctaaccctgaaggacatgcactttcgtgtctaatctttgtcatcttgtcagtggaacaagagctggcagtaccctttgattaatcacgttgattagctctgaccccatcttaattacttaactagcatagcgacccgcacagattgtgcggctagcatcattatattttcttttatataatagcatatatgttttctcattatattattaaaatatattacaatgacaacataattttaaattttacaataactttacgaaactactaatgtgtaatattcatattgtattttatatatgtgttagttattaattatttttaatatcaaattttagttatttgtaaattatatatattcctatatggactctagactcgtcttttaatatttctttttttaattctgatttttttattatttctaattgtatttatatgtggactctaaagtcatctttcaatattctttaatttttaatttcaaatttcagttacttctaaattgtattcctatattgactttaaactcttcttcccatgtttttcttaatttcgaattttagttatttgtaaattgtatttttatacggactctaaactctacttttaattttattatgtttattctaaattttaattagttttaaattcctatatggactctatactctacttctaatattcctttttttaattccgaatttctttttttcttaattgtatttctatatggactctatactctatttctaatattccttttttttaattccgaatttctattatttcctaattgtatttctatatgcactctatactctacttctaatattccttatttttaattttgaatttcagtcatttcctaattgtatttctatatggactctagtctcctcttctaatattccttatttgttaatttcgaatttcaactatttctaaattgtatttgtagatagactctagtctcctcttctaatattccttatattttaattccgaattttagctatttctaaattgtatttctatatggactctagtctctttctaaattgtatttctatatggactctattttttctttttcttcgattaatgtgagaatttctaggccatgagagcgaacgtgaaggctcctttttctattcctttaataatataatagattaggagtcgtgaacattgtgctaataccaattgagtacatgcttgtgttaattgcttcacggttggttgagcctggatttttatttttcggtgatgagcacttagtagcagctattagttgtagatatagcaattaccaaaagtagatgggttttcgttcctacaaagaatgttcgctcactcaaataatcataattattttaagatagatcaatatgatttatattgttttataaatatataagtttaaatgacttatgcactttttttaaaaaaagaaacaaaaattgaatgcccgtgttatagtttaatttgttcttttgttataatgtgcagaagtcaaatttgaatttgtatatttgtagaagtaataaatcacatattaatttatcttatcaatttttaaaagatattaataattatttgggtgacataatataaacaagggaatgtctcgaaaaaaacaataatttccctatagaaaaacatgtcttaccatactgcatgtctgcatactgaacactattttatcattttttcgtcgggtcgacaaagaacgccgaccgtaatatattaagaaaatagagaatgtacagggatggcgaggcttcacagccaccgcctatttacaagatgctacaccacaaacactattttatctgagattctcatccccaacctcgaaaatgcaagcgtatctgcatatatggacacatatggattgaacagtacagtggtctgcatatatgagtcaactcgaatacacgtatggtaatccatagaataattcccatttaaaaacccacgaattcagagaatagtttgacctttgctagcaagcaaacagatttgcatatgcatgaacaggaacatgtctattaatctggctacctagctttggcatttggcaatggaaaagaaaaacaataatgtcagggacaatctggcaatggatggacgagaccacggcacttgatcgattgtatccaataccagggactgatcatccaggtcagtgtgtgtgtgattaagcagctgcaattctaaatgacagcactttgcttggacttgatagagatccctgtgacagatcagaggagaccagagtctgcgagtttgacaaaattgggcaccctagctgaaaaacaattcaatccaaatgctcaaatttcaacgcgcggtgtggaacctgaccataccctgctgtactgtatttgtatttgtgattgtttttggttttagaatgatcaagttggtaatttagttagcagaaattgggttgcaaaagattctgatattagctcaagcagttgactgattgctcataattgagtgacaaaatgtgtactagttgtatattgtattatagtaccagttattttcagtagcatgttgacaaacttggctagatggtgtgggtgtgttcatttcaagtttcaactctgaacagcacataaatctgataaatctaagctaaaatgacagccacaattaatccggccttgtcaccatcaaaaagcctaattaaattaaggctaagaaagaaatctatgtcctgatcatgcaaaaagaaaagaactaaattatattgtgctatgattcagaaaagtctgaatttttttcactgaagtagtacaaatcaatatcgatgtgaaactaatgaaagtacagtgaagttggcatatgtgagacaggcaaactggatacagagacagacaaaacagagagagagagagagagagagatttgggaaggaagtaaggagataagtcagaggaggcgtcaaagttgacgtgtgtgggtggattagcatcgttaatgtggtgttgtaattccaaaagataaactaatcacgcatggcatccatggccagctccgtcgctttaggcttttggaatcgatcagagcacagcagctatctcatcgattaagctaattaagctgcttgattgttagtaattttcttccaagtccacacatgccattatcatcctctcctctcctctatatataaggccaaagcccgacccgagctctcccgccattttcctcaaacgatatagctagctctactacacacttgctctgcccgatgatgatggcgcgagaggtgagcagcgaggaggaggctggcggcggcgacgagctccggcgagggccgtggacggtggaggaggacctgctcctcgtcaactacatcgccgcccatggcgagggccgctggaacgcgctcgcgcgctgcgccggtaagcagagcaattcttccttcttctccgatggatcgatggatggatagatgaattgagttggatggtgcatgcagggctgaagcggacggggaagagctgccggctgcggtggctgaactacctgaggccggacgtgaggagggggaacatgacggcggaggagcagctgctgatactggagctccatgggcggtgggggaatcggtggagcaagatcgcgcagcatctccccggccgcaccgacaacgagatcaagaactactggcgcacccgcgtccagaagcacgccaagcacctcaactgcgacgtcaactcccagcagttcaaggacctcatgcgctacctctggatgccccgcctcctcgaacgcatccaccgctcctcccaatcccaatcccacgacgccgacgacgccgacctctccgtctccgccgccaccagctgcatcacctccgacctcgtcgtcgacgcgcatcacccgccgctcgccatggccgacagcaacgactctgcagccatgtggcagcaacatcaagcaccacagatgagcgtcgccggcgcgccgccgccgacgacgacgatggcccaacatgtagtactgccgaccgcggcggcgtcgtgccaccagatgcaggatcagttcgtctgcgcgcgcgcggcggagacgacgacgtgctgctggtccgagtcggagtcgctgccgggtctcgcggggctgtactacgacgacgcggcggcggcgctgccggagtttgacgtggagaccatggccatgtggggccctgaggacgacccatggtacacgcaaatgcttggcttgtgaaaaccgttgaccaaatatgatgccttcctacctacacctacacatttgtgtggattaaagaagaaggagatgcttattatttggaggttaatttgatttgatttaacccccaataatctcgtctccagttcttaccacatatatcgtcaattctcaagtacagtacattagctacactttagtacagtagtagtattttggaacatgcatggagtaattacttaagctacacttggtagttttcctcctccatgatcatcaagtaaaagcatgcatgcatgatcatggatggagataaactacagtgctaattaaattagtctggatgtacggttaatcgatcgcttggtttttactatactgcctgaattactccattcttaatttctcgggacggatgaaacggattggtttaatttgtttgtaataatgtatatcaagctagctagctagcttaatttggtgatgatctggataccacaataagacttttggaactccttgtgatatgatggtgaggtgtgggactgattaagaaatctgtatctatgcatatgtgtataagcaaactcatggatcggtcactttcttgtctgatcaagatccagataattctatctcggctttcgttattacgtgtttttcaaactgataaatatatggttggtttggtttgtgacctaaataggccttaccaaattttgttggtgtcaaattttagcaagttttggcatgactaattttggtaaggcaaagttgtgtttggattgaagccaaaatagtctaagttcactattaaaatggcctattttcttaggcatgtcaaaatttggcttcaaaccaaatagacactaaacactattgaaattgacaaatattggtaagcctaatttaggcctcaaaccaaccagcccatagtgtcttttgtataaaagttttctatgtaaaaattactctaaaatattagacaaattaaaattttgaacttgtaataattacaacttaattaattaagtaataattgttttcaccatgtcttaactttatttttatctttagcagaaaagaaacacctcatcaatcaccaacaattccttcattactgtacaaacgaccagccaatataatattagtccattaatcagtagtgatatttgcaaacttgtttgtcctggtgacggtgccgattgtgacacatatctctcagagttgttaatttgcaattataaaatacaactgacttctaagtattcgaacattatattagttttgtttttcgttttaaacaaagactgcattaattaagcacgcgtacgtttgtgatgctacacttttctcagaggctaattgcatcaacctcatctagctagctttagcacttggtaacaagcagtgtcaagtgatgtaattgcagatgagagatcagcagggagcagcactaagaaccaacaggaaagggcacgttatgattagcaacagggaagaaatgttagctagtggggttaactgtgcaagctagctagcatgggtcgcttttagctagctagttagcatgggaaaagggacaaaaaaaggatgcattattacctgcatatattgctgcttcttacaaaattaatgcttttggttaatttctctgtcagctagcttagctggggaatcagaacattttaatgaggatgatatttccgaatcagaattaaaaatgagattaatttgtacgttatgggagtaatattccagctgaaagctaattaagcaagtaatactactagttgctagtgctggacgaaccgatcgatccatgagattcaggcgtcacctgaggaaagagagagagatatatatatgaaaaagtagttgctagcttgccgccacacatggatcatcgaattaattcgtgcgattagaatcattccgttcattccctcgcggtttgcgtggctagatagctgggcccaaattaatcgatcgacaatatgatcagctagctagtttgctccggccaataacagtaagtaatgattatatcggcggtcggcggcggcgccaattcaagcaagcttgttccttttcagatcatcgacgcagcatggtccaattatattagatgctgttaatttacagcagctgcgacactgatcgatggcgaagcgcattagccgactatacgtacataagtaatagtgtacgtctccaaattaatcatcttctgttctgatatactccttccttccctaaattttaacgccgttgactttttaaaatatatttaaccgttcgtcttattaaaaaaaatttgtgaaatgtgtaaaactatatgtatacgaaaaagtatatttaacaataaattaaatgatagaaaaagaattaataattacttaaattttttgaataagacgaacggtcaaacttttttaaaaagtcaacggcgtcaaatattttaagattgagggagtatatagtttttagcctcctaaggagggtggctaatataattagtccatctacagttaattaagtcattttaaaaatactctttaatatattagaagaaaacataattttagttagacagcacaaacaaccaaaagactattaccggggcaaggaaaaagcaacaaaagaaacccacaaaagttgctaaggggaatctaaaagctaaaaactgctcttataggctatgggtggcggttgtgccccactaaatcccaaaagccacatcactcgcagttgactacaggcaaccttcctaaggataaactccaaaaccactgaaaccgatgagagagatagtcgaacactctggagttccgctactttcacagttaccagaataccgacaggattaacaaatcgaagccctagaggtcggccaccacacctggagcaagcagccacggggagatgcaaggtctggcaagccaggaggagacataaaatggtgcgagacctaacaggtgaacacatagacgagaaaaatgtggttcaccgtttcaatctcttgggtgcaaaaagggcaggccgagtgactgtcaatgccacgctttttgtagaagatcgatcatccaactgcggtactggaacacaagcacaagccataggaagaatttgcatttagcggggcctttagcccgccaaagcagataagagcagagggtcgctagccaaggaagaaagcatggtaaacggagcgagccaaataacgctggtcgcttgtccaacgccagataagacggttcaccgtactcgaagagaggtggatagaaaataccgtatcccgaaccgccaggaattaagtcgatcgatcggcttgttagaagcaacagcgacatccacaatgccagtatatgtatcgtgcatacaagtagctagctagcttgattgcagatgctgatcgagatgcagatacatatccacaaatagctaccgcatctttcttaattactgtcattctaactctatcgataatgatcgatcgagctagatctcaactaaattggcaagaaattaagaggaagaataaaccggccatgctttctacatacgtgatccttatgtatcgcctactatatagcgctaatggactagtatttttttagtttatttaagagaattttaagtcatatgcatgcatcttaattgaagctggcttgtaggtagatttgaggcaaatccccggccgatcaaaacgcacaactaactacctttaattgactagtgactagctagtgtttccctgccatacatttcgcaatcatctgtctatgtatctctgaattaaactgtacctttggtcatcaatcatcatatgcatgtgtcgtcgtttcagactttcttcagtaattaaccggccggcttaattgccccatggaatatattggccacgaattgcatgcaggtgacaaaagtgcatctgcaagtcaatcaaaagcaacgagacgacttgaaaagtgcagagctgaaggcgaaagagcaaaagtccaatgcatctcatccaatctcatcctctaatcgaatcgagacacacaagttgtagcgctgttgatgtactgcttcgatcttgcacggaacacacactgctggctatgtacgcctttttctttcaatcattcaatttatctcatattcctcaacgcgcatgcatatttgtcccatttcgatcgaccattcgagcatgtgtcgtgcttacctcaaattgtctttcctcgataaactcctttcaagcagctgcatgattgatgcatttatatatattgcatccaccaaattcttgcaattatatatattcgcaagatatgttactacagcataaggaatatgcgtgtacatatatcctcaccaatcatatcttcagttatacattaccatttttctttcgggaaatgaagggatatatatgcatggttctcctgagaagatgcaaacaaccacagataatgcatgtacacatcttatccaattccaaacgaaagaaattataataaacttgcatgtgcatgcataacctgagcctaactatgttgggaacaagtagttgtcgatcaatatacaggaacgtgtcgtttgagaatattggcatatgcaacttgcatgcatctctctgcccatgccatatgaaagtctcctttggaactcaccagttcagttcgagccatgaattgtcaaaatggcatgcacttgaatcaagcaagatcgatcgaattgaagcacgaggtgaacgacgagcttagctttcggtttggttagcttccatcaacccagtgttgttgaaggtgacacttaaaaaattcagatacacacttagaatttacatacattaatatcgaccacgtcggtaaattaaacaaacatgattgaggctgtatatttttgtgtgcctactatatttgcttcaattgacttcgatcgcttcaattgacttggatcgagagagatgcaggtttactgattacggtcgtacaaactcagatatcttggatagcgattgatggaagccaacacgtagtgtatgaacggaattgatggtttttgagcgaaacgtatcgctcctaacaagtcataagttgatcatatcttgcttagccatgaggttggcaacttgccatgatgcatgcaacacgaaccaaaactagattgtgccactagcctctgctgacgacaattgtgcaggtaagtacagtaccctgatatggttgtgttggtcttggactcttggtagtagtagagatgagagtatctcaggtcttttcatccactgtttagtctcacactgtttacagcgagaaaatcttgccccaaaaaacagtcatgccttcattctcttttcaccggacaagggaaattaagatcaaattcctgctcaaacattcacaaaaatttcattagtatataatacataaattgtagtaatgttataaattcggcagagtgacggtttggcatgacaccaacgaaccagatggttacatcttacaggaaggaagcattacaagtcattcgctttcatttgggctggccgatggctctgttggctgcgcagcatcttcagatgccgtctccacggtctctgcagagtcatttgaagttggtaaatttgggtcatcatcacttacttcctcgtcccagtaaccctccagcaacttcatgactaacttgtaaatggcatcattgtcgacttcctgcagatcttccagtttatccaaacccccacattctaaaataaactgtgcatacgggttcaccgtggaaccctgcccctgcttccccactgcacccgcctgaagtatgttttgaagaccttccaggcacgcatatactaggtcagcatcttggtaagtgagaacattgcagagtggctccaaacatcctcgactcaccaaatatctgtggccaaatagagaataatcattgcagagcaccaggttcaatttcattgacacaaaaaaaatacattaaacatacatttgaatgtaaaagaataccaagacaattcctggctagaacttactgaatttgatcatttgaaccaccagacgcagcatttgatatagcccaagcagcttcctccttgatatccttctcggaggtctttaataggaaaatgagagggcttataacatctgcatcaattactgcctgttggaagaattatggtcaaaacatagtagtacaatcacttaatgtagggcatggaagatgatgcagcaaaaatagacatggacattatccttgctgagaaagcacaaaagtcagaaaacacttctacctgaatattatccttgctgccagtggagatattagaaacaattagacaagcttgcttcttgatgctctttgggtaatttcgtgctagcaacggggccaaataattaagaatgtcattttctactaggacctgcaaaaaattgcctcgtaggctcaacattaattccagaagataaggagaaaaacatagcagaatataagaactatcagtcaagtattagaacaagtacagaagtatacaaagtatatttacattgtcatttctacaatgtatactatcctggaagataatagtatacattggcatttctatgatggaggaatacacatatgaacaaagagaacacacgatggcacaaggtgaccacaatatgagtttcaggtcataaaaagattccgagctttactgcaaacttccagccactccacatatgtcttctagtctaattgttgcacatcattgctaatccatagtggtaaaacaaagaacagcgacaggtaaaaacaatatgatgagtaaacaacctgcacttgagcatcatctccagaagagattctcgcaagtaccgtaatgacaggaagcaggatattagctgatgcatgcctaaaatcatgaaacaagttaaagtgttgtaacaaagaatatttggaagttttccatacgcaaaactgtagtacaaagagaacccagaaacttacatcaaaagatttacaagttgagggcaagcacccgcatctagcacatgttgaattccgtcagatacaccgtcacatatataacaaagagcccagcatgcatcacccagtatcttttcgtcgactgaatgaataagctggctgattatatccagtattggcttcacctgcaacaatcagcaatgacagctcaaattatattccttttaaatttaatactacacacgcagtagtcattcagcaacctacttgcacttcagctggtaattttccaaaacaaaggtttgacaacgcccaagtggcagtcctcagaactggaactttcatgccttctctaaattgggcaagtaatggtgtcacagcaccatgatcaaggacgatctctctgcaggtaggcacgtctgcagctatatttccaagagcccagatagccttttaactcataagaagccagaaccaacaatatcagtaaccaaaccattacaaaaacaagtagcatagagtaccaatctttacctgatgcctgatattagcatttgcagattctaagagctcgaccaaccttggaacagcaccacattctgcaactagcaatgtatagtcagatgcagctatgttggtaagaacccatgccgcctccatctgcaaaacagtacatgcagaataagaacatttacaaatggaaaatccggaaaggggagacagaagaagagaaaaatagactaaacatacttgtagctgaggatgctcatgtcttgagaggaaatcagaaaaccttggcaggacatctgctctgatgatttttatcacggttgggttcttctctacagagagaacaatgatgataagggggatattaatgaataaaaagagcaaaacaatatcgcatattaaacatgtgaaataccatctgaaaggagtctcctgaattggatcgtggcttctaactgactagtggtatcatctgaccagaccttctccaccatttctgataggccttcaagctagctggatagaaaagacagaatgagggaatttgaaaggaaacggaagaagagcacttcacaatgagtttgtgaaaccaatggaagcatttcattgtcctagcaatgtcacaaaccaaagcttttctttagacttcacaaaccaaagtatcgtggtaaacaattggaatgcaattgcagtttcgcacaccataagaggaacgcgacatgggttatttatgtttcaaataacgcagcagtatacaaacttagcctacatctatctacttctagtgagtgtattcagccaatgacagcagtgactagtgagagtgagaggcctttttccttgaatttcgttttgcagattgcctacaatacatgaccagaactcaaacatacggtgggaaattgcaggtttctttacatagaatgagaaatttgactagctctagtatatgtgccagaagcgagaacagtcagatactccgaaagtagagttaaaaccctagagtaagcacgcacctcagagtcggcggcagtcggaggaacggattcggcgggaggtgaggacgggggcgaagagggtgcagaggaagggggagaggtggcggtggtggtggtgggcacatcatcggcctgagatgagggggtcgcggccctcgcgggcgggatgggagtgggagtgggttcgtctcggcggcgcttgaagaggccggcatcgcggttgctgcggcggacggcgaggaggcggtcctcgcggcggcggcgcgagcgggcgacgtcgacgccgggcttgtaggcggcgaggcgcgcgtcctccgacggccgcggaggtggggctcgcggcattgcggcggccggcggggtcgggcttgagtcgagcctgcctggctggtcaacccggtcggtttggaacggaagttggggcataaatccgggccgttgattctaagggggtgtttggtaactctgtgataaggacttatatttttatgaggggaaataaagtttagccccactttaatctctccaatcaaacaccaccttgtgtagtccaacggtccgggttcgactcccggcaaacgcaaatttatgccttttgggccaatggcacatcggcccatcccatcaagggaaatgtcttggcccaataattgttttgcgcgtgtactatctggagtattttaaatgaatatgacatatcatgcatttaagggttaattggatccatgccactgcaattttgccatattagaaaattgccggtactatttgcgaaatctgctgagtgccactggaattttgtaaaattggatccatgccaccgccgtcgcattttccatccatcgccgtcactccagtgtgggacccacacgttagctccatcctcttcctccatcccctctcttctcccttccccgtctctcttcggcaaacagcagcagcatgtggtcggcaaacagcagcagcaggtggccggcagcagcatcgatcaacctccaacgcccttcatagttgtctgcaccaaacactcgtgctccgcagctctttgcccaacaccaaaaattaaatctcaccgccgccaagaaatccaggtccaatctcttatttgctttgatgatttgcaatcacgtggatgttctttgctaatcgtacgatcattgactctgctgttcgagttggcccacgacgacgacagccaccacggcgacgacgaccacgatgatgacgagggtggcgctgcaagaaagaagcacctcctgaggcagcgacgaagaggccgtcgaccagctggtggtggccaccacgccggcaagccagctgcagatggactacaccatggaccagctttggaacgacatcgcggcggtggaagctgacacaagctacgacgcggcggcgacggtgatggcctcgccgtcatcgccggtctgggaattccgcggcggcgttcgtggcccttgccgccgtcgtcggccgactgctgccgttgccgccgccggccacctgctgctgttgtttgccggagagagatgggaaagggagaagagaggggatggaggaatagggtggagctgacgtgtgggtcccacactggagtgacggcgatggatggaaaatgcgacggcggtggcatggatccaattttacaaagttccagtggcactcagcagatttcgcaaatagtaccggcaattttctaatatggcaaaattctagtggcatggatccaattaaccctttttaaaactcaatatataagcaatgtcaaatcattatttccacatcattttcacattatttaatcatatacgtttatcatttctataactagatgaatatcccgccgcgttgctgtaaaaaattaagttacataatatgtataaataagatgtaatttgattataaaaacaaaacaatttgatacaattttaagactaaaaataattgagattgcatgtttttaagagagaagaaataagagataatttggaccgtagatctatcatccaaaggttagaaataattggagtgatgtggcttaatgggagaagagagaaatagcattaactacacttagtggggatgaactatataagtatataggatgtataatatgtatttatccacatattccgcggcaaagcacgaggtattaactagtaatttaaaacggtaaagctctgatatttagatttagcataaagtgtgggcccatatgctaacttagccgattgaactacgtcaacgagccacatctgcgaaaaactatcctcaaaactcattttgcactggtttaaaatatctagtattgcggttaactgacacgaattaggccttgtttagctgataaaattttttgcccagcgtgtcatatcggatatacggacacacatttgaagtattaaaacatagtctaataacaaaataaattatagattccgctagaaaactacgagactaatttattaagcctaattaatccgtcattagcaaatgtttaatgtagtaccacattgtcaaatcatggcgtaattaggcttaaaagattcgtttcgcaatttacacgcaatctgtgcaattagttttttcacctatatttaatactccatgcgtgtgtccaatattcgatattcgatgtgatagataaaaaatttttgttttggaaactacattcgatgtgacatggccttagattgaagctacattttgagggagttaaagtgaacatattccgcgtaaaaagccttgggctgggcgctcacagaaccttctggaaggccgggccgaaccaacgcaacgcggtccccacagcccacacgcacacctcacttggtgctggtggtataaacccaaaccaccgcgtctctcccgtagaaaaccccgcgattaaggaacgaaaccttctccgccaccgccgcggacatcaccgccggcgaccacctcacctcgccgccgcccccgcaccctccgatcctcctcccctgatcgcctatggcttcggcgagggccactgacccgctcgcctcgcgcgatcccccaaccttgccctcgtaccttcctccgcctcctcctcctcccttgccctcgccatcgccccaccaccgtctcctccccgctcccatggccccgatcctcctgcacctccaccccgccttcctcgcccaaatggactcccgccggaccacctccctcctccaggttgctacatctatcaccatgctttcttgctcctgcttccgctgtttattttttttcccaccaattttgggtcactaactcgctcttgttgttggattagtttttgaaggacgaggggggcatcccgtcgccggaggcggacaagaagagggagcaggtcatccgcaagctcaacaaggtaataaagcttcaatattgcggtgcgcgccgcgatcgaatctctatctcatccgcgctgctcttcacagattgtgatggactgggccaaggtggtggcgtacgagcagagggtgcccccaaggcgagcaaccgctaccgttttgacctatggatcatacacgttaggggtaagcaaccaacacacaaaatatctgaatgattctttccaattgttgcttccgatatattgtgtgatatgttcccgacccatgctgctacagattagtacactatacttattttttgtgttgtcttcacaaaatcaccacacacattaccaattataagcacaactatattccacagagaggcagtttactaagcgcttaattgttactgggatagtgcaggatgttctaaggaatatatgcccaaccaactttgctgcattgttagttgtgtggtgtctggtgtatgtatcactgtaaagtgcactgccttgtcacctttctgttttcattaccttctattctaatatacttgtctcctattattgagccgggctggcctaagataggcggaccaaatttacttaagaaaggggtatgtacatatttacaaggttccaacttcgacaagaggctgtcgaagtaaaaggatgttgtcacaagggcaacttcccgaaagaaaaaacaattacatcatgctgttgttactctcctaaaactttgaaaaccccggcttctttccagaccacaacctcctctttaatcaaagcaaagaggctacccgctgtccggctctgactctggaaaacacgtgcgtttctctccttccaaaccatccaacagacaagcaaaactagcgtgtcaaaagcgcccctgcagctagtctgaactccttgccatgccaagagccaccattcccctagttccaaccctgcttcagccggcagttggacgccaattccagcccaacccttaatcatcctccatactctggtggcagtctcctattattgcaaaaacacatccatggcaatgaatgaatttccccctttgctcatctaggaaccaacttgcgcgtgttttaagaaaactcttgttggtaatggagcatcaggtggttgcaaaataggcactcaatgtgcatcaaaagttcacacttttcattttaaggggggatcatataattatctggcataagaaaattaaatagtagttgccatgactcatggacaggatcagaaagccaagaatgctcatcttattaggctgcaaaaagcatgtgcattatgcagtcattatgtagtcaataactcaatgtgcgcattatgtgtttaatattcttattcaagtcctgagggttaataacatatatgcatgtagattcaacactgagcaagttgacctaaacagtaatctaaattaaagctttgttaatcctttctttttttttcctcatgtgtatgaattaaagctttgtgtaagccttacaaattgaatcctgtagaacaaatgacaacttgtagaatataagatggcacaattccgcctggctttgacttattgagaagatttggctaacaattttctgtttctgaaggctcatggacctgaatctgacattgatgcactatgtgttggtccttgtattgcaacactgcaggtgggttttgttattattattttcagttctccttcaacctgagatcatggcagggtatttaacatgtgttgattttgcagtaccattttttcattgttctgaggcaaattcttgaagacaggccagaagtatcagaactgcagactgtcgaaagtgctaaggttccattgatgcgatttagattcagcggtatttctgttgattttacatatgctcagcttccagttatcgatgcatcagaggcaagtttattctgtaatcaatatgtagttacaagggtactcagttattgtactcgataaacaatctgaatttcatcgacttcctttatcctgcaggctataattacatctaatcctcatttgctccaaaaacttgattcgctgagttggagaagtttgtctggagttcgtgttaacgaacaaatcgtccagttagtaccaaacgcacaggttgatgactaatctaatttaagttaccagcagcccagcatcctcccttatattctcatttgctacattaagtcgcgtttagatacacttttctctgtattttcatatttgtcctgggtaccttccatgtacttatgttattgccttaagactgatctgtcactatgcagatttgttcatttttcttttcccatagaacacctcaaaatattttgtttcattttgtcagattccgcttttaacattttatctctgaaaatttgtgatgcagaagtttcaaattctgttgcggtgcatcaagctatgggctaagaggcgaggaattcactgccatgtatgtggtttaatatgctttaatggctgttattcagctatatgaccttcatatcttctttccgctctaactgttgtattttcacctatgatggtgttttttcagttgctcggcttcttcgctgggattcatttagcgattcttgcagcttatgtttgtcagagatatccatatggcaccatcaatggtctgttcaccatattctttgatatatttgctcactggaattggcaaattccagtaagcttgcatggtcaaccaactaattgcaggcgtcctgatgggtctttcatgcccatactgttgccttgtactccaccggagttttgcacatccaatatgacaaaaggcaccttcaagaaaattagagaagagcttatgcgtggttatgctttgaccaaggtcagcttagatccagttatgcttctctcatttcttgaacaataggagatttttagtgttgggtgataactgtgatgcatagttaaaaattgcaactcttttatataaccgaaaacaaatttccgacattcctatgtcatactcctgatctcttcgtgcatgccagtttgtcgatatgcttattcctgttctgatttcttcgttgaaccacaaatgatgcattcctccattcttgcatacgctcatggcttgcgatattagccattagtctgtactaacttgacacatggaacctatctcattttcgttattatgctttcggtaactcaaagagtgtcgactctttctcatattttgataggcatagctcattgataagcataggagcgacctcatctgtcgaaaaatggtcgaatctgtaactcagatttaaatctccgtgtacagttttcactgagtagtgattgttctcctctgcattattactagggtaatgtatatatcagtgcttgagtgcttggatgttatttgatcatgtcacagttactttgtttatccaatgcaggagccatggaggcatgattttgagtgggtctggctttttgcaccgtttccatatgctacaaaatacgaagaattccttcgaattgctctatgtgccccaacgtctgaagagctacgcgattgggctggttgggtgaagtcccgcttcaaccttatcctcaaggttatttcttggcttctgtcatgttccctttttttgttcctcaactgttctttactcattctttatcattgggaatgttgagcaagaatttacatgctatgttaacttcctcttttgttctgcagctggaaagtattggtgttgagtgtgacccagattccacagaggaagttgatcatacagtcttcgagccaagcattgtatgccactggggcctcatatataaaacaagcacccatattgatattagctcactgggagaagatttcatgaaggatgtcatcaatgatgtgtatggcaaggtgaaaggtacacattcaaagctgacaatgtccatcgttaggtcatcacagcttccgaaaagcttgtacagccactctgtgtacactccatacattcctcaatatatgctgggctaccagactccgaccgactacagtggcgcagctggctaggacttgtgtggatcatcgttatctgggacttgttgtgcgaccattggatcttacctgacgtttcatccattgtcggatatcctgaactggggctattcctactctctgttctgttgcacctatcacacacactatcagagcagatctggagatcagagtctgctccctttgagcttgcagttgcagtgtatatatactgaattcatgagaagtgtgaagtttccggctgctcgatctgacggctgcacaagtgaacatatggtagcgtgcggcagctagaaaaatgcagcaaaagcggtggcagtaaagtggtcgaggatattgtacgctgaacatccaaatgagttgcatttggactgaaaactggtgctggggtgcaggtcatgaatccaatggtgaatgcacagtggatttttcatggcagatctgaaatctgaaggatagtagattttcattagcatcatttgtggctgtgatactgctgatgtagggcctgttcactttgataaaaaaaaccttaccaaattttggcattaccaaaattttggggcctgttcactttgttgctattttcaaccttaccaaattttggtaaagttgtaaaaaaaaatggctacatttagtttgctgccaaatttttgtaactatattagaaatcctaccaaaattttggcataccaaaattggtatcaaagtgaacaggcccttagcaacttgctaaaattttggcaggatttcttatatagttatcaaaatttggcagcaaaataaatgtagccacttttttttggtaactttatcaaaatttggtaaggttgaaaatgacatcaaagtgaacaagcccgtataatcagaatacatctcctacgttcatttgtaacctgtagttgtaagggggaaaaagggttgtactactactacgaggcatcagagttgtcgctattggtttgttttgcacaaaaaaaacattgatgctatttttgttgagttaatcagtacatatatactagtactgtagtaaaatactgttgggtaaggactaatatagttgatccgatacagaaacacgattggcatgtgaagtgcaacgaaaagatggaatggcgttgcctcgttgttaagtctctcgtgggtcgtgtttgatttggcaagaggctgaggatgattgtgagcgtgccacatggaccagatggagctagatgatcgaaagggagagaagaatactcctactcctactagatgcaaacatttgggagtactacctcaaacgcacgtgacaaggcattagataagttaggtggacccgggccctcttaagcaatgcaatggatacaacgccacaaaaagctgagaaaaaaaaagagagatggatcgaccagcaaggccaggccaggctgacatacagctgagctagctaagctgcatatgcatatgcagtgtggtgattagcattatcagctaattaatgacaccacacttttttgattagttggttgatggagggagacatgacacgtgtgggtgtcatgcggacgcatccatccatccatctcgcgccaaaggctaccactacacgacagcagcaagtatagtgaggtttctatggtgcgcgcacacgtcagcgcagatctcttctgggccgtgcgatgcaaaaccgtccgtacgcaacgtgatactgtcatgtgggccccaccccacccctctcgacaggcaggccccggcgcccatgtgccgctgcctccgccgtcgcgtcgcgtcgtctagcgcagccgcagccgctgccgctgggccccacctccctgatcagccacgtgccgttcaatcctccccacatgcccccttccgctgtttaccaccaccatctcccccctcccttttccaaaccaaaattaaattgataattactcctactagtaatcaattaatctcaattcatttcaattttgcgaatagaacattttattgtcagaagaagcaaaagcatttctcaatcagt

SEQ ID NO: 9196 - DNA, 8055 bp, Oryza sativa
gcatattaacacattgatgactacatcgccaaccaactgaactactatcaagtatcatctggcacttaagatacaatattgttcacatccttcgatgccatttgatcaagtgatcattatctacaaaagaattaattgatcatctgtccaattctgaattactgattttcttctccaggggtgagaagaccttctgcagtcacgaatgctgctaccaagagatgttcctttttgtaacttgtcaattcaattagccaggataatttccaaatgtccgatcaacatgatctgcctcaagccctcttgcttttcttgttcttgtagagtgattgttgaccaattaggagctagtgttcagagttgagattaaaatcctcattgtgagatgcacatcaattctggttgtctgaaatgttgcagtttttatatgactgttatatcaatataagtaaagctgccaggatgttcatcagtttgtactgctcccacacaaatgcatgctggatacgaaaacggactggcaggtggcagcccccctctgtatacagtactacatacgaaacgggaaaaaagagaggggggtttttaaggataggaggactggtccctgacaggcagaggcctagcccatcttatcagatgggccgccaacctcctgaatcgtccttctcaatgcattgcatacaggctttgcagtatgcagctcaggaatctcgcaaatcttagactgaagaactaaaaacttagagtaaatttcacaaaactacaggtattttggtcaaattatcagaaaactacagatttaacatgatgtatcacaaaactacagatttaacactaattttatcacggaactacagatttaagataaaatatctcaaaactatagattttagtaacaaagatatcacaaaactacatgtttaatatcaattaatcataaaacttgaacattttcaactcaaacataatattagtgcaacgaatttaacccccaaaatatgtagttttgtgataattttattattaaatatgtagttttgtgataattagtcttaaacctgtagttttgtgataaatttgttgctaaatctgtagttttgtgatatatatccttaaatctgtagttttgtgataatttggtcaaagtatatgtagttttgtgaaatttattcaaaaacttaaaaagatttggccctgtagatacaagaaatgaagtaataaaaaggttagaaatgcaaggatactaaaaggtcattagctgaccatcggaatcccaacaagcaaaccatacagactatttatctgccgaaagttaacagacctgaataggctttgattgaacatatgggaatatggtcatcaactgccttgacaacgccacataccagtaaaccttccaccagcaaatcttccaaatccactgtcttatacaccattttagctgcaccgacaaagagaaatgaataaaaacatgcttcagcaatacgatgaacatgaatgccaaacactacaaaataagcatgcaggctgcacaagatctttcaataattaaagcttaaggttataacacaaactagcaagtgctaattagctacctgacatataacttgaggcaaaatcatcgattaccgcaacaccacaatgtagttcggatgctatttcgatgacaccttccgggttgccattaaaaaacagcacaaccagttgcttcatgaagtaatatactgctacccgataaaaatacggttgaactgtcaccaattgccttactgccagcttttgctgatttctccagtccagatttggttaaaacacatagctgtcatcttatgttatattgaatctgcaaatggacaaaccagacattataacaatagatagcaccgatgaaaaaaatttatatgtttgtccccaaagttgcctttgtgggtttgcatgtcacagcctagcgataagtgttagctcgtgattaaaagttccaggaaccaacattcatagctattgtagcaatatatggggataagaaagtttttttgccgatacatatatataggagatatcaggtcatatgtcttcagttacgatcataaatgatttacatgagctataaccacgattatctagttccgctagatctgtcccctgaacaatcttgcatagtttcttttggatctgctaaagtacaagcctgagaatcacagttagatgtatgatgtttacatgagaaaagtagcatagtgtccatatttcagaaggtttaaaagaatagtaccttgtcgctttgctaccttggtgtgtgtgccatggtctggttcagaaggtgcaaagtactgcatgcatcaagccgaggtgttcatgaaatctgtgttcaaccatccaccagcttagagccttagatccattaagagtagatcggaccttcaagcttgttggtatgtccatgtaggcaacacaagcaagaaagcatctagaagctcaagttttcgaaaaacttagttgttcttcaacttaagcacacttatcagcctttcagaaacatctctatcgagaatgataccattctccatcatatactcccatatctcataagccaacgtagctttcccttcatccagaagaccactgattatatacctaaatgtcaagttatctggttctaccccttttgtcctcatttccttaaaaaggtcaagggcctcaacggctcttgagctttttccaagccagtatattagtgtgttaaaagtaactgtatctggtgatacttctttctgagtcatctgccaaaatattttctgtgcatgtttgaaatgaccaaccttacataaattatgcagcataatattgtacacatttacattaggaacaattttggtgtttagcatctggtcaaaaagctcttcggctagatttgagtatcctatgccaaaaagaccattaatcagaatcccataagtcacagcatcagcttgaattcccttgtaacccatttccttgaataggttcagtgcagaatttaccttttttgccctgcaaaatgcatcgatgagtatgttgcaggatacaatatcgcagaacccaccaacttccatatgatcagaaacgaaagcaaatgctttgtccagttgatgagctttgcatagcccttttaacagtatattatagctgtacctgtcaggattcaccccactcatttccatctttctgatcaaattttcagctttatctgtcatacctatactacagtaatggtttagaaggatattgtacgtcacaacatctggttcacaaccatttctctgcatgaaggacacagttttgtaggctttctctatgctgccagctctccagaaaccacttattagggcattataaatcgaaacattaagttggatatccagagttagcatccttgatgctaattcaaaagcctcatcaaccttttgattcttgcacaaaccaaatatcaatgcaccacaagctacaacatcaggtttaagtcccctcctcaccatttcttcccagagcccaactgcttctgagaacctcctgtgatcgcataaacagctaacaactgttgtgtaggtgacgacatctgggccggttcctttcatggtcatcttctctaccatttgcaaagcatcatataacctattgtgaccacacaaatagtgaacgtatatgttacatgcccaaaaatctgggaagcacccaaatttatccatgtcagtcagaagctcctctacaagctcaatcctgtttgattgacacaatgcagtaatccaccttgagtaagtgaatggagttaaacaaaatccttttgcaagtgccatgttgtaatacttctcgaccaaatcaaagcaacagttcttaatcataacacctatgaacctgttgtaatcgacaccgaactcacgacaacctgatgtgaccatctcatcaaatgtttctatgacggaatcaaacttgccagctcgggcatagccagccaaaagtacccgatagagagagcgatgaaatgctaccccctggctccttactcttcccaggaactccgaaagcagggcgaaattgtcatctacaaacagcaagcttatgatgtacgctatggcaaaattgttatgataaaatccagggcgtgactctgcccaccagtaaaaccgaactgccatccccgagtccaacaagccacggagcaccttgttgacgacgaaaggatccagctcgacatggaggccctccagctccagctcaaccgactctgaccacctcccacactccagcgctcgcccaataataacgcaactggtctctgtgcgaactggccggaaaagctcagacaaccggcagtgagcccctggattggcattgtcgacgccggtgctgaacctcgctacctgcctcgatgaaacgatccaggaaacggtgtggagcacgcagagcctggtaatgagagacgacgacccagatggtcgtgtggccaagaacataacagattgacctcctcaggggagttgtgtcgaacaccttgccggcagtcaggcgctggctgcgggccaaggcagacgagctgactggacgcgaccacgccggttgtttcgctgggcggagctgaagacgaggaggatgcaggtggagaaggtaccggattgaagcggcaggcgaggtaggatgcgaggcgcaggtggtgggagcgcgcggatcggagcagagggaggagaagcgaggagctaggttagatagaggatggcgcgaccgagcggcaagcgcatggggaggaatggggcgggggggatggtgcggaagacggatggggatcgagcgggaggtcagccggcggcgagacggcggcggcggcggctggcgacgagacgacgagggggggggggtgagatggcaaggcaacggctccaccttcgagatgggctgtgctgtactgggcgttatctaggaggaagcccatgagagaaactacggcccatatggatggatcatagtgggccacatgttgacggcccatatagatcaaagcagccgcagaaaagcccaatgtacgccgaggagccggtggtcgcacccatctatccatggctcgcgaccaccgtggatggatatatggatggtctcaatcgggaataattagggtcgtttgctaattacacccttaattaactaattgggatttcccttaattattcttttgggctacaagcctacaatacaatacataatactaccaccagccaatcgcccaatcagtacgaattactgtttttttgttcttttcaagatgaaaacaacaagtgtagggagttcggagacaggattttttttttctaaacaaggcttaatgggatctcgaaaattaaatcgaagagggaaaaggagggagagggacgaaattttactctaccgatccaaatgatcggggtttgtcttttttttttaaacgagatttaggggttcggcgatgaaatatccgaccccttctacggccgaaatttcttgttttttagaacgatgcatgcacagcacagtgcggcgcgcgcgcatgagcttttgaacgattcatgcatgcacgcacatacgctcactggtctagggaaaaaaagaagcagctcacatcagatgagaatccagagaatcttagctactctagagattaaaaagaacagcaatatacaactaatatcctttttttaaaggaattactaaatatccttgaagattatcatggatatgcatgcacagcgcatgatgattcagaaagaaaaatgaaataaaatcagaaaggaaacaaagctaggcagtcaggattcgcgcgttgttgttgggtgaagcagagacagcagcaaagcgcgacgacacacgtttgtctaatccgattcctttgcccattactactagagtatttcattatactagtgctgctgaatctagacaaagtatactagtggtagtacatctatcagtgattcagtagtagtaatgcagtttcacttttaccccccgggataactagcaacgttagtttaccaacgaagatcatgctatactctctctctctctctttttctttttttggttacaaatcctgcatgttgaaacagtcatacagaagatcattacaatactgtataattaagaagagaagatccaagattgaatttgactaatagtaggaagaggaaccggcaacgattgcggcatgcatacagcttctagacaaattaagtggcttctctgaatctatgatgatcatgttcatccttgtccatctgcttgcttgggtggtcactggtcagacaagctaatttgctgccttttagtattacgactaatcaaaaagctactacagcagcctgcctactcacgcattttgcacctgatgttccattccacgatcgatctcttatactaagttgttggttttgattaattgtcagctctctcatcttcttgtgatcttgtctcactgtcggacttgaccacaacaacaatacaattatagcgatcgatcgagatgtgaccccttattttggtcagagcatctcctgtttcgttcttcgatatattcctgtctcctaatttcttgttcttctccaacccactaacactacgacttaaagattcatttgcatcatgtctagtgtgttttactggtcttggagtggcactaattgggttcgtttactgccagttgttgtggatggactgaagattttattacttctagggcatcaaactttcttctccgagtcaaagctaattctatctatcctcgttgagatctgttcaaattaagtggaatgttctatatatgcatcttaaagacttgtgtcaacgcatggtctcaattctcttaaactttattaccactgttaaaacttggaaaaatcatccaaggaaaccctaaattactactactgctactaatgtcagggttattgctcggtcactacggctgtcagtctgaattctgcatactactacacttgttgagctaactacccctccactgattatgctgctaaatcatctcaaagtcaatcaatttcttctagaagatgatgctccttgtaatacgtccttgtctgcaaggacctcgcattgaaactagcaaccccctgcaacaactcatttcttggcataccaaataaacaaacacatcctgaaacgaactcatttcagtgtcgtttttatgccatcactcacctaacctagctcgcacatcaaacgaggactgcaaagtcaaggccctgtcctgaattgctgtactaaattcaagaaagcgccaagcaaaccatttctcagccatatacaagtctcatatatcatgcaaccagcagcattatttgtctttgtgaaaatgaaaaaaagggaaaaaggtcctggcttgcatcatcatcacttaaattttgactcgagaaaggaagtttgaatattgcaatagctttgcaatttgcattcgactgcactgcactttgttggctgccttcttttttctctgaattcagttttgtcatcagtgatcagctagcctagtcaccaaatcgagtgtttgcgtcggagtggtgcttgtggcctagtatttaactgtacgctggacatgacccttatctacgcatttgaacattgaagggtctaaagattttttaaagcaatttcagtcaaagacgcttcaacttggaagcagaccagtgttactaaaattccatcgcccatcatttccatgccgcggtaatggcgctactcagatatttggaggagcaagttgttacctcattgccattgaaattttgtgtctgattaacaattaatcaaactgcaactaacttgactagtgtcttcatctgctgaccaatacagtacaaacttggttcctgctgggatgatacatttcacttgtagtatttcagtgaaaccatcaattgtaaccctgaaactgctgcttttttcagatagaaaacagtattggtcagcacctgaagcactaagctgcttaaggtttacaaacattgacaaccaaaaaaaaaaaaagctgctgctttt

SEQ ID NO: 9197 - DNA, 51003 bp, Oryza sativa
  unsure (1)..(51003): unsure at all n locations
cttcagaaggctagtttcataataaaaactactacctctgtgccataatacaactacttttgccatttcttgaggggattaaggttgaagagagaaatggttgtgattggttgagatgagggagtaggtgaagaaattaaaattgggatggttgtgattggttgaggtggggaagtaggcgactaggcggagaagtagtagtattttgggacaaatgtcaaatgccaaaggtagttgtaacattggatgaagggagtaccaagttcaaatcatagaaagtatcaatatacagccaattcataacagctcaaaagcctcttaaattttggccagtagacacggtatggatcaaaggattcatccactgaattaatgccaaggattatgtagcatttcaatatattagcacaactcatacatatatgagcacacaagtatgcagatgcacgtggttatgacagaatgatggagatgaaggctacaacattcagaaaatggtgatgagttgttcctctcaaaccgctcctctcttctttgaagacataatttccatttgctgaaatatatacaaatattgccatcacagcaatatgaaaatatgcgtaaaactaaatccttgattatttaaggtagcttgtttcatacaagcatatgataaaaaggaaacatcgttttctaaaaaaataaaaaataaatttcatgatatataatctacacagcagaagcaactggaactaaacgacagactaacctcaaaaaatgtatttccgccgcttcttattacttggacaagataaccctcttcattgccttcttcattcaatcttacagaaccaacaacaatactgtcatcgcgcacccacccaatcgaatccactgataaaaagaaaacattaataacaaatcaaaatgatcacctacttaacacagtccaatgcatttgactgtgtgcctgcaatgatggcaatagaataataaaaaaatgaataagatgaccttgaggaaaagagcataaacttcatagagcatggaacaaatcttgaaacccatgttcaccccattagtcatttttattctataagtggcgatcatatttgtgggttgtgtttttctcacatatttttggaaaataagaaacgggtatgtttagcatgtctgtgtactgtgacgctaagagtaacaaaccatgtgctgctcatgaagtttaggcctgagtaacaagcttacttgtttcatttaccacagaatagaaaacaattttacgagttttacgcactaggacgtagtgagccaatcaatatgtcctagtgtgtaatagtgctaatagtgctaccaaattaagcctggtgatgattgtatctgttctaatagtgctaccataaaccatttcgtttaaaaatgtgtgaataataataactgcgaagaacttggagcaattcaataattcatcctgtaactggggaatggagatacaggccacaaaagaaaaactgaatggtgcttacctttgatgctagcatcatctgaatcactatcatcagaccatagctggaacaagaggggcatgcaacatatttccttaaaatctgatgataatatgttaagtgtattcttttttgaaagaacaatgtgagtcccttccttgcagcagtcaactgtatacatttcaaaacgatgggagaattcagttcagaaactagtatggtggtgatggttaacttcaattacaacaatgaatcattgatcaagaaatatgctatgctagcacataatggccaaggagtgtgctaatgactaaaggcaggaatgcgccaaagataagtactcaatatggcatcatcctttttatacagcccacaacaaaaatcaatctagtttgtctagctgtcttctgtaaagactaagcattatagaaaaaagatgactcatagaaacaaagatctgtcgaatgaacttgcaatacccacagagagatatatgttgcaaatgaacgatgttcttgtaattttcattcacaataatataggctatagcatcaataaattaatggttcttaccatctatgatccaaatatataccatttacaaaccaatgcatgtttaacaactgtacagatgcatttctaaaacaaaactacaaaaaggatcctagaacatgatctcctatccaaaacagtaacacgacgaaataaggttttcaagtattgaacttcacaacagccaataacaaataaaatttactttataaggtgtgaatattgaatatttgaaatatattggtgtatgctatatctcacatctgcttcaagaaagtttcactggaatttgtaacagttagtcattgcataacattgtgcctcaaatttattaggaatagaagaagccacaaaccagcatcaacattttccattatgtccttcagaccttcccccagacttccttgagacagcaacccgtctttcgagagtacaataaaggctttggaagcatgatttagccacttgaaatctttcacagtgctggatccttccaaggtacatgatgacagtggttccacatcctatgtagcataattgtgaatagcatgagtagaagatacatgagcaaaattactagatgtataagagatccacgaggtcaaagtgcaaatagacatgggatactgaaaacattcactgactataggtcattatcgcataaacatttctgtcagatattgttatgtaaaatgcagctcagtaggatatatattaaaaaaaacaattctccggttctaataagttgtgctggccctgtggttgaaatttatcatcgacatgagggaaggagatgagataaccttgtctgtgagcagggaagaagccgagaagaagtggatcacactgcctgcgcaggcagcaagcaccgattcatcacgggagagttcgaggagagagaccccggggagagggatgtccgcgacgcagcagtcccgtgcgcagcgggtggtcgacttgcccttctcgcgcgcctccttgctggcctcgatcaacgccttggtcgtcgcagccataaaccctggaaacacgaggggaaacccgaagcggtgagatcgagatgggaatgccctggtccgtcgcgacttctccgtggcttaccgttggggtgggcaaggaagaccgcggcccggcggttggagacggcgagcgggcgcgagggaggcgactggaggtcgaagagcgggagcggcgaggaggtggtagggaggagggggatggggtcgccggcgaggcggaagacgaagtcggtggtgccgtcctcctcgccctcgacctcgtcggagaggtccagctcccgcggcggcgccatggccccccaccggtggtcggaggagcctagggttttgggcgggaagcgggacggagacggcgcggcggcgagggagcaatagcaaatggggtttcgtgaagcgagagcgctagtagcggaggccttggcgtggagtgtaagcagagcccagcagcgtggccggcgggcgggcgcacgcggcggaggggagagggagaggcggaggcggccgcttcgcttgccggcggtgatggtggtggcgctgaatacatgggctcttgtcgttgccccgtgggcttaattgggccttctactgggccgtcacatatattaatttggacttctttttattgggcttgaccttgacggtgagtaagaacagaaggcgcatgannnnnnnnnnnnnnnnnnnnaggcgagaaaattccggcgatgtcgcgacggtgacacggcgaccgaacacaaagatatcgccggcaaactcacgcaagcaccgcgcgaccgacgaacggcaggcggaaccgcgcgaacagtcgctgcttccttttcgtctccacctagcgacgtggagcaacgccatacacacgctcccatccgcacgcgcatttccagccttactactctctcgcaccatcgtcttccatccgcccatctacctccctcctccgtccaccctaactacggcgggtcgccggccatgctcgcgttcgcggtcatcgtctcgccttccgcgtggccgagagccgtctcctcagctttcgcggcggccgtcttcgcgttcctggacgtcgtcgacgtgctcctctgcttcgtgtacggcttcctcgacgccgtcttcgaggacagcccggtcagctgctactgccacgggagccacagcgcggcggcgctggacgacgacgacgaggtctccgacacattgtaccaccggcggagcgctctccgagacgcgctgatggggctcgtcagaggcaggagcggcggctcgccggagacggagacggagcggcgcaaggggcggagcccgaggtggtcggactgcggctgcgattcgtgccgcgcatggcagcgccacgacgacggccggctgcacttcgtcgccaaccaaccgccgccgccgccaaacggtctcaaccgcttccgttatttctgttacaatcctttcgctttgccgtgtcggcgacattaacgttcgcgagcttagcttttgcagatggagcagtgacaacgacgcagcagagtggagaagaagacgccatcttcatccacggcttcacctcgtcatcgtcgttctgggcaacagtgttccgcgaatcatccatcctcaacaactgcagaatgttggcggtcgatctcctcggcttcggcaagtctcccaagccggcaaactgcatgtacagactgaaagatcacgtcgagatgatcgagcggagcctcatcgatccactcaacctgagctccttccatcttgtcagccactccatgggctgcatcatcgccctcgcattggctgccaagcacccagaacgagtcagatcaatcacactgattgcaccggtaagtacagtacatatatatctgaagaagaatcagtgagagctctgaatttaattaaggaaatatcgatccgttgctttggttgtagccgtacttcggagcatgcgaagagaaggcgagccaagtggcactgaagagactggcggagaagaagctgtggccgccattgcagttcggatccgcagtgatgtcatggtacgagcacattgggaggactgtctgcttcttggtctgcaaaaatcacctgctctgggagcgcctcttcaggctcatcacaggaaagaggtaatcacatactaggattaattcagagttcagaaaacaaagctccttttaactaagattgattttaaacaaaaaaaaatgttgttgcatgctgcagggatgtggactttctgctgggtgatctgacgaagcacacgcaccactcggcgtggcacacgatgcacaacgtcatctgcggtggggccatgctgcaggacaggaacctggaggccgtcgaggcggccggcgtcccggtgcaggtgatccacggcggcgacgatcaggtggttccggcggagtgcggccgccacctcaaggccaagcttcccggcgccgagctccgactcatggaaggctgcgaccacaagacggtggttttcggcagggagaggggatttgctgaggagctcagagcattctggtccgcgtctcatcagaataagcagctagcagcatctgcatcagggtgggcaggttaacggatgttgattgttggtgtgtagaataatgtctgatatgaaatcatgatgtagcatagagaaattcagtccacactttgaaattactggtactacaatttttagagattaaagactagggtgaatccatcgacacgtttctttcgtcagaacagtgtccgtatattggaaaatccttttctagctcgtggattggcagattaatctttgaatttgcaaaggggacttgactgtttcagatataagcactcactcttgttttcatattataaatcataatataagtcggttttattttttttctattcaaattttatttaagtttaaccaagtttatagaaacaataccaaatgatttaatatttttttgatagtatatttgttttgtgttaaaaagaagttactatatctttctacaaatttagacaaacctaataaaaattgactagaaaaaaaagtaaaacaaattataatatgaaactgagggagttgatactatcgacgacatgaagtttggcctgacaaatgttcatacccccatgtggctgttaactgggagatatagattcctttcccgattgatcaaagcgcacagaaattaagtcgtgcatatagttcagctacatttattctccgatcgctttcatagcttttccttttctcatcgatcgagctgattgctgcttcgcgtacgcgcctagaaatacagcacgccccgtcgacccggggggttgcagatcgatcggaagctcaaacgcacgctagctactgcaggcacaccaagctgacgaacgacaacatgagcaccaccggaagggctctcctcgtcgctctcgccgccgttcttctcgtcaccggcgacgcactcctcgctcccgccggtggccaggagcagtacaccaaggcgccggcggaagcgcacaaaggctacagcatcgtgcctggtgagcatgcaattgaatccatcctagctatactcaaactcccaatgttatcaacttatcatgtgatgatgatcgtcatcgtatatcgtatatactgggccacgagaaatattgcataatgggcccttacagatcgcattacgggggcaggatgtcaaggcccatgaccacgagaaatttagcatactgggccgttgcagacctagctggtagcccatgccaagaaatcagtcctcgttagttttgtaccacatcgcctaccagagaggatagggagagcacccagggtataagaagaggggttcagcttcgtaccaactcatacctttctcggccttttggctaagatcaagtgtagtatctgttcttatcagtttaatatctgatatgtgggccatgtgcccacttcgatattaaatttattttttatgggggagggtccaccatagtggcttgccactggggccctcgcgtgtcgcccaggcgttgcactgcagcctgggcctggcgcaccccaaccaagtctcaacttaaatttttaattttgtttacaaaatctaatctaagttttaaatttatttttaccaaagctcaatcgaagttttaaatatttttacttcattatttcttcatgctcattcaggcttggtttcagcccaggaatgcaactattttgaatcgacccaaattccttcaattcgtaaattcctgcatcaatatgatcccttaggaattcgatttgtatttctcatcactgtacatatgatggctgtatgaataatctgacagcctgaatatgaactaggttcagtgatactagagatcgcttggatgagttgggtggccgacaagtgttatcctccaacctgtcgccgttactgttcagagaggataataacaaacgagtactattgtagcatagtcacccagattcctagcgtttatacgtactacagaacgtataatatccggcctgttgcttccctcaacagagaacatgaaaggcacatgatagttcagcgttgctgataaaaagagcacgaagattgaaggacacgacgtaacataggcaagcacaactggttcaatacttacttcagattgttagatttgcctttccatgccatgatgtagtactaggccatcacttcctttaaaaagttcagaacttaacctctgctaaagagaagaaagggaagacagataagttcagcaatcagcattcctgttgctagatactagtagagtacaaaactgcatgcatacaatttcatgattaccatatctaagtctggtaactgttcaagacttgaagtgtttatcattccttttgctaccaacaaagagaatttgaggccgtcttgcgatatgtacgattggtacgtactcggtactctctctgaatgttgagcaagcaatgagcacacacacacacgatgacacgagacatctgaaaattggcacttcgagacttgtacagtagcagtaacagtagtagtaccaatccgatgttgagatggattgggtgcaaacgcatgcaggaaccaaatgaggccccaacacctgtatcatatccacgatctccatctccatccatgttccccagtactgcaaatattgcgccagccactgtatgatatacatgcagggggatctatctatatccacagtgttgagagcacccaccaatcgcaggcacgagacgtgtaatcctgtcgagccaagggaccacccacgagcggcagatcagagaatttcactattgcagcggctccatctccatactgcagtcgatcgatcgatcgccgactcgccgtcgccgtcgatgttgctgtcagccgccgaccggcaggcagccgctctcgatccctctctgagaaagtcgagtctgaatttcttcgctggccacacttggcgcgcagctgcgtgcgtcgtactcgctcactgtcctctcctctcctcgcgttgatgccgtgtcctacatactgctagctatcaaaagcagcctcctccattatttttgtgtagctgaaggtggagagaacgttccttcttgaggccttttgttttgttttggccacgagttttccatgcgtttgtcaacttgtcctcccctatttattcctgcagaattcgacgtgtgaggtttttggtcgggagttactactagccaccagtatttcttcactctgaaaatagtaggagtattttttttctagtatatcttcttcttcagattcagcaaaacggctaaggaattcctttcggttggtttcttcaattgactatactttttagttatgaggttactgtcagtttctttgagtctcatctgaagactggaagggtttcagataaaataaacagccatccccatatgttttaaaacagctgtatattagttctactttaatgagtgattattccgcttttgttcttcctcctaccgatttcataattaaacattgaccaaaagtagaggattattggtgaaccataccatgggaatgttaaattatctctagtcacactagccatttttttaatcctgtaaacggctgaaggcatatgttaatcacaaaccaaatcgtgtacataaaaaaattgcaaggacctattttttaagagtcagattaggtagatctcaagaatgatttggagccgacagggcccagatttggtggcatcagcatggtagcttatactcctaaatccatagctcacaactggctcgaatgttcatcggagaggcatcttaattcattcagttataagtgttccctcccctgtttcaaccatagcatctgattaaaaatcttcagacatttttaagcccatttcgagacaattaagccactaaaatcagttatgctacatttccaaaaaaaaaaaagaacctcagttaccttgagccgagtgcaccatgtgctgtattgccgtgtccgtcaggtaaacagtccttatcatgactcaacagttcatagctcctacatgaccatgatatgctcatcgaggattacgagcatgtgagtgaggggtcaccgaatgaatcaaagaaaaagggacaagatgatggatcgatggatgtatcgccaccagcaccggcaccaagctgcagcagatcgagtaaagcacaagattgttttttttttttaattttaacgcaaggaaagactgttgaaagagcctttgtgctcatgaaagggcaacatcacttttctagataagggaaagacaccttttattataaaaaaatattgcaaaaaaatgtttttttatttttaaaaaaggatctttgagctgctggacgagcaaatttgaccttgttcatggagagaaaccgtgcgtatgcatgtcttggcttaatttgcatttcgtgtccatatcgatcgatcagaagatcacgagaagtagctcacgtagtacatctagatcgtcctatcgagtacacgagcagcaccacgacaaagaaaaaaaaaatcaaacatggaaatttccataaagaggtttgatggcgtgaaccgttttgcagagccaactgtgttttgcaagcttgcatagcatggatctacactgaaaaattattaaccaataattcttacaagcacactgaaaattaatcaggcttatgagctcctctaatcccctacagctacaagctactgatcgaatcgaactaggggtggtgattcttttggttcccattcgattcgaattcgtttcagtagaaccagttggatccggcgtacttcgccggcggttgctgcatggcgccgccgtagtccacggcgccccctcctgtcacgttgaaatttgaactgaacctgaactccggcgccgccgccgccgtggcggcgacgtcgcctccgaacggcgcgtcgtcgcggatgaagaaattagcctgctgctgctgatggtggtggtggtgcatctgcgtggcggcggcgacgtcgttgtcgtacatggtcatcagcccggcgaggcatctctggccgtcgacggggaggtcgaagtcgaagctgccgagtggctcgaagatgtgcggcggcggcggcttgctctcggcggcggcggcggcggcgttgtgcttgcaggcgtactgatgggcgttgcgttcgttgcggtcgaggaagccgagcgcgtagttgctgtgcgggcactgcacgttgccgcaggtgtagacgcgggcatggctgtcgctgctcagcatcagctccggctcgctcctcttctggatgaagtcgacgtcgatggcctcttccttcatcagcggcatgatcaggaacttgttgttgctcagagcagcatccatggtggtggtgaggtccatgaacgcggtcgcgtcgttctgcgccttctgcaggttgttgttcccggcctcgtcgccgtcgactccttcgacgtcgtactcgccggagacgctggcgttgaaggacgcggcggagagcggcggggggagggcgccgggatggagcttgagatagaggtcctcctcctgcttgaggacggcgagccaggtgacgatctccttggcggtcatcttgtcctggaggcacttggactgacgcacgaggcggcggaccttgtcgacgtcgggggacatgtgcttgatgacggcggtgagcacggcgaccttccacgccttcttgaggtcgtgcggcttcttgtacggcggcgggccgagctccttgggcacgccggcctcgggccaccacgcctcgctcccctccggccaccacggcggcggcacgcccttctccagcgggaagcggcgctgcggcgggtcgcagtgctgcatgagcgccgagagcagcgatcccagcgtggtgtcctgcagctcgtgcagggagtgcggccccgccggcgcggcgccgccggcgtcgccgtcgcaccccggcacggcgttgtcggcctggtacttggcgatggcggccgggccattgcggtcgaagcggaccttctccttccaccatgagcggaggttgtcggaggcgccgctcaccggcttccccttctccgggatgatgccgtacacgaacccctgcgcgttgcacacctccatcatcttgagcatgtacttgaggatcccgtcctgcgcccgcgacatcttcttccgccgcgcctgctcctgcgactgccgctgctgcctgcctccgccgccggcgtcgcccgcccggctctccctcccggcgcggctctgctgaagctccttgagccgcttgtgccggacgcggtcgcgccacatgcggcgctccagctcctcgatgtcgtccacgtcgtcgtcgtcgtcgtcgtcgtcgtcgccgtcgctctcgtcctcggcggcgaatccgccctcgtgcacctgctgctgctgcggcggcggcggcgccgggttgaccaggtcgccctcgccgacgaagcactcgcctccgaagaatccaaaggcggccttgctatcaacgtcggcctccgccgcgaacgccatgcgccgatccaccatggtcaccgctgctcccatcatctcctcgatcgtagcacagactgacttaatagcagcagcagagcagtagctatctatagatccacctgcacgtaagccgacctcgaattagttttttttccccatagtaattactttgctgatcaatgatcataagcttttggtaactcaaatgatgatttcattaacaaagagaaatggtttagcagaagtgaaaacaagctagaacatgcgcccatgtgccaaatgatgaacaaaggatcatcaaaggccatcatcaagtaagaagacaaaaataaaataataatcgggccgtatacagacacgcatcaaaatcagggaactcaaaatggaatctttattgaatgaatcctaggagcatggaacacacacatacctctctctgactctctctatgcccttatctgatctccttctgattactctaccactctttccataagcttggcactcagctagtagaaagagaagaagagagagtgcctttgtgtgtgtggactggagaagaagaaggacgacaacaacaataaggagaagttaaaaaggataagaagagaggagaggagaggagacgatgctgccagccacgagtccactgtaggaggaggaggaagaaaggaggaaagaagcaagtaggggcgggcgacgacgaaccgagcgagaggtgctgggaaacaacagcgacaactaccatttataatgccctcttgactaacgcctttgcccaaattcaatccaggaaaatgcagtactacggtttttaataccacgtgttgagtggtatctctcctcgtgcgccgatgaacaattgtactaccaaaccaaggcggcttctttcgctcaaaaacaaacaatttgccttgcaatacacaatactgctgcgtacactccgtcagtgaccaagcaaatttaccagcatgatgcttgtaaaacatggttcaagctctgaaaaacagtttttttaattaaaaaaaagctccgaaaaacaattgcggagttctgaacttttttgttgcaaaagggaacacactgttcatcggctttaggggtggttcctagttcctgctggaaattaaaagcacaataattagacaaggtaccttcatttgctacgtggcgaactctgtgctaatggccaaaaggaccaacacaatcagggccctaccataccacccacaccacatgtagtagcagcagcagtttacaagaggcctgcaaattctgttggggagaggtagctaggtctcctccgtctccatggagatggagaccacatatttactcattagccttatcgcacagctattgttttggttggttcctctaactctgagattaatttcaggatttcaggccccatgtaaaggctggctggaccatcatgcccatcttcttcttcacttgtgtcattctccctaccatttctccatgtttatctgtaggtgtcggcaggtttggccagcttgctctctctaacttcatctgcaaattaaaacccagcaccttgatagcgatccacgcgtttactaaaggatcgttgaaagacacctctttcatctgcgctgctcttaattcatgctgttgtatattcattctgaaaaatgttgtgttgctgtgctgtagtcagtaacagactaacagtaacacgcctcatgcacattcaattttggagaggtcaagttgtaacataaagaatgaattctcaggatcagatttcagaagacagtgaatgagagagagagattttgcaccatgtttatgcctgatgctttgattgacaacaaaagcaagtcaactgtattagcaacttgcaagcgtggagagtagtactagtatatcgaatgctgctgggtcgaccatgtttccggtagcagtggcaatgattggcccaagtattctagagagttttattcagttatcgacatctcctccccaatcctttgatctgatacaccacgttgtacgcaatgtttgccaacttatttaatccagtttgatagttctatttcaggtcgttatcgctgttagtttattttgcttctttcttcaagtctccaataggagggatcactacatttgcaaatgccgactgaattttttgaaagatcgccgactgaatttattaacttttttttttctgaaggtcagtaaacttggtgtgacaatttcttgccaaatttcggcacaaaaacaagatgattcatactagtactaagaaaacaagatgacttgctttaactttgtgaagcacatgccatctctccaaaacccaaagtgaacaggttctctgaacaacgaacaggtagcagaatagctcgcggtgttgcatgtgtaggatgtcgcacgcagcagcaaagttttacaagagttgcagataattgacgatgacaaggatgtgctccctcctcatcaggcaaggatctccttggatcatctcgaatctagatagatactcaggaagatctcaggagcaaatctcgtcgtcaatggtgttcagttcactgaacagggctgtagaaacctgcaatgatctgaacattggagttccaagtcattgcttggacttgtgtgcaatcatttgtccatgttcagatcactttgggcgatggtctttctgaatgacttcagaaatctaactctatatcacttatatagcatgaaacatatgcgtagtttgcttagaattttttttgtcaaagtttatgaacttttgaatcttgagttcgttgtgtcttatatcactttcataaattctgaaatttaaaatgcctaaaaaatttttgagcacatctctgttactcaaagcacttgaaaatgttatactgccacatcatctatatatccaaatcagtttcagcttaagcaagcattggcaactgtgaaaattctcattttattcctccatattctgaacatgtttgacttcgaatttcagtaggatgccggaaacccatatttcgcacgctcttgattttttgggggattttttcgtggtgatttagtgggtaaaaatggggaaaggttggtcagggaagagaactccgaccccctaatgagtccgaataaagctgaccgagtgaccggttacctccttccgttgaagaattttgagcacatctctgttacttgaaaaatgctacactaccgcacagtctatatccaaatcagctgcagcttcagaaaactccgaaccccctgataagcaatgcaaaacctgtaacttaagcaaaagcattggcaactgtaaaatttctcattttatgtttccatcttctgaacgcgtttgacttcgaatttcagttggatactggaaagccgtaccccgcgtatccttaacatttttaggggaatttttcgcggattaaaacggggaaagatttgggggtcggagaagaaaacaccgaacccaaccccaaaaggagtccgaataaagcggagcagtcaacgccagcggcccgtcatctccttccgctgaaaagtcaaatcagtcttcgcctacgcagactcccgtcgcgctcactgccatgtgggcccaaccgccaacaaaacccggctccgccttccgaggcgagcacggtcgtcgtctacggcgccggcggcagtccagcggcggcgcacggagtcacgatgccggtcgtcgtcgagacgagattgtgcctgcagtcaagatcgcaggcgacagtacaagaagacctaacgcaacgtcttgtggttaaaaaaaaaagcctacaatgctgtttaattagggtttagtccattcagtcatccaccgaaccctgcaaccccaagcgccgccgcttccctccttttttgtcgctgggccggcgggggcacgccggccaaatattttaagcaaaatccggcggccggcgcctcctctcacgcggttatctatccaaagctgaaggtgcgatggccgccgccgccgccgccgcgagctactcatctacttcttggagagtccgacccggcctaaccccatttcgctcccctctccagccacacccgcagggacgactccagcggatagccatcttcgccacccgcatccgcatcgcaacaccctcggcggcgatgcagtcgtcctcaacgcggcacaggttgcgccccctccccccatttcgttactctgataggtctgcttcactgtaaaatgctgtattcctgtccatgctatacatgtctgaaagtctgaaattatcctgagtgcatgtctgaaagtctgaatttatcctgagtgcagagcatttcataggttgcatgtttttctaagtatttattagctactcacccaaaaccctcatgttgttttcaacataagcaggtagaaacctccttgttcaagtaaataactatattcagtactctatatgtcgagatatggataagaggggcagttagggcctgtttagattcatactatcattttaaaccatatcattgtttggtaaaatcaacaaatgtatggcggtgtttactttgttatcaaatattggtcatgtctaaagaatttgacaatatcatatttaatctatattttagcaatgctaaattttggaaaggttgaaaatagctataaagtgaacaagcccttagtatattgttccacggcaataaaagctattgcctgtttattcctttctgctgcctggttggggtaatgcatagatgatatctataaatactctttattcctactatattcaaagaaattggcacacctggtgccggttcgtttccccaaaaaatagtaagctggttaggtgcaacagttagtctgaacttcttcttctttttttaggatcagctactctaaacttttgaagaaccgtattttgttagtttagcagcattcagtttaaccattccgctctcatgagacgtcaagttactcataaaaatcatagagtttttgcatttttctttctgcaccaagaacaccaccctgcgccaccagtacttttcagcacaaaagagattatagtcatttttactattttatccaatgcaacagaactcacactgtttgttccacaggcttgaggcagtgaatcatgaccatgaaacaatacctgaaaggtattactatacatacaaaaaataggcacttttagtcctcaatgaacaggatactaaatttttgcctgtccgatttaggcttgcagtagtcactggtggaaacagagggattggcctagaagtgtgccgccagcttgccctccaaggtgtgacagtcattctgacagcaagagacgagaaaagggggaaagatgctgttgagtccctttgccatgaatctaacctctccaacataatcttccatcaacttgatatcctagatggtaacagtcgtgcctcattggcccgatacatcaacagtagatttggaaagcttgacatcttggtaaaaatacagctgtttccttctctttactacaaagtctaaccaatctgtttctacaagaacgaacatatactgaagatcgcgtgagaaatgcaggtgaacaatgcaggtgttggaggggttgcagtagaccaggatggcctgagagctctcaacattgatcccagggtttgggtatgtagatttatgttagctttttactttctctggattgataatacttattgttttggacaaagctattttcaaactttaaaaactttaactataaataacatctaaaatatttattgtagaaatatggtgaccatatgtatagattggtcttaaaaggtgctccaataaaatcatatatttattgatattatatatatatatatatattataataaaaaatagtggttaaagttgttttttgcataccgtgtctttgttcaaaacaacaagtattatcagccagtaggaagtagcatatttgcatagcttcaaatgcctcccctattttgttctctaatttttcccttggatgatatggccccttacagttgtcagtagttttagtgtcagatatccttgcgttattttggtgcgtagtgttcattgcgaactttgaacactggtgtctattcaattaaaaattctctttttgatgcacaaatgaatagtcagcagcaaccatctcaaccactaaaaaatgtgtttgcaattcagctatccggcaaagcagtcaatctgatccaatcagtaattgtacaaacatacgacgaggcagtaaaatgcctcaacaccaactattatggattgaaatggataacagaagctctcctgccgctactgaaacaatcgccgtcaggagcaagaattgttaacaccacctctcttcggtcagagttgaaggtacaaattctttctattaaaaaaaagggtacttctgtgcttcaactagcttacctaacaacatgatagttcctgtgccaaacttgccacagagaattcccaatgagaagctccgcgacgagctgcgcaacatcgacatctgggacgaagcacggatagaagcgatgctgaacgagttcttgcttgacctgaagaacgaacggcttgaggaggcaggatggccaacaatgctgccggcttacagcatgtccaagaccgtcgtcaacctctacaccaggatcctggccaagaggcacccggagatgcgcatcaactgcgttcaccctggatttgtcaacacggagatcaactggaatacagggatcatccctcctgaagaaggcgcgagaggtgcggtcaaggcagctctgctccctcaggatggaccaaccggttgctactttgatcaaacagagttgggtgaagcttggtagtaaaatatagcattataaaattattaagcatgtttaataatcatccttccatgctagcttagcgatcagagctgtgtaaacatataccactacatgattcatggatgtttcacagactaaatttgttatgcaaggatgcttaataatcaaccacttttgaatcgttttgcatggatgttcagagatgctcagggagtggggaacgttgatgatgtcatttttttagaagggtattcttttactctggatatatacaatctttttaaattagaaacttagcctattaaaacttagccctcaaataatccaatccgaatattcgatcttatagagatttgaactcaagatcttaaaatgctactcagaaaacttcaatcactagtctccgtaccctttcatggtaatgctggcatatgctactcgtcttctcggagataaggggcacacttggccctggccgtgaccaaaatcctatcaaacgtgacacgttgcaatacgtgtccaccctctaagggacgtgtcgcctagccgtcgcacgtacaggtttatatatgttcatcatcagaggcgctaccctacgacgaacaggaaaccaccaatttagcagtgcagtgcgcgatcatgtcgtcgacgcaggagaagcgaggcgagcagatggcgcgcgcgcgggaggcggcgcgcgagatcacgcccgaaggcaccgagcgcgcgcgcgtggtcggcgaggaggaggccggccccgagcaccaccgcgccggcatcctggaggcggcgcagcggggcgcctggtccctcgtgagcgccgtcggccgcacgctcggcgtcgtgagggacaccgccgcccagaccaagcccagcgagtacggcgacgcggcggaagcgaaggacaccaccgtggagaaggcaagggagacgaaggacgcatccaagcagcagaacgaggagctgaaggcgacggacagcgttgcaggcgagcgtggaggcgacgcggcaacaagcggacgcgggcaggtggcagggaaggaggaagactagtacggcccgcccatgtgatccgtcttgggccaagtcggcccagaaacgttgacctaattattagacttggaataagtacactttgggtccctctatttgttgcccagtccgattttcgtcccttgaccgcaaaaccgggtatgacccagcccccaacttaagaaaaccgggtaaacgtggttcctcggcgttttgaaggcagtttggctgacgtggcgcctacatagcttatttgacttggtcttcgtcccatgtggcattgatgtggcgcttacgtggcaattatatctcgggaaaataataaaaaacgtggccccacatgtcagctgcacaaacaaaaatagttttaaaatggtggggcccacatgtcagcctcactcatctcttcttccctctcccttctctctctcttctttcctttcccctctctctctccttcccaggcaggggacggcacgggtgggcggcggagcaggcgagctccggcggcggcggcgggcgtggttggcgctgctccccgaccggagcgccgccggtccgcgtgaaggcaggtccggccgttcgggggggtctggcagctagcgctacggcggcggcgatcggcggcgggagcgctgggcgggaaaatgaacggggcggcggcgggaagagcggcggcacgaagccgaaggggtgctagcctcgtcgtcatcttcttccggcgcatagtcgtggagcggccggcggagcgacgacgacgggcggcgggcggagggcggagtagaggggcggttgacggagcgacgacgggcggcgggcagcgtggcgagagcactgcgagggaggaggcgagctcgtcagggtggtcggcgggaaaagaggtagcgcagcgcacgccggtcgatgggagggagggagaggaacgggggtcggcagccggcgggtgtcggcggtgcgtgggggtcaacggctggtggaggtggccggaggaggaagaggcagaggaggaggtcgccggcgagcgcgggctccatgccgtcggccgctccgcccgagatgcccagcagaacggcgccgcccctcctcgctcggtcgccgagcgccgccttcctcctcgcccggtcgccgagcgccgcctccctccttgcccggttgccgcgagcggcccctcctctcacccagccgcggcgcgccgcctccctcctcgcccgaccgtcgcgcgccgctccgcccaccgccccctgctgcgccgccgctcaccattctgtaagggagagaggagggatagagagtagagggggctgacatgtgggaccacaggggccccaccttttcttattatttcttgtagctgacatgtaggtcccatgttttttatattttcctgagatcctattgccacgtaagcgccacgtcaatgccacgtgggacgaggaccaagtcaaagggagccacgtaggcgccacgtcatccaaaaccggacacaatccacggttttataagttgagggacccgtcatacccggttttgcgacggagggacgaaaatcggactggccgacaaatagagggacctaatgtgaacttattccattagactttgtgtaggtctaatagcccggaaatgttggcccaaatgttaatggaagaaggtgcaggcttccctgaggaaaaaagtccatatgtatccttcaacttatggttcgtgtctgattttgctcgctcaaccacaaaaggaataagtttatctaagttcccttaacttgtcaatgatccaattttcgtccttcaactgaaaaatcagatacaatgggtccccttaactaccaaaaaccggtacaatataggtcccatggtaatttggatggcggttttcgttaaggtgtagcctacatggctaatttgactagtcttcatacgatatggcaatgacacggcgcttacgtggcaatttgatttggaaaataataaaaaatatcggcccatatgttagttacaccaaaaaataatttaaaaatggtgggctccgtgtgggcctcacatgtcattctcacccctcctcttcttcctcctctctccccaactcacctttcttcgtctctctctctctccaagcccgcattgcagggagatggggatccatgggatgttgcagagcagacgaagcgggggatttgggtttggtttatgctagttttggaacaagaccaacagtcagggggtggccagtgcccggtggtgagcacagtagcgacgccctatggaggaaggcggtggagggagctcatctatcaactccggtggcgagtgcttgtggcggcgctgcctccctcctcaccctgctgccgcgtgccgcccctcctcactcacacctagagagagaacgagtagagtggagaaagaaatgattagaggggagttggggtgagaggaggaagaagaggaggggtgagaatgacatgtggggcctatcatttttaaattatttttttaactaacgtgtggggccacaaattttattatttttcaaatcaaattgccacgtaagcgccacatcatataaagaccgagtcaaattagctacgtacgcaccacgtcaacgaataccgccgtccaaaccgccatcagacctatattgcaccggttttaacagttaagggatccgttgtatctgattttctcgttgaaggatgaaaatcagattcgttgacaagttaagagaactaagatgaacttattccacacaaaaccagacatggaggctctgtcaaatacgtaaatcggcccaatatcatgctgaattgctgagtagcctactcaatatctagcccaacctttttccccctttccgtgatgaattcatatgcgtgcaaaatttatgtgatctctcctgaggcattcgctagctgtcacgattggatcctcgattaccttccatacttgagctatgatttactatatatgctgcacctaggtgtcatggcacctatcatttgcatgtgacttaaatagttatagaaaaaattaaaaaaattagtaacatcgtttgtgatgatacaagtctatacacaaacatgcaagactaaatttgatctacaactagagaaacaaaaataataaaatcagacattcaatagtacccgtacagtgcagataaaatttcttatttttgtttcttcatatatcgatcgaatttagacttgcatgtttgcatagtgacttatattatcatggattatcttatcaaattttatgtattttttatataattatttaaattacaggcatacacctaggtgccatgtcacctaggtgtaaaaaatactttctgttatagtgctggactcgataattttcatagttaagggaggcttataatatgtttttttgcgtttatgggatcaaaatggcctgtagttaaggcaggcataataagtgatgagttcatatacgtgcaactgcaaacttatctgatctctcgcgacattcactagctgtcacaattggatctccgattacctcccatacttgggctatgattttcctacaatgaattaaggtgcaaacgtggaggatgaaactaaaactcgtctagattcatgcagaaacatagataagtgttgcatttgagtcgctggcagaggatgaattccaacccaaatctgctgagatatcaattgccatgatacgtcgggtccagatcctctagagttgggtataactctatcgggtggagttggctaaatctgtgccattcggcatacttcaagggctaggcttaagccacattaatttatacttaaaaaccagtaactgaccatgcaacaaataatcttgtatcaacagcttgtcacgagatcatttttactgtataattagcacaaaaaattcaagattcatctattatttaaaaaaaatcatacacattaatattgatatggttcgctgtttgcatatatgtgaaagcactatgttgatatacactgactgccgctttagagttgatcgactatatctgttgtttggggaataacaaaacgttattctgttacatttttttgggggtgagaacttaatcaaatcgctattattgagcaaacacatgaaaaaattaagtcataaccattaatttaaggagttaatttattaggtgaaaattccttaaaaaaaacttattaggttaaattgacgaggaatgatctcagccgtagaaaacaatggatagcacagatttggccaactccacacggtagagttatactcaactccaggggatccagaccctgatacgtccacgaaatgcattcctctcaaatcccagccggatttggcaccaactaatggcggtgaattggataggttaattcatagatgaaggtaattgattgatacgggctaatatcatcttgccaaaacaaacatgccatccaggcgtgtataacaacacatcaccaccattgcaaagcttcttcatcgatcgccatcgtcttctccagtcctcatgcaggctatggcgtccttactcccaattctgttgctcaccgccttcctatcgtctaaacctgcactctgctacatcaatccaggtgcaacgccgccacagaaaattggcacgaaatcttcaggtggccgtgcaacctacatcgtgttcgtcgagccgccgccgccgcttggccacggcgatggcgaggacgaccactgccggtggcatgaatctttcctgccactgagtgagctcgccggctccgacgacgagccacgcctcgtccactcgtacaccgaggcggtcagcggcttcgccgcgaggctcaccggcggcgagctcgacgcggtgtccaagaagccggggttcgtgcgcgcgatcccggacaggacgctgcagctgatgaccacgcacacgccggagttcctcgggctgaggaaggacgccggattgtggagggactccgggtacgggaagggcgtcatcgtcggcgtcctcgacaccggcatcgactcctcgcacccttccttcgacgaccgcggcgtgccgccgccgccggcgaggtggaagggctcctgcagggacaccgccgcccggtgcaacaacaagctcatcggcgtcaagtcgttcattcccggcgacaatgacaccagcgacggggtggggcacgggacacacaccgcgtcgacggccgccgggaacttcgtcgacggcgccgcggtgaacgggctcggcgtgggcacggtcgccggaatcgcgcctggcgcgcacatcgccatgtacagggtgtgcaccgtggaagggtgcaccgagtcggccttgctgggtggaatcgacgaggccatcaaggatggcgtcgacgtgctctccatctccctcggtagcagctttgctgcggactatgacaaggaccccctcgccatcggcgcgttcagcgcggtgtccaagggtatcgtcgtggtgtgcgccgccggcaacaatggcccggcgttcgcgacgcttagcaacgaagcgccgtggatggtcacggtcgccgccagctcagtcgaccggcggttctcggcccccacgcggctcggcgacggcagggtcatcgacggcgaggcgcttgatcaggcgagcaactcgagcggcaaggcgtaccctctgtcctactccaaggagcaggctggtctctgcgagatcgcggacacgggcgacatcaagggcaagatcgtgctgtgcaagctggaggggagccctccgacggtcgtcgacaacataaagcgcggcggcgccgccggcgtggtgctgatcaacaccgacctcttgggctacaccaccatcctccgggattacggctccgacgtggtgcaggtgaccgttgccgacggagccaggatgatagagtacgcggggtcgagaaatccggtggcgaccatcacgttcaagaacaggacagtgctaggtgttcgtccagctcccaccctcgcggcgttctcgtcgcggggaccgagcttcctcaacgtcggcatcctcaagccggacatcatggcaccaggtctcaacatcctcgccgcgtggccctcgtcggttgctcgcaccgatgccgccgccgcgccgccgtctttcaacgtcatatccggcacgtccatggcgacgccgcatgtgagtggcgtggcggcgcttgtcaagagcgtccaccccgactggtcgccggccgccatcaagtccgccatcttgacgacatccgacgaggtcgacaacaccggcggcccgatcttggacgagcagcacaacaagaccatgttgttcgggcccttcaacaccggcgccggccacgtgaacccgacgagagccgccgacccgggcctcgtctacgacatcggagtcgccgaatacgccggcttcctctgcacgctcgtcggcgagtatgtcctgccgatcatcgtgcgcaactccagcctgcagagctgcagggatctcccccgggtggggcagtcgcacctcaactacccgtcgatcacggtggagctggagaagacgccgttcacggtgaaccggacggtgaccaacgtcgggccggcggagtcgacgtacacggcgaacgtgacgctggccgcggagacgtcgctgaagctgagcgtgtcgccggagacgctggtgttctccaaggccggggagaagaagacgttcgccgtgacggtgagcgggaggttcacgaaggcggcgcaggcggtggcggtgctggaagggagcctgagatgggtgtcgccggagcacgtcgtccggagtccggtggtgctctacatccccgtcgcttccgcaccgccgtcgccgccgatgccggcggttgggactcggcgcggagacaactgggcctgaagttcttcatgggctatgtacatgggtcgtacgctttgctgtgtgaatactaataactgggccgattttttactataatcctaatgggcttttgggttactctcgcacgcagtttcagcccatcagactgtactggaaaggattgagatactctacctgccactttgccttgttaataacgggttggtttggtttgagtcctatattggccttaccaatatttggcaatttcaatagtgtttattgtctatttggtttggagccaaattttggcatgcctaagaaaataggccatttcaacagttaatttaggctattttggtttcaatccaaacacaattttacctttgccaaaattagccatgacaaaagttaccaaaatttaacattgacaaaaattggtaaggccaatttaggccacgaaccaaaccagcccaacatgtgtgggtctagggttcatcgggcttacatattagtgatggaatcagtttacttcgaaggttgaggatcttgatccgtactataataacacattttacttagcttttgcaattgaattcaactgcatctactactagagtaagtactctagttttgctattttgcaagcttcacatcttccttaatataagctcgacagaagggcaggagaaatggaaagaagaacaggacagacagaaagaaaagcttgagctcggcatgaagccatggggatggagatcaggatggcacgagagcaccttgcagcttttatggtgctcttgctagctgaataacggccggtggaaggtgagctacaggaagattcgtccttatagcaataaacaatgtcagcatcggtgcacagaacctaactgttcgctgttaaacgcaaagcagctcttcagttcagttcagttcggttcagctcttcagttcagttcagttcggttaggttcagttgacagcaacaggagcatcacttactaaaccaacacaaaagtagataggacactacctctatccagattcgttgtaacatgtagtatctcatttactcataggttagttttttcttatgggatggagggaatactccgttccttttaaaatacagtgacctaaaatggatggggtaaattttaacccctatttatattcgtagtattaaaacgcgtctcatactattgtatattgttacattttagaacaaagtaaggactccacttggatggttcagactactctacaaagactgcgttgctcgccttcattcaggtaaggagagagagccttctctaatctctacaacgaactgaaccgtgtgagcgagatcaatcttaacgctctgaacattggaaatgcaggacaggaaacgaatcgaatccgatgaaatttcagacgccagtaaaaagggtggaaggtacggtgaaggtaatatcaaaacgtgagaaagaatctgctgcgaattggacagcagtagcagtgaaaggtaagatcacagtagtagtaggaggagcattttcaagaccaacccgtttacccgcgtgcatttccacgtcaggcccgtacgaaagtagaagccgcagttgccacttgccactgcagctagctggaatagcttaccgtacagcattcagctggatcactcaaaaaaaaaaatctgtaaaacatcacaccaactcttcgtttgcactacccgtcccaaaataagtgcagcattagatatctgtatccaacatttgaccatccatcttattaaaaaattttaaaaaaattagtcacacacataaagtattattcatgttttttcatctagtaccaataaaaatactaataaaaaattcaaataagacgagcgatcaaatattggacataaatattgcaaaattgtatttattatgggaaggaggtattactgctacttcacgtttgcgtacgggaaattcgtttgtactccattgtcgagaaaatctcagggctcattagggtcaaccttcatttttatttttgaaaacaatgttaaataaacaaacttaaaaagtaagacatgattgatagttagacttaagagtagaatcaaatgaacaattgtattttttctataaacttgtaaagatgtttgatttaggataaacccaaaataacttattacataaaataagtttcaaaattttagtcaaataaaatcaacaattttggccgtgtttagttcccttcaaacttccaaaaattccatcacatcaaatgttttgacacatgcatagagcattaaatgtgaacgaaaaaaaacaattacatagtttgcatgtaaattgcaagacgaatcttttgagcctaattacgccatgatatgacaatgtgatgctacagtaaatatttgctaatggtggattaattaggcttaataaattcgtctcgcagtttacaggcggaatctgtaatttattttattattaatctatatttaatactttaaatgtgtgtccgtataattaaataaaaattagccaacgaactagacacagtctttatacaatatgcggatggagtacgtacgttatagggcaagcactgcctcttcttaggtttcttctgttttgagagaggggttgaacaattgcaggcaggcactgcagcgtctagaagaattagaagctcggtttttgaatcatgtacagttctctctctttttctttcctggaataaggtagagctagctctcgagctcaatcttaattaactcgtctgttaaaaaaaaatctaatcctaactatgtatttagacacacatgtatttagattcgtagctcaaagttagctttttatatacgtcctgatgaatgatgtatagtggcgtgtgtggtgctgatgatgattagctatttaaatctgggcgtgccgctccctgatgctgtgattatgaacttattttggctcttcctcttgtagctctcaagagtgtctgccatgattgagcagggccaggggcatggatagtttacaaacaagtctaccagatgtgtccatggacccgccatcttcctatacaaacgcaccctttgatactcaaaagattcagccacaacttgtgctattaaagaacgttggttacaaacgtttacagctttgcacttaggtcctgtttagatcccaccctcaaatttttcaccatatcacatcaaacatttaaacacctacatgaagtattgaatataggaaaaaaactaattgcgctgattgcgactaatttacgagacgaatctttttaagcctaattgctatatgatttgataatatggtgctacagtaaatatttactaatgactgattaattaggcttaataaattcgtattgtggtttactgatggattctgtaattagtttttttattagttctgaacaccccatgcgacacacatcctatataatacccgatgtgacacgtcaaaactttacacccctaaatctaaacactcccgtaagattactataccaacctgaatctatctctgtttttttttctctttcacagaaggatgctcccatgaattactagctgatgagtatggtactatggtgtgtactcattcaggccattgatgatactaccaagcaaagttatcagccgatttattttttgcttgatgcattactgcattatccctttgtaattttactttgggacaaataaagtagaaaaaggtggacaggggaatagaaaacgagtagtacaaacgttggaacttgaactcttgactgacctatcaccaaccatctcgtggtactagcacaccacttagggctgtttagatacctcgtaaaatttttcactctgtcgcatcgaatgtttagacatatgtatgaagtattaaatatagaaaaaaataattactagattacgtgtaaattacgagatgaatcttttaattctaattgctccatgatctgacaatgtgatgttacattaaacatttgctaatgatagattaattaggcttaataaattcgtctcgcagtttacgggaggattatataatttgtttttgttattagtctatatttaataattcaaatgtgtgtccgtatatccgatacgacactccaaaacttttcacccatatatctaaagacagttttaatctccatccattctccaaacatcgagatctctgacgagtataggccaacaaataattcctccatctcaaaacaaactaatctcatattaaaatataatgtatactagtacatcgaatctgaatatactctatatccagatttattgtattaaaatgtatcgtatcttagtatagagttgttttatttttaaggcggatagagtactctaaccaactcaacagtcaattaccattagaaaccacctgcgacaacactactgccattagtttatctggaatgagacagagcaatgagccatgcgtttaacccaggagaattctgaggcgtgctgacgaaaatgggaactttccttacacttcctctattttcttttatatgatgttgcttagtatgattttctatactctatctattgaactaaccaatattaaaaaatatttactactgatactttctccattttataattcttgaggtttaaataatgacaaataaactaaagaaactggaaattaaaatctagtgtggtgcaacttgatagtaagcagtgtagtctacttgaagtggaatacttcctccgtttcaagttataagactttctaccattgcccatatttatatagatattaataaatctagacacgtgtcttataatctgaaacggtggtagtagtatctttgctcggctatcaaggtgcagggaaagttctcattggcatagagcgtatctgacagcaagtctttttagcttttggcaacatctctcttcgctcgtcgtaactaggctttcgatgcaatcgagagaaaggaaaacttcaaggacatatccagttgtgttacagaaagatcagtggagttcacttcccctggggccatgcaatacatgctgagttttcagttcagtttcagagaatatataaaagacttttggatccgtagcactcagcaaaactcttatgtctcggaaacatctgtgctcagtttgatttgaggtcaattttgttttccttagagcaagttcaataaaagaattaagttggtggtataatatcgaggctagcaaaagcaatgagcttgagaaataatctttttaacttattaattttccaatcatccgtttggaggaaaagagtagtattattttttcacaaaagctgggaaaagaaggtgggctttattcttcaccatgccgtcacatgaataggggcatactccatgccaccatcactaatcaatgtcacatcctgctaatgcaaaactcttgcacaaatccactaattaaaaccgtgctagtcaccctaagatgacgccaaatcaagatcttgcacatttaattaaactactctaagatagaagtatgctttatgctaaagcaaatgaataaaaaccattaagagattttagagtatccaggtggccgaatttgctaaaagaaagggttaagagaatttgttcttgccatttctgctaaagccgagcatcttcgtactcctacatgcatatacatgttctgcctgccggaatttcttttctactctccatttaaaaatgtaagaacctataaccgaatgatacgttttatagtacaacatatcttgatacactcctatctagatatattatattagaaaacgttttatctgattttagattcttaggccctgtttagatcccaccctaaattttttcaccatatcacatggaacatttgaacacatgcatgaagtattaaatataggttaaaaaataactaattacatagattgcgactaatttacgagacaaatcttttaagcctaattactctatgatttaacaatgtggtgttgtagtaaacatttgctagtgacggattaattaggcttaataaattcgtctcgcagtttactaacggattctgtaacagattttgtaattagttttttattagtactcgaacactctatacgacatcatatataatatctgatatgacacgtaaaaactttacaccctgaatctaaacacccccttatattttaggacagaggtgtagtagcgttttcttatgactgctggaatttcttggtgaagggaaaacgcacactggactgccacgtgtcacgcacaattagctgttaagcatcgggcagtgagcgacgcgatctgctttgcccttttgttaagctttggtttgacagccaagccatgtcggggaggcgccacgtggcgtgcacccaacaaagccctttcttttacctctccttttttacggttcacgattggttgctggtggcaacaacagtaaaaactgtactgtagtttggtcagaggggtgacgagtgagtccgaaatggagtcagtggtcaagtcaataataggagtagtccaaccacgttacctgtgacgaaacaaaaaagacgcattgcattattaatttattaatggtaggagtacataaacatttgggaccaataatcgctacagtttctgcacatacaggagtaccagtactactcctacgtgggtgttttttttttcttcattactacccccattccatttttaaacgtagttattagttttcgttttcagttttaatggtttgtcttatttatttattttttaaaaaataaaaaatataagtcatgcataaaagtactactcatattttatcatctaataataataaaataattaatcataaaaatatttaaataagacggacgatcataattaaacactgaaacttatagttgcgcttaaaatgtgatagaggaagtaataatagtagtagtggaccaaccaaactttttgttgttcacgtccaagtgtacagtacttctgaaatttctgctaatggttgggttgctggagagactccggagacatgggaacacagcaactgtcaatatccaacacatgaacaggacattatcagataagtgggcttgcaccattaatattatggtccagctagctgctggtactcctagataagacattatctcaagtacttaagtagcattagtagtacttaattatgagttaaacggcttgaagaaaaaatatatgtgacctttggtacttagtacaaatcaatgacgttacgcaataattaccatcattagctagtactaggagataagctcgccggctaatcaacatgattaatttgcttagaaatcttttttggtgcatccggcgatctgattgggccaggcaagatgttttcggattctttaaggcaaagttgacgttgtttcgctaaaccggagccggtgaataattaaacaagctgccgaagaagatgtgatgcgctgctggttaatggaattaaaagggaatcagactaacatcatctagttacatgatcgagcgacatttccagcatcttgttaattagtaagcaattatttcttccatgtcgatcgttcaagtgagctagacaacatttttaacaacataatatggctatactcttagggccatcggatttgtagatatttaactatttaccacttttagatgtgacaaataactttttgccactggattcacatgtcatagatacatgtggacccacatatcgttgaaataggggcaacaaatagttaattgccaattggaaaagtggcaaatagttaaatgcatacatgtgtcttataataattaagacaataaagactctaatcattaacctaaaatatattttttattttctattctaaaaactctaaaatcctgttgagtgagactaagtgccttttatgaatgattattgtacatgccatattaattagtgatttgctgaaacatgcataatgaaaacccgtgaattaatttttgtatggtacaaattccattccttggctgatcttcaacggcgatgcaaagccatatagtcctatatgcaggcaggggcaggcatgaaatgttccctcgtgacactttttttttcctttgctctatgcctttttctgtaccctagcaaattaacaagtttttgttttctttatcctgtgcctttttgtgtagccttggaaattaacaatgacaaataaatatatggagtatgaaggacactagatagtgcgtcatgccgttttcggcagcttctttttctatctttaccgtgtataggaaagaaggaatcggattccttcctgaaagacagacttgatgagagaaatgacttgaccaattttcttgcatgtttactagtagtatgccggaaggagtcaacaagttcaacagattgcatataatcgagcgagacacactgcattacatggtagcacaatctgtagcttgcatttgtttggtcttaaacgacaaagtgcattaatagtattttctcctttcagttcagtaagatgaagattttcccttttttttcggcatgttctttgtaactgatagataaaattaaattcatgacaattatttgaggacacagcataataaattaaatattagaaagctgaaaaattgatttgaattttttttcaaagaaatgttgattaagaaactttcttcactagaatttctttgaatgttttagagcttagaaactatgcccgtggcaatccataatctataagggcatgtttagatccccggtaaaatttttcacgatgttatatcgaatatttggacacatgcatagaatattaaatataaacgaaaaaataactaattatacatattacgtgtaaattgcgagacgaatattttaaacctaattgctccatgatttgacaatgtggtgctacagtaaacatttgctaatgatggattaattaggcttaataaatttgtctcgcggtttacaggcggattctgtaatttattttgttattagactacgtttaatacttcaaatgtgtgtccgtatattcgatgtggcacagtaaaaatttttaccctggatctaaccaatgtctaagacaaaaagaaaggacaaccctgagttcagaaccggtgtgacaggttaagccaatccattcatgtttatttcagggtagttaagaattttcatgcaatttccagttgatcaggacatcagaagaaaactttgatccgatttctcccgtaatagtagattcactgagatacctaggatgatccaatattattcctttccatccatatcgtttgcctgttgaagggaccccaccaaaactgccctaaaccccttgagccaatcaatcagtttgaccgtccgagtactacgagtacgagcagtactagtagtatttggtttgcatagtcacacactaaactgtcagatgatcacgttatccacaatagggtgttgtgtaggtcactgcaattacatagtaggctgtgtttaaatccaaagtttggatccaaacttcaatctttttccatcacatcaacctatcatacatacataactttccaatcacatcatcttcaattttaatcaaaatataaactttgcgctgaactagacacagccgtagtagcagagtgctatgatagccggcatcttgtgctgctcttctcttctccatacgtttgtttgttcatttgtctctgcctttatcggacgtccaatccatcattgactagccatagcccatggccagccagccagccctccttgtgttgctcatccaatgcccaaacgatgcaaaagatgtcagactatgcacagtgtttagtacatgtcctccattggcatgcttcctttgctctgggacggttactgttgtgcttctattatccggctgcatttcttcactatttttgaattcaacatgtaaaagcctgtacaatttatgttacaagcacttttacaaatattggtacgagtacgtagtactggatgttaccagctatagagcttgattgagcaaactcacggagatagcaaggacaaagaatgtacttcctccattccacgatgcaagggcccctttgaatcgcaggattgagaaaacgtaggaatataaaaaacgtaggattttgatagaaatataagaccttatttagatgggactaaaacttttaagtccttatcacatcggatgtttagacgctaattataaacattaaacgtagactattaataaaacacatccataatcttagactaattcgcgagacaaatctattgagcctaattaatacatgattagcctatgtgatgctacagtaaacattctctaattatggattaattaggctttaaaaaattgtctcgcgaattagctttcatttatgtaattagttttgtaagtagtctatatttaatactctaaattagtgtctaaatacagggactaaagttaagtccctggatacaaacaccacctaagtgtaaaacataggattgcaaaatgcaggaaaaacacatgaatgaccgtttgattgaaccgcgggaaaaacacagtaattggatgatagagatagactcgaaggaaagttaccaagaggttctacctcattgttaaattttctctaaaatttgcatgggaagaggcattccataggaattttataggatttcataggatccattcctttgattcaaagggctatataggaaaaattcctataggaataaaatcctctaaaattcctatgaatttcctttgaatcaaagggggcctaagtcattctagcatttctcacattcatattgatgttaatgaatctagacatatatatcaatctagattcattaacatcaatatgaatataggaaatgacagaatgacttacattgtgaaacggagggagtataacccatggtttagagtgatgaatcatatgtactgttaggccgtgtttagttcatccccaactaccctaaacttccaactttctatcacatcacatcacatctaaaactatcctacacacataaactttcaactttcctcaaacttccaactttttccagaaattaaacacagccttatatgtcaacattgggttttatagcagctgaagagctgcatagtgattgctttataacttatgtcttgtattacagaaacacatagatgatagagattttcttaaatctcaaccacctgctctctagccatggatcttagcctagtaaaaaacattgtcttcaatctctagccaacagagagagggacgtgaatcctgatggagcttagaactcaaggtgatggaattatttcctacgattgtgacgtggcagtagtacaagcaaggcggtgaaagcaacaacgcccagagggaggaaaggagggatttatgtctctttttttttcttccaaaatatcttcctctactacatgtccatctacattggcatgcttcctttactctgggacaattgctattgctgctattatcgacctggaattcttaactattcttgaaatcgcatacaaaatttatgttaatggcacttgtacaataactggtggatgttagtagggcgagagcttgattgaaagaattcagaggtagcagggacaaaagaaggtataacccatggtttagagcggtaaatcatacttaccgttatatgttaatgttagattttgtactagcaattgaagagaagcacaacgattccttatataaataaatatatgttacaaaatatactatagattgtgattttcttaaatctcaaccacccgcccatctcccctctctagcaaacagagagagggacatgagttgtgacagcattgaactcaaggtgtggtggcggagttttctcccgcgactgtgacttgagagtgatataaggaagtcagcgataacaacatcgatgaacgggatgaaaggaggaagaaattatgggctttttttttccttccaaaatatctcaaatttgttatttttgtgttagtaaaaaaagttctacagcagaaacactaaaatatcccaaacagaaagccccaaaaaacttcttttgagattgatgaggcaccttggggttgggcccagccagcccagtggaggtggagtactctgctcatccccacaagccacagttctccctccaaaaaccaaaaaaaaaaagttggaaaatactgcttccttctactaccccagcaatacctacagccctggaacattggccatgccaaaaagttaggctttctttccattcattcattcattcatcagctagcaaagcaaagcattttctcagctcaagttgcttgctcctcttctttctttcttcctcctccccttccctttcaggactcctccccccacatcagtagctttcactgcccaaaccctctttgtgggtggcaaccctagattattaatgtcctcctcctcatcatcaccatctcctcctcttcttcctcccctgcttctctctccagattctcttctcatctggtcccttccttcccctgctttgcttgctcaggtaaaacctctcccctccttgcaagattctcccctttcttggcatgctccaagatttttctttcctcctacatcgccggcaagatcgcttctgttaatgtttccgcgccatttttttttgtttgcagctagctgatcgcacgtgggtagggtgagtgtgtgtgcgtgtgtggatgggagtccacgcaatgtcgtgccacggcggcggcggcggtggcggcgaaggggcactgtcgcggcaggggtcggtgtacagcctgacgctgaacgaggtggagagccacctgggcgagccgctgcggagcatgaacctggacgacctcctgcgcacggtgctccccgccgcggcggcggcggcggagacggcggggaggaagacggtggacgaggtgtggcgcgacatccagggcgccagcaccggccggcaccacgcgacgcccatgggcgagatgacgctcgaggacttcctctcgcgcgccggcgtcgccgtcgacggtgccgcctccgccgccggcgcgcattggctgcgtgggcactacccgccgccgccgccgccgacgacgacgacgctgcagtacgtgggcggctccggggcggtggtggacggcgtgtataaccgcgtggacgggcacggcgtcgcggggttcctctcgcaggtgggcgtggcggggcggaagcgcggcggcggcgtggacggcgtggtggagaagacggtggagcggaggcagaagcgcatgatcaagaaccgcgagtcggcggcgcggtcccgagcacggaagcaggtgagctttccatccatcgaatcaatctgcagagaagcttcaatttccttccccccccccccccccccccccatggattcgtgagacgctcatgtggtggcaacgcaggcatacacgaacgagctcgagaacaagatctcgcggttggaggaggagaaccagcgcctcagggagcacaaggtaacaacaaaaaaaatgtttattagtagcttctcctcctaaatcctactaattgctcactgctagtactcagttccactgatcttgatgtgagcttcagctccactgtttctttgtttgtttttaaatcttttctgtggctcccagtttgcacaaactctgcaaagtcattttttagttaaagccaaactagaaatataattttcttactagttgttaggtttataattgagctggatgctcagtggagagagagagagagagagagagagagagagagagagagaggggtaacgagccttgattagcatcttgtgtgtgtgtgtgcaaatgtggtactccttgggatgctgggtcatagatgggcgagcaaaggttgcaatttgaggttaaacaggtgacattgtggacaaatcatgcacgtagtactctgcaaaaaatggttctttatatcttacttgctctagtatattttctcaatgtactaattcctccagatgcgcacttataggacagattatgactgttcagggtggtacgaatttctaatttgaactgaacgatcgtcttaattaactagggagtagtatatagttttttctacagttcagttgatgcattactgaatctttgtttttatgaaacaggctgttgctgatttctcaacattccctagctgcgtcgatttcctgaaagcattcttgacgcagaagctggaaccagtaatgcagattgtgccccagccggagccgaagcagcagctgcgacgaactacttcggcctctttctaatcaaccaaccacaatgttcatagcgaaatgatttaaactcgatctctgtaggaaaatcaatgggggtttgtacttggggatgctggctgttgtgaacaagagctgaaacgacgaactcttttcttaactatcgatctgcacgtctcttcctcttgcaaatttcactctgtggttaaactttcaacgaaagattcactctgatgggcgtgattcttgtgttgatcgatgtggtgcgaatgattctcttttgcaaggttcgagtaattctcattgatccttgtattttgctgtttgtttcttaagtttcttcgtcttagaaatgctagtactacctctgttttttttaaaaatgttaactttttacatcatgtttgatcaccttgttcaaaaaatttaagtaaatatcttttcatgtgttgtggtttgatttgtcaataaacaaaatttaagcaatacttatatttttaatatttgcataaatttttaaataacacgaatgatcaaaggttgtaacaaaaattaacaactttatatattataaaaagcggaggagagtatagtaccggtatattgtgaagcaacatattttagagctcaggtaacttgggcccttggcccgttttggaattaagaaggcctaggtctcgttccgtggaataagttcatctgagatcccttaacttgtcaacgaatcttattttcatccttcaactcaaaaatcagatacagcgggtccctcatctatcaaaaccgatgcagataagatctcttggcggtttagatggcggttttggctgatgtgactcctacgtagctattttgactatgtgttcatctgacgtggcgttgacgtggcaatttgaccaagaaaaataacaaaacttgtgggacccacatgtcagtttcacacacaaaataaaaaatggcaagatcgacattgggttcgcgctcctctcgtcctgccggagagactgagggagggaggatagagtcatagagataagatgaagggacctctgttgtacctggttttctggttgaaggacgaaaatcagattcgttaacaagttaagaggcctaagatgaacttattcttcgttccgtttgacgtcgcgtaacgggcgtaaggcctgctaatctggctgtctgggcctcccttggcgtggcccacgtgggcttgggtcaggcggattcatgtacgcacgacgcacggtcaccgcaagatccaacggcatgcagtctccggagctaggttagcgagaaaaatccgtgcaacttttctttccaacgaaccaagagggatcaacatagaatagactagattgactctgtatttaaaaagtaaattatattaacctaacacaaacctaataggtggatgcaacatagtacagtggaaaaaattataaaatacttgtcacaaacttgtctggtgtgtgcaaaattaatgacgccaaaaccgtggttgatatactaagttgaaacatgcttagaatggcacatgcacacgtcaggaggtcatgaggcatactatatgtgcaaattaccactatttttttttcttccattgtttttaattcactgcatcactggtatttttttcactgtataattagcatcccctactatgtatttgatcgagtacacatatgtctagatggcatcattctgaaatgtgtacccatgtagcatcctaataaacattcaaacttagtaagattaaccatggcatgcttatttggttctgattcgcatgcatcaacatgtccgtacattaaaacgtgtgttttacaagcttatgtaattcgttacatccaatacaatttactctttaaaaaataggcatccaatttgtcttcaacataattcgaatttgaatggtctaggcatacacccatacccatcaaccaactgagctaagccctagaatccatgctagtgcttactactagcatgcgggcgaagcatatcgatatcgatgccacgaagcggtcaatttttttcgaacagccggtcagaattgactggcgttatattgatagaaggagaaaaagtacaaatagccaaagggctaagaaagagaaaaactgtacatgacaacatgcaaacaagcttgcatgtagccttcctagctcctcattgcaacattctcccaatgtgtttagcgccggccatactccaccaacctaattcctcttggatgtgactaatcatctggtgtactgtcgcctcctttgctctaaagattcttgcatttcgttccttccagatttcccaaacaatgagcaagaagagagttctgagtcctttctgttttgttgcttccgggtcgcttgttccttgtgtccaccaatctaagaggtttctacttgtgttccatttcgggatgatgtgcccttggtgcagccatgtgagaatcccaaaccagatttgctttgagaccgggcattcaaacagaagatggtcgattgtttcgagatttcgaaagcatagctggcagaaataattatttggccatcccctgatctgtaaccggtcagctgtccacacccggttttgaagaaccaaccaactgaagattttgcactttgccagagcccatgcctcccaagacaactttgttgatggcgagagtaccattccattgaattggaattggtacgcggatttttcactgtattccccattagttgtccattgccaaacaatcgagtcttgtaccccctctattagttgtggggtgtcacgggctaaaatttcctaaacatagaaggattcatcaagaaggggaatggtgaggctgtggcggatgtcgttaatccatctttcttgttgcaacgcgtcctggacggtgcgggttttcctcttcgaatgcctataaagattcggtgcttgactttttaggctttggccactgatccaatttgattcctaaaagctcgccttttgtccgtcaccaatttggactctcgttgatgccgcgaaaagatccttatccaattcatcacagggtgtttcagtccatatccaaggcttctctggcgtcctccattcgaaccataaccatctcagtcgaagagctctggcaaacttttctaagttcggaacccccaaaccaccgtaccggacaggtgagcaaactttaagccaattgaccttgcattttccgccatgcatattcttgttacctgcccacaggaaccgccttcttgctttgtcaatttcttgaagagattgtttcgccggtttcagcaccgtgagggtgtaagttgggatggcacttagaactgagttcaccataattcggcgcccccccatgtacaacaatgatggcttccatcccgagagccgacctttgatcttatcctggagaggctggaaatgcaccttacgtaggcggccaggagtgagtggtagccctaggtaagtcagtgggaagctggctcttgcccccgaaaaactacgcaagacgtcgtccagatctacttcctggcatcgaattggtgccaccagactttttccaagattgacgtgcagccctgttgccttgccaaagtccctaagcatggtaataagaacatccacctcgctttgtacagggttgagaaaaacagctgcatcatctgcataaagcgaagtcctcaatctagcatggcgacttccgatgttggttagttgcccaccttcggtcgccagatgtagaagcctttgcagggggtcgatagccaggataaagagatagggggataggggtccccttgcctcaagccacgtctgtgtgcaatgcattccccctggtctccatttaggactaccttgaaagtggtggtggaaaagagcaaacagatccaatttctccaccgggggccaaaacccatgttttgcatcagttcaagtaaatattcccaggagaccgaatcaaaagctctagcaatgtctagcttgaaaaaaagtgttggctttttgctggcatttaggttcctgagcacattccgaacatacaggaagttgtcttgaatgcatctttttttttatgaaggcgctctgtgcaaccgagatcagtccatccatctgcctggcaagccttattgttagaactttgaatatcagcttggcgacggagtgaatgaggctgattggcctaaaatcggtcaccaaggtaggggcgttcctctttggaagcaaggtaattgctgctctgttgagtgctctaaagtttcctcctgacaggttatacaaacactggaaaacatccatgatatcctgtttaattaactgccagcatttcttgtagaaggtaccattaaagccatctggacctggggccttttctgccggcatctgctttaaagcggcccaaacttcctcctctgtaaaaggttcatctagttcatcggggtgaacctgtggtagatccatcgcgtttcaatttagggtgcaatacgtagcggtcaatttgacttcattaattctagggtgcattcatgcagttgacttcctttaatttgttacgggaaagcgatcggttaatccatgttgagggcaaacatccttatccgaaatggagttggaaccatttgaatcattaggcagagtgaatcgaatttcaaccagaaattgtaatacggtgttggagtgtcatttgggactgatcatgcagctccagatcgaacgcacatatacgaaaaacccaccgatctacactaaaattagtcacaaatgtcatggacatactcattctcaggcatcactttggtccctatgcaccaaaacaagttttgggttcatttgataggactctaactcctaaattctactccctccatcccaaattgataatcacacatataatgtttgtgcactaagacaaaaagttatttaaaccgcatcgattaagagtttaagacgtcatgcacaatatacacacattatctcataatgcatgcatcgattaaaacacaattcataattatatccttagcatgcactacattctcctatgctacattaattgtactccgatgaaatccgtgtccacgcgattatatgacactaatcaatttgaaaaattatataatgatcaatttggtaaggagggagtactttagaaggatatattagtcgtgctagcttattttgtgagagcactataatcagctccactttacttcctttttaagtgaagctaaaattatttggttgaggttcagctctatataagagatgaaattgaagctagaactacgccgaattaacacttactctgatactattacgccaacgatacacatgatgacataaaaccaataacaatgatactaggacaggaacatctctcttgtatgaacaacgtataaaatactcagagcacaagatcgatcgatgtacgcgtgttacgtgggcctgcctcatccaacaaaatagaggcgtgggcgatcgagtgatgagacactcggacatcaaccaacgttacgttacgtgcctccctctctacgtggcgctcttctagttctccctcgcacgctgcctgcctgatgccgatcgatcgatgctgcgacgtgatctccatgcatcgcctgcctctccatctcgaacatcaattaggcatgttttagctggtgaaatattttttttttgtcacgttgtacgtttgaccggatgtcaaaagggattttcggtcacgaataaaaaaactaaaaccacgagacgaatcttttaagcctaatcaatctgtcattagcacatgtaagttattgtagcacttatagttaatcatggcctaattagactcaaaagattcgtctcgcgatttatatgcaaactatgccattagttttttatttatctatatttaatgtcctatatatgtgtctaaagatttgatgcgatgtttttgagaaaagtttttggaactaaacacgcccttaatggctagagccaggtgctactgcttcgcaggtacgccatgaacatcaccatgtccgagtccgaatcctcctcgccgtcgccgtcgccgtcgtccgccgccgccgacgggctctgcaggagccggcagcggcagagcgggcacgtggcgggcggccgcgccgacaaccaccaccggtcgaggcagccacggtggaacaggtgccggcaccggagctccctcacctcgtcgccctcctcgatgccgctcaggcacaccgcgcactgatccggccgcccaccatcatccgccgccgccgccgccggacgactactctcgctgccgcctggttgttggacagcactagcggcagcggcggcgctagcgctactgtaccgcgccacgcgcagcagctcgtcgcgcgccgcctgctccggcgccaccttcttggcgatcagcttcctcaccgacgacgaccccgacggccacgcgaggctcggcgcggcgacggcgaggagggcggacaagggtggcacgaggagcaggagcagtgcactcaccaagatctccatcactagctagctatagctactcgatccacaacaatgcagtgagacgcgaggcgacatgggagacgacgcaatatttatatatctgcgcagcagcttcaattcaaagcttaatgtcctctaaataatttatctatttaattaatacccactccatcttaaaatataaaaatttagaatcggataaaaaatactcttatattttagaatggaaagagtacaaattaagatgatcgtttaattaatttatcttcgtctatctctatcgctattgtacacagttgcacaagacgtgtccaacatcgtgatcaataggatggctgaaagctctagtgctgtaaatgtcagcttgtaatagaagcatcaatggctttaatatttgggtctcgttttcaatcggtagctacagatgaacttcatctagatcgtctttttggtttggtgcaaccaaattgggcatttgctcctctgcaagtagctatgccgtcgagcatcagtaaggagatatcatacttagttcgtccttctgacttttcgatgtgtttttgcattcaatatgcaatcctttcaggacaatgacttcaaagagaggtagaataacagatagagatcgtgtcaccgtgccattcaatgcgagtcctacctgttcacaagtcacaacaccatctcatatctaggcatctgtctccctttctccccttaatttccagagctactatacccaatcgatcacacgtctcctctctgtccctggttcatttttttttaagagatggttgatgcttcttcatatatagtccaagaaaccttacaaaaaggagggcaagttaattagcatgggctaattgagaaaaatggaagatttttctctcttaatactactaaacaggagaggaagagactagacatacatgcatggatgtaataatagtaaaatcaattgggacgtccaggattcaggaaattcagacatgagggtagctctccaaatcttgttctggtcaacttcttttttctaatccggattaggcaaaaacttaatgcctatcttaatcagtctgtaccaagatcaacttgaacatactcctcttcaccgatgttcactgaccaaatataaatatcccagagaggattctagattgccaaaaacaaattattcagagttccaatgcaacatacactttcggagtgatgtaatcgtttcttaatgtcaagctcaaaagttaaacagatctggtgcacttatagttaaccactgaggtattccttcacttccactcaataaataatgtatacacagtgtccagacttagggtgcgttcgtttggagaacaaagcgagtgagtttgtttcgttttccacgcgcacgtttcctgaactactaaacggtgtgtttttttaaaaaaaaattctatagaaaagttgcttaaaaaatcatattaatctatttttaaagtttaaaataattaatactcaattaatcatgtgctaatggctcacctcgttttgcgtatctttctaatattctctatctcgttcttctcaaacacacccttaatgtctgtctgacacaaacttataaaaataatgaatgagaggtaagactaccttacgctgccgctgctcacaagcttcaaagccacatggacagagaacaggcacacctatcttaatttgattcttttatactccctccatcccataaaaaatcaatctaagatcaaatgtgacatattttagtactataaatttgaaaacatctgctaaaatatgttatatcatcagatattaagttggttttttattggacggaaggagtatgtatctactagtacttttttttttatggaaccttgcatatctatgtcagacgccccttttcacccttcattttaatgaacagacgaagaccatatttcagcgtacagtccctcagagcattgcaccagtggttgaaagatacctaaaaatcaaataattattcaaaaaggttggacaaagccaaagccaggaaccccaacatattgcttaaataccaaatttgcaggaagcagaatgaaactgtcgcatgcatttcattgaaaaaaaaattgaaactactgcaaatgctagatgctagttgctgctgatctaccacccactaatgcaggttttggtctccaatcgctcccagtgcagcaaacaacaccggcaaaaaggacacctgaattgtctagctacctaccattaggccatcaattcatgcaacatgtgctcactctttgatcatcagtcgataaaacaagataaacgcattgacactggaatatctcattctactttgccacaacttccggattcatgaagagacatgaacaaaacagaaaaaaaaaatggaatagtcgttgaagcttccgaaattaagatagaagtacgcaagctttacaaaaggtataagctgggtaatgggttgcataacatatcggtatggagtagcgaagatattgtagaagcatatgaacactgtattcacaagcatctatctttgtcttcagaagtataaactattgaggctatctgacaatctctgttctaaaaccttttctgtgtatgcagttttcactccaggccaaactccttcactgatctaggactgcagatgaagtcaagttgaggattcttgatgttatcttgtagtattgatatctgaccctccttaacaagtatgtcttcctcaagggcttcaattttcttctttagtgaggcagtctcattttgcatgatgctgatggtttttctcagctgctttgcttcctgccataaaaggtccctctcatcagttactgttttcagcgttcctctaagggcactaatctcctttgcagattcctggaaatccagctggacctgactaatgatctcatctttcttcaagccctgctagtgcaacaagtatgtaaacaaacaaggtatacaaattgtaggttctaaaggagtgcatgggaaaaaaatgccactaatacaaaaggacgatcataagcatataatccgacatagagaattttcacacgccttgcaagttacaccactagaggctcctggtactggtcaaataacatgctaaatgtcagattatagactgtctctatacataaactgatttaaggaccctggtgaattttcatgcttcacttagtataacaaagaatatcacattgtaatctcatttaccatttatagtcagtttgtctaagcatttattttatgatccgtgagctgatactgatattcttgttgaccagaagccactaaaaactcgcataatttcatacgctaattcagagtcttaaaactttggaacttcttctacaataatctgaaacacctcagttgaagaacctatcaagaggcaaattgaagagcttccgttactgacctaagctccaatactaacagatgacctttttctctcagattgtcactaatatttacggtttaggtcatatgaagtctgatttcattagtgttaaacatgtcccttgtagcacacgtataaagtcataagttgattcttagtaagac

SEQ ID NO: 9198 - DNA, 71281 bp, Oryza sativa
gatttttcttcaggataatacagtaaaacagcatgacaagggaactcattgtttcaaagaagggttttgttggggaataagggtaggaaaaatctacctgaagctccaagtgcttagccttgtggttcatgcaagatagttcgtcctgaactctctggatctcatttctcatgacatcctgtatacgaagtgaagatgccagatctgactctaattgttcaacatcaagttcctttgaaaggagagcctcctttagcactctattgagtatagcctcttctttcagcttgagttcaggaatatcctacaataagaataagatggtggtaaacaaaggctcaaggagtcaaggttctgcacctgctgaacttataacacatattatactacactaattatttttccagctgagtgctcccctgtcttttcttattccaaccaaaaaggaaaaaaaacttgattgaacagaaaaagatttacagtaaaacataataggtgctcataccagaggtaactcatctgtgtgctccctggaaggactagatccaactacagtctctccagaacttccctttatattttccttttcagtgaggacagaactaataatccccaaactttgcttcagactctggattcgtcctttgatgctctggaactccaaagtgtagtcagtgacagttaatgcagctatgccattgccagcttcattttcatgccttttgcatttcattagttccaacaatttgatgcacagttggctagtcttatcaagcaatgacaagccatgtatctgcaagttatccactctggctagtagctcctggtcaagacgaattgaggacaagcgcggtccatttccagtactttgtatacgatttaaaagtgcaatgttctcttgccttagggactctgattcaagatgacaagattgaacttcacctcttaacttctgctcaactcctgtcagtctaataagttccatttgcattctcttctttatcttgtcactgcactcaacagatttcttatctaattcagtactgtatccctgtcttaagccactgattgttctttcttgttcattgcatatggtttgtagccttgaaatcactttatgcaatgctttgttctcaccatccttatcttccaagaatttcctgagatgatctttttcctccacagccttagtaaaacaatcatgtaactctacagatgaattctggagattgtcacaattgtttctgactttctctagctcatcaattagttttttgtttcccatttccaaacaagcaaccttattagaagcatcaaccttttctgcttcaagaaaagtaacctctcgctgaaaggagacattctgctctgcaagttctctcacccgatcacgtaatctctcttcctcgcactgaaatcttgatagtctgattgaccaatcgtctgatcttctatccatctctttctccaaagtagtttgcacttccatcttttccttctctagccttctagttctgatgtccaactctttcttcaaatttttgcattgctctttggcagcaaacctttctgtaaggcgtgccttgatctgtgaagacaattcatatgctagttgtttcctatcttcagtcaaacattggatcatctggaacatgtcatttgcgcttagcctcttgtttttggacatgttaagctcatattttttttcagaagagaccatgaactttgcctcaacctcttttgccctttggagcaacttgtcatcagtttctacatcctctgttgcaaaatacaagccaatatcagaaaaattgttgggcaatcatatatagaagagtatggtaatatagcatcttgagttgatacctgaagtaggatcgatggagggatgattaaagtcttgcaaatcctcatagatatcttcaacagaagtaacactttccgatttgtaatcttctaaatgtgaaaatctctcagaagcatctagcagacctgcatggtttctacttgcattgcacagtgttgtaatcttgcatgtgtctcttgtatcctcttgagctagttggtggagatgttcatcctttacatcctcatatgggtaagtctcaaggatctcttttgttagtcttggcaaagatggtactgtagactgcggtcgaggcggccttcccaaattcgaaaccgcagatctggtgggagagttttgcttctgtctctcaccaaggatggtggcttcctgctctccatcaatgtatcgatctagaacttcattcttgttcaataaattggttagtcttgttgacctgcatcgaatggcaatgggagaactaacaggagagtgccctgttgagcatgaatagcatctcgaaccaggagagtcactttgcaggactgaatgtgcttttggatcctttattgtgtattctcttggggctggacgcctttttggtgaccatgcatagcagctgcaagtcagtacgcactgttaggaccagcaaaaaaaatacacactttattatcatcactcagatgaaaggaaatggtagagtcacaattgcacataattcacttaatgagtgaggattgcaggtccatctaaaactattctagttgaaatgagtgaagaattacattgggaaaatgggatttacaagtaactgaaatgcctaaagaaagctctgagtgcattggctgaacaatttataaggagggcaatcaccaccgtataattaagcatttaacaattatagctgataagctgaaatgagtaaagtttgcaagtgcacaatacttctccttttcttgtttctactaatatggataaaaaagggaatagggtgttgctaccatgtattggtttgatgatggcaaaaacatcctaggtttcaatgcactattgaactgttgatggtaatcaaaatgtaaaccaatcacttacttagcaacatgatcgggtgcatcagattcattaaacagagaagatgggacatcacccgagaagctgaagctccgatccttcaagaaactgttgccggctggtgatgagaaggacatagacctcctgagctgcttcggattagatggttcctcattgttcagatttcgacgccggctctttgatctacacacttttgtgacaggggaattggaagcggaactggagctgccattgctgtcacctccgtccaatgccttcttcttaatcctgctatcatcgtcacttggtgttttaccaccattcccagtgcttgcggtggatgatccaaagaaaaagaaccttctcatcttacaaatgttcagaacatccgcagatccccacaattgaatcagtccctacaaggagcgaatcttgatcagcaaagaagtagcaacgagaataaatcttgtagcaactactgaatgacaccagatgatctgcaaatatacaatagcaaacccttgtgcgagggaggaatagccaataataataattaaacaggagtaacgaaccaagcaggaaaagcgatatctaaatgaagtttcaagcaattccacgtatccttttgcagggaactctgcaactaaaccacacatcaaactagtttgggccaggaaattgatcgagcaggtgacacgcaaggctaaatgaaaccaaaacacgccagcaaagcatcaacaagccacaggagacaaacctaaccccagaattcagaagcaccaaccccttgatttggcgcttgatcccggacgcaacaccaaatccaaaccccagaattgagattcgcaaagcacccgagacaccaaaaacgaacccaaaacgaaacgaagtcgcaggaagggagaggaggcgaacctctcgcggcggagggagacgaaagggaagtggaggagcgtggtggctttgccctaccaacggtcaagaaatttggggaaaaatcaaagcaaatcatacgcattgattgcgatttaacgatggagacgcgaatccgggggaaaaggaaaagggaaaaagggttttcaagtcgaggtgggagcgggacgggaagaggaagaggaagaagaggagcgtcttaaatgggccaggccgagccgaatcgcttctgtgggcttaattggttagatgggccgtagcggagtaatgatgcgtcgagagggaataagttcaccagaggtccctcaacttcacagcgagatttttcgaggtccatcaaccacaaaaccttctgcccctaaattcagtcaaaccgttcaccaccggaggtcctttggcagtatttttgcccggttttcctgacgtgacatactagtcagcaaaaaaattaaaaaaaatcatacggctcacatgtcagcttcacatatctctttttctcctcttcagtcttcttctcctcttcacttttctcttcaccggcggagcagcggtgggcgagaggttcggctgctggcggcgccgaccagcgacgcaagagaaggggagggcgtcggcggcggcgggaggtggccggaggaggaggtcgtcggcgagcgcgctcctggtcctgctctggctgttgatgcggccgggaggtatcgccgatataggggctcgtcgttggtcgtcgtcacgggaggtatcgccgtccgctggggatgtcaaaatgcagagagttcgtgtcttagaagacggccatgagcttggcttctcccagcacatgcccctcgatggcgtccatcagcttatccttgatcacctgtaagcaatcaagaatcaatcacagttaattaatccttaaacagcaaagataatcgctaaaagattgttcgatcgacttgccttgttgccgaggtgcacctcgtcgtcgaggacgtagagcttgaactggatgcggtggccgcaggagggagggatgacgacgacgccggccgcaccgccgaggccgcgacttgcgccagggccggcgccacgctcgcgccgagcggccgccagccgcgcctagccgcatcggcgccgccgtcgctcggccgagctcggctgcatcggcgccaccgccgccgcgcctgcgcagtagcagccagagcaggagcaggagcaggagcgcgctcgccggcgacctcctcctccggccagctcccgccgccgacgacaccctccccttctcttgcgtcgctggccggccccgccggcagccgaacctctcgtgacccgtgggccgtggctccgtgctcgttcgccgtccgcttcgcccgcagcccgcccaccgatgctctgtccgccgcccgctccgcccgtagctggccgccgctccactgccgcgctcgcccaccgccgctccgccggtgaagagaaaagtgaagaggagaaaaaagatatgtgaaggtgacatgtggtttccacgaaattttttttttttttctgtctaggatgtcacgtcagcaaaactgggcaaaaatactgccaaggagctcgggtgaacggtttgaatgaatttatgggcgaatatttctggttttgtggttgagggacctccaaaaaatctcgctgttaagttgagggtcctacgatgaacttattccgcgtcgtgagcgactcggcaagtgggcccgtggcgacgcgccacacacacgcacatctgcagttactcactcctcttcgccgtcgccattgctgagctgctgctgttgctgtggctggctgataggcgacggcaatggcgccctcctccactcctcctccgccctccccgagccgccacctccttccggttttctctacacccccgcgtacccttctccagtcgccgcaactcacacagacacagtactgcatccaagacggacggccgtgccgcgcaaatttttcaccggcgaggcggcgacgctggattccttcgccgtccaagtccagccatccggacgctatccagacaggttctttcttttctttttcagattttcttgtttatattggagtaatctgctagcagaatggatgagaactggttggcttcttcctgatccctccaaaccctttcttttggggggagtttgcttgacaatatgtatatagtctcttgtcgacttcaattctagcacatgaattaactatggcagttacaaaatcatgcagaaggtgatcctaccaccaacctgtggtgattggtctcaaattttcatgccctagtaatctctgcacagctttcagtgctgctgctgcccttcaaaatgggggtggcgccttctaagattgaggatgatagggccctcgtgttatgccaggagaggaagcgtttcgtcagagaagcaatcgacggaagatgcgcacttgcagctgctcactgtgattatattcggtcactgagagacactggctttctgctaaggaaatgttttgaacatgaagcatctgaagaatcgataccaaataataaatcgccgtcttcttttcaggccagtcatatgaaagctgccatgaattccattagaacttatctggagaaggtggcaactcctgtgacagtgactatggtcagtgcctcatctcaagatcctactggtacttcaccattggaccattttgaccaaattcacccaggtgacaaccagttttcacctaaagaaaaggatagatctggccaatgtttggacaaggtggatgatcctagacccttcctagaggagggaatcccagagctcgaagaggaaggggagagaactccttcgaatgaggaggatggttttgcagaatcaaaagatgattttgcaaatgaggaagagaatttctctgaatcaaatgatgctttcctcagtccatccattgaaacgtttgtgccagtgtcaaacagcaacgacgtgtctgataaaaatagttcaacagacaaggcacctgagcatcatggtcatggaagtgtggcatcaaaagatattgctttaccaaatactggttgccaaaatgataacccccaaaatgagaggagaatgactgacattcacacaaatgaaaattatagcaattctgctgtgtccccagttaatgtcgtaccaccttcaggtgctgcctttcctatggtctcaaaggaaccgtatccttatttaagcatatctgtgaagggcctatatacaggcatggtagagattgagagattattttccagagcttgtgattcgggaaaagaagtcacaagggttctcgatgaagataaattacagtttcgcgccctactaccacaagaaacaggttagatatcttgcaatgcttttttctgttgcactatttcttttcatatcttctcttgtaatttgaggtgcacaataatttctggcagcgcgtggatcagcatcatctagttttctgtcaacattgtttgcctgctgcagggaggatgtccctcttcctgaaagtaagcttttttttccatttattagtatgaaattctatttcctgcactgctcagccctatgtactccttttttttatagacatatgacatatcacatggaacttgtaatgtttctgtgtaattgttcttattgtcatactcctctattgtaatagatgatatcatactctgctattgatctcatttagttttgttttttttaatctctcagctattgcattttccttatattgtaacaaatggtgtctcatatagtcatatcttagagtcaagattgtccgtcgtaatttgaccttgctgtttctttagtgttctattttcctgtgtaaactgtaatacctgtgtgttcccactgtacaatgaatttaatgtaccatggtataatgcagctccttctcaagctgaggtaaaataccttacctggcataggtcagtgtcttcacagttgtcgctgtctagaaatcctcctggggctattactgtcatgcatacctcaacactagataaactgtatgcatgggaggaaaagctttatgatgaagtcaaggtaattagcttttttgtggctactctatgtgaaatacctaaatcttttaattttggctgacagtttaatccattttgatttatgttccacatgtctgattgcttgtcacaacatgactttcttttccccgcctttcagaaaccatcgaatatacattgattcttctgattaatcccttagctggaactccctacattgatcgctagaattcatagatagattacttgcttctttaatcatagaggtttcagatattgtattagtcagagtttatgcagtttatgactagtggtagtgattttttgtcaagaatgttcaaataaaatctgataattcttctgaagtttcacaccaaatgattatcatgattctgctttcaggtcaacagtgccatatgcaggagatatgatgagaaatgcaagcaactgagagaccaggagtcgagagggaaaaatcaaattcttgttgattttacccgcgctactgtaaaggatttgcattccagaattctagtggctattcagaaaatagacttcatttctaagaacatagaagacataagagataaagagcttcaaccacagttggatgaactaatcagaaggtatatttgccgattcagtttttatagaataatttgtagtttgatgtgcacaagaagagagtattgtgtgcttgagtgtcatgcattgtttcaggattttctcagactgttttaacagaatgcaccaatcacagtatgcagtttgcattaaactgacagctatataaatctgacagtgtctgcctgtctttactgtagtttaactaggatgtgggaaacaatgcttgagtgccatcatcttcaacttgcaatcatgaagctagtatccagcaaacggagtgtaaaattatcatttcagtcagagtctgaatgccaagatgcccttctcctctcagctaagctaattaaattatgttcagacttccaaaactgggtggcatcacacaaggtttacctgtctagccttaacttatggctgcacaagtgcatgaaaccgctgaagaagaggaagggctccaggaagcaaaatgttgttgatgtttctctaacagaatgtgctgttgcacccatatttacaacttgcgaaatctggattaaattaattgacgatttactgaccaatgagttggtgaaagccattgaaaatctcgttgcagatgtcggccgttcctttccgcaccaagagcaggtgctaaatggtgaaacaggaggagaaatcctgagaaataatgcccctgctgatgtacagtcaagtctgatggcattcttagagaagcttgaagccttttcagcagtttcactgcagaagtatattgatctgcagaaaaacatcgacgaggcaaaggataggttttcgagagaagattaaagtacgattgcaagtagctcaagtgagctcttagtaatatggccccccttgagttggatgagtaaaatgttccatatgtaaattcctggttgtgatgatattgtgtatcgagtcgttttgtcagttgtaaatgttttgtgtagtctctggtgggagtatggggctacagttaagttagaaacatgagaggacaatacgctgtaagatactgatatgaacatgatgtatgcaccatttttccagaacagttcagtgatttgtcaatgtagcgttgaaagctaagtctccaatctcatgaatttgacgaagtacaaatgatcagtatgaagactttatgaaagaacaagtcctcttgatgcatattttagatgataccatcatcatccatgtagggaaaaagttatttctgtcaaatactgggtacctgttccaatgccccagcacccagctgggcaagtgatgtgagctgaaagcctgaaacattcaacttgcctgacagagcacacggatgcctaactagagtggcattcaactgtgatgcagattgctgctttctcattataatacgggaagggaatcagaccatgcatctgacctctaggaaacgaacaaacaggtcgagcagattcctgcctgtttaccctcgagaaaggacaaagccaagctgatccatggccaaagtcaaaagccatttgcactcaccatgatgcagatgcagtgttccttccctttgtttctcatatatacaaacaggcagcttgattgtcgagtcccctagctgctcaaactgaaaacaaaagaatactggtctactgtttgctgttcccaatatttattttttttcagcatatgagaaaatggattaggagatgtcatgctgttgcttaatttaataatgccagtgttttaatagcataatgcaggagagaggcaggggtttagaaaggtacaagcaacaaccatgcaaaaaacaaagctctgggccgtacccagcagctttccatgttctgaatttttctgatgaggcattgacctagggatagggacgttctcgcagcaaatacattacatgtcaaagggaattatgcgacaaggagatggtccaagcttaattgctttataattcctagggaatccggcatggttaggtacagttattttagtttttgtgtacagatgattatatatcttatatatactcctagctagcaatctttgttaatctgaaggtgttagttcagtatattctgaaacatgtacgactgatgctattacaaggaacaagtggatgaggagcaggtgtgataagtcaaaacagcctagtgtatcatcacatgaagagagctctctgatgatgtgcatggaatcctttaaataatgcacagtggatggccacagcatggtgatctcatcatgccctcactacttatgtcatttcttttccaatctaattgccacacattttatcttttgctgatgaaaatgaagaggactgatgagagtttcaggctgtctctgaaaacggttcaagtcagaacaatcataccgtaattttctcccttttctgcttgatcagcattcaacaacggatcgcattctggatgacttggattacgtagatcattgaacaagtaaaatacatctccgatgtcaaagtaggttttcagctttgcagttgaaactgacctatgcaagatgtgctgattagtgaggtaatactacgagctagtggaagtaatcaagtgtttgatggacccaatgacacacacaaagtcttcgaaagcactcaatcacaagggaatgcctcatgggatgtcttgattaaactaatttagccatgctcctacctctcgatcggtgcaaagctgctgcaacttgtggatttgtagtagtgttgactgctagcttgtgggttcgagattaattggagtgggtggctgctgaactgttttcaacgctgacaactgccggaaaccgtcaaacttgttcagttttgtgtaggagtaatctataagcctccgtccatgctgtcagctcgcctgttcatcctgtgcgcctctcgtccctgtgtgctgccatatgctgctggtcagctactatcgcattctcagaaacctgacgaatggcgatgcagtttgttcagagaacatctgtccacgccttgtttgagtgttcagactgatttccgtagtctgaatcacagtgttcagaaaacgaataaggctgtcagaagcattaccaaattgccctttcctgattactcatctaataatttcctgattgatttacagccttacgcaaatatgcacatgacagcagagcacagtggtggttattgaagaaggggcatggaagatgtgcagtcgcattttgaacacacatttggacttgtgcagaggtcaacgaatggtacagcatcgatgaggattacgcaatttggtttgagctcaatgtcgtcgtcgcctcacgagaccgattccatacagttgcagggtttgattattactattgttttttattcggtggacagacacagttacagaatacaacatttttctttttctgaaactgaagattatagtattaaagagctagagctggagatactccatataggcatcgtggaatcattcaaatcgttggccggtggtccttttcactggataggtgaaaactgcaagctcactcatttacactgatttacagtggacgcatagaatcaccgtcagaaaagaaaaccaaggaagaaacgaatattcagagaaacgctttcaggtaaagttggcaccgcaccatggacagaacgaccgatctcctctagatcttggcagaataataatctggtgcagtagtgagtaataatatatctcatgcggttttgtttggtgacgttacggcagccaatataaagaagagatctttaaactttttctctgaaagaagaaagaggaaatctttaattaggtaatactccatccgtttcaaaatgtttgacgccgttgactttttagcatatgtttgaccgttcgtcttattcaaaaaatttaagtaattattaattcttttcttatcatttaatttattgttaaatatatttttatgtaggcatataattttacatatttcacaaaagtttttaaataagacgaacggtcaaacatgtgctaaaaagtcaacggtgtcaaatatttcgaaacggagggagtgtggtttaggtgctagagctagcatcgatcggaggtggatagatggatgaatggatgcagagtgtgatggacaggtggattgtgattctgggtagggcaaatttggccatttttgatgagcgaggttgatcgagaggggtgtaggggctagctaaggcaagctaagctaaggtggagtgtagagagagatctttgatgtttgggtgggtaagggagaaaaagaaagaaaatctggtgagagcgacaaggagcccaccccctctaccccccgctattcccgcgattgtactgctgattagccgggaatggatgctcgatctctcatggataatttgcacatataatgtgtgctactgctgcctttgtttgttacttacatatgctgctgattgctgctcgatgaaaaggatggaagaaaataaaaaaagtttgaaataaattgtgtagtattagtggattcgactccctgttccttctggtctcttggcagttgtggaagaagcggaacttctgcagcctcatcttttcgcttatacttatgtttatcagccaaaatttgaatttttaacttcaattttggagttgattttgagggtttttttttcatcgaagtttatttgtcaacctttacttttagatcgttaagaatatgtatataaaagttgtatttcacaaattatttttcgtttgcaaatatgttgtttcgcttatcccccgataagtgaacgatggggctacagagttttcgactcagccgtctcctcggtctttgtgcgtgcttgtagtgtctgtccactcagaaggtcgtatgcggtattccgctggtataacaacttttaggggattgctgtgagtgtagcgtggctccgcctcctatctctcgtttgtttggagtatcctttgtttcatagtagcctcttggtttttcgtccttcccccatcccggcataggcctgtttagtcgattgcgttgtgtaattaaacttaatatattaacgtgtaatcttttacgcgttcacagaaaaaaaaataatattaagtggatgcataggtgagacgttggcaagcatattgcggccgacagacagttgaaaggtcgtgcatggcgaagagaagagactgttgctggcttgctcgcttggccagcagcacagggatcgagcgagttatacctattccatgctcgctacagttagtacgaaacacttggcaattaatcaattaatcagcaactagtactccacatgcatgcagttgagttacctgaaatcgcgaaatggcacagcatcagcatgggctcccaaaccaaaccaccaagcgatatccaataggcgatggatggcatatgccacatgccaccgtcgcgcgtcgacagcgccaccacgcgatacggcgcggcgcggttggcggtggcctccgacacccagacaaaaagcctcacctcaccctcacccgcacacgccgacaccccgacgcgttttccactgggtcccatgggccatggcctctctctatatactcggcccatccccgcctcctcctattcccaccttccacctccacttcctcctctcatcgaagctagctgatctgccatggacgctctctcctgcctggcgccgcacgccgcgctgctgccgtgcgcggccttcaccgacgccgacatcacgcgcgcgctccacttctcctcctccatgcccgacacctcctcctcaccctcctcatcctcctccgcggccttcctcgccgacttctgcggtggtggcgccggaggagggttcgtggtgtcggcgccgccaccgacgatgccggcgatcacctgcgagtccgttctcgtggccgacagcgcgcgcccgtcgccggccgggcctgcgcggcggcaccagcagcagcagctggggctgggccccgcgggtgggcgcgccgggaagcggcggtcgcgggcgtcgaagcgcgcgccgaccacctacatcagcaccgacccggccaacttccgcctcatggtgcagcacgtcaccggcgtccaggccgaccccgcctccctcgccgacggcgccgccggcatccttcccaccaccaccaccactgcgccgttcgacgcctcctccggcctccacatgctcgacaccttcgccgccgccaacccgctgctgcaagccgagcaagcggcggcgcttcagcagcagccgtgcttccccacgctggactcgtcgtggagcgccgtcatgtacgatggcagcgacctcctctgagcattccttcattcccagctgctgctgctgcactgcagtgccaacactagttaattaggacgccgccgccgacgacgacgacatagctagtagatttcttgctctcgatcgcagtggccggcctagctagctctacatcgatcgatcaatccactaccatttcttacttgattagtttgtcgttggagccaagatcgtatcgatgatgctcgcttgatcaggttaagttgttgagttactgtagggtgttactactagtattattgtacagctagcgcattatgcatgtcatgtcgtcgtccgtcggtcaaacggagtgtggctgctatatatgcccacattttatgcagtagtagctgtctatagctgatctcagttaatttaatttgtactacgtgtatgtcaaagctaattagtcagcagtaaaacatcagtttctctcgcaattaatctggtgaattctagaatgcatgctaaccatcgtactactttcgtttcatattacaaaactttctagtattatcaatatttatatatatgttaataaatctagatatttatatatgtctaaatttattaatatctatataaatataaatataagcaatcctaacctgaaacggaggaatcacatgcatagacaacgacttgctccgtgctggagtaattcattggctcgcaagacctgcgtgttggaggtagttgcagctagcttccaaacccacgatctggacatcattttggatttaagctatatatctgcaggttaattaattattattagtcgcaagaatgaaagatcgagagagatctgttaaagaataaaatatacggtaaacgagcgtactcaattaatattgccgcctttttgataattgaaatgagcacgtcgtgggtcggtggaattgacctggtcgcaccatggatgctgctgcttcgtcatcgacagacggatcatgtatatgatccgatcgagtggagatggaaggccgaggggtttgggccaggcccattcagtctcttgccgcctgtactaggcttttctcatcgataatatatgtgggcccatactaactaaaaaggaattttgcactatttatcacaaaacttcatgtattttacactatttatcataaaactacagatttaagagcttgtttcacaaaattatagatttagtgtctctatttatcacaaaactatatgtattttgtacaatctatcacaaaagaacatatttaagaacttgtttcacaaaactatagatttagtgtatttgtttatcatagaactacacatttagtgtcttgatttatcacaaaactacatattttgtgtctccattatcacaaaactacatgttttaacctgtagttttgtgataatgaagacaataaacctgtacttttgtgataaatgaagatattaaatctgtagttttgtgaaacaagttcttgaatctgtacttttgtgatatattgtgcaaagtacctgtagttttgtaataaacaaagacactgaatctatagttttgtgaaacaagttcttaaatctgcaaactttaatcagcctaaaagtacagatttaacaccatatttttcataaaattgtagattatagcattgtataaaaaaatgaagattaaactcatttctgttacaaagctacaacttttataactttaatagggctatggttataaactctaatatcggtagttctttcataatttcatcactaaatatataactttgggatacgattccttaaatatatatagttttgcaatagtttgtttgaagtacttgtacttttaaatttactcttttacctctcgccgaacaacacggccccggcccatgataattccatcaaacgaccgctttacaccggaattgctatttagtgcagcagagttcttaactcattttttttccattcataaaagttttcgtgtgaacattttttgaacaaaagtattcgagacgaaagtttaaagaaaaaagaatgcgctgggacctgggagcctggaaacacaatcgcgctaaatagcaatccccttcacaccgagatgaaaaagtctgcacattaccactgagaaggcccacaaataggaagcccaaaacctttttgggctcccgccaatttagcccatcggcgaagctgtctccagtccacttgaccacttcccagaactgattttattttctgggcgaaaaagaaaaaaaagaaaaagaaaaaaggttcgcgtttctctctcttgggcagccatggcgtccccgcggccgccgccggcgagcctgcggagcttcctggacgcgcacttcgcctcccccgaggacctcgcctccgcaccggcgctcgctgagctcctgcgccgcgagtgcgtgggcctggatgcatccctccgccgcctcgaggcgcagctcgcgtccgtatccgcctcctggctcgcgcgctccgccggcgctcgcgcatctctccgccgcatccgctcccgaggttcgcttctctgaaccctagtacggtttttgtcccccttttgtttcgttctggatttgtagggacgctcactgttacagtattattgcttcggggattccgctcgggtttcaacggattttatcggtggtaggcgggggattcggagtggaggaggatgatggcgaggagacgctgcggagcgcggagctgccggcgcttgtgcaggagatccatcggatcgacgccattcgactctatgcgggtcagccttccttcgtctcttcgtgctttcctattaacttgaaaattccgatattggatagttacagtgctaacttttgcaagttaatttggattatggggtcactccgattttagaaaaaaaaaagctcttagaatttcagtggtgttttacctgccaaatcagttctgagttgggcaatagcaagttacgcttgtgtcgagtaactggaatgtcccaatcttggactagttacaatattaaatttgcaaattagtttggtagatgtagttgttacctactaccatattagcctgtatgcttgagcattgagtaacttatctatgcattgcaatatggatctcttgatgaattgtttcttcatacttcactagacactaagtacttccctgaaataaggcactagctacaataacctggcaatgcacttcacgtgcccacggcccacccaccactcaatctcaaactactgtaacttgatgatgtcaatggagaatatctgtgttaaacaaagctattatcaacatcgagtttttttctcaacaattgttacatagagtcaggggcggaggcagcattttagctagctgaaccatatagctataaattttttgtgcaaattctacgtaaatttcagtgtttctccattgaaaatttttgccacgtgtggggcccaagcccaagctgccccacacgtggctccgcccctgcatacagtgcaatgttgaccatgacctttaaactgattaacgcggattacctgccagtgatctccatgggaacatgccatttgcgctaaagaatttgtttggtgctgcaaattatattatgtctcctccatcatatccggcatgatgtaggaatttgtagtaccttctgtaacttttctatgctgacattccagaagctgctctacagttggaagcttttgttggtaacctagaagatgcaacgttttccatcgttagacaggcctcaaagttgaacttgtcctcggtatttaggccagcatctaatgtgagaagctgagaaaccttctctttcctttttcttccttaattgttattttaggtacaacctacaattattggtcatgccgatatgacgtctgttagcagtatgtttgtttgatatgttaatcacgcttttttttctctctccaaatgtaggaaatgcaatggaagcaagaaaagttgctccaggctgttgatgccatgagggatattgaactagagttgctacggatcagcacgaataggccacaatggaccaatcttatcatggctgttgattctagagtggacaaaaccctagcaattttgagacctaaagcactaacagattatcgagctctacttgcagcacttggctggccaccttccttgtcttcaccagatgcagcaaataataagtactcggaaattccaaaccccctcatcttaatgaatgaggcaaataaagagaagtattcacaaagttttctagcactgtgtgctctgcaacatgcgcaagccaactgtgaagcgcgtcaatgccaagcgaaaggagcaagtgctagcatgtcagattcaaagtactttgataaaactgctgcatgctttgataatggactttgggcaattgatgagttggttcagcctattgcttccaggttggaatatcattttgctaaatggtctgaacagccggagttcatttttgcccttgtttacaaaatagcaagagattttatgggtggtgtggatgatatattgcagcctttgattgatcgagcaagacttgtgggattgagtgctaaagagtcttgggtaactggaatggtgaaaatgcttctaggttaccttgagaggcaaattttcccagtccttgtcacatcttatcaggctactgatgacaaatttgaagtacattcctcatggatgcacttgaatgacctgatgattacttttgataaaagaatgcagttgcttgcagattcaggaatacagaagatagcttcaatttctgaaggcctgtccaggtccttatctgtcttttccatatatagcgagcattctgattggcttcacatgtgggctggtgtagagcttaattctgcacaacataagctcaaatctgagatggaggatgagataaattggtcatatagtattaaagagcttggtctacaagagatcactagtaattttcttctgtctacaagagaagattacaaagctccaacaatttctgaatttgtggtcaaaactgcatctgctatgattgaaagaggccatgctctgccaaataggggattaaggattcagtataacagatcctcttcagtccagttcctgagtgatttctttcttgtcttacgtgaacgatgtgaagccctacaactgacaaatacagctttagaagatgattctttactaaaagcttcatttgcaattaatgctgctcgatattgtgaatatgttcttcgggaatgggatgacgacatagttttcctggagatgggtgcccataggaaacatgttgatgaaggccagggacaaggccacaaacacagtgcccaacatccatgttctttctttggcgatgaaatcgccttcttggctaaattggggaccgattatctggaacagattatgtcttccgttctgctcgagtttgaagatctatcctgggactatgtccaaaacattggattgcccaatgagcagatccatccagttgatgaggtcctggatgaagaaaatctcggagtatctcctggatttgttgcctctctagaagttgtgagagacagaaccaccaaactgatgctacatcttaattcgaaggatttccttgatctgtggaggagtatagcagaaggcctcgactacttcatctacagcagcatacgatggggggagttgacattctctgaccaaggagttgtacagctaagagtcgatacgaaggcccttctccacatctttaggcccttctgtttaagacctgaagccttttttccattcataagtgattccctgaggctgttagccatgagaaagacagatgcacgatacctgttggaagtgctcaagaatgccaaggagaatgacagttgcctgaggcaacaaggactgcaacatgtaaatgcaagccaagctatgaaaatcttaggtagcaaaaggtctgatggataatcttcttaccttagcgtagaagacctgctggagatgatcagaatatgattttgcctatgctgggctgctctatgtcactatgatgacggcaatcttctgcctgtcctccttccaggaaacatctcttctgagaagtttaacacgtggttagtggttaccggctgcaattccaggcccactccaaggataatgcgcctgttggaacgcaggatagcaaaacagtttgcgtttcaagattgaagagacttatctggtgttcgcagcagcttcgcgttgaaactagttttggcatgtactacattctctccagggtgatgagacctgcgagtcttggacgacaaattggagatggccgctttgcaacgcaaaagtccgccgccgccgccccctgtttatcgcttctttgaccggctcgatcgtaatcaacccaaacacatcatgttgcatgcaaagctagcagatgtaacaacaaaatattcaagatctcgtctgcctcaaattctctgagtaatatagtcaatgttcaccgtctcgcagactatgattatgtcgcatatctcatgtatgccgtgttaatcctgatccgtaccttgaaaaaaaagattataatcttaatcttgatctacctggtcaccagttgcatgtacataaataaaaccgccagatcgctctcctttgactccaattgtttgacgcagcgaagatacgaggatccgagcgtacagtgcttgcagatgccaatctatgacacccattaaaactcattctagtttgactaaaaatttgtttctatgtttttggtttcttcccagttcgactaaaaaatgtttttatgtttttggttccattccagttcgactaaaaatttgttttatgtttttggttactcctacttggaggagaggccaacacaaaagaaaaggttgtttttatgtttttggttactcctgcttggaggatagaccaacataaaagaaagaaaatgtcaattagaaataatatttgctgatcaggtcaagaaagatgagcaggagctcatgttgatgcacatgcatctgactttgagcttgcaaaaatgtagtttcttctttctctcgaacacagaaatgcagactattgataatatattttattgaaccttgtgagatccatgccctgaatcctgcattctacggtcaaagcccaacaatctgtagaagatgtgagccagtatctatcagtttgaatgtgtcaaaactgaaaagcaataatcctgtcttggtaaaactaactgcaggacaggagctattttgtgctagttaccggctacaagcagacagatcttcaacaactgaaaatgatgtgatagtgcacattactaacctttttcacactaatgtggatagctactagaggactactgattgttctgttcttgtcctttgtgagcactagtttgagctgttactgaatcacaccttttgtttcttccagcactgtactctgcagttgacaaagtagcaaattttgccacctgtttcagtgttagtgctgtatgatgctactagtagctgctaagcaataaagtttctctccgaaaccaaagaaactatctttttctgccaacatatgtattttttttcttctacccaacatgttcaaagttagaagctgtcaaagacttgcacctaatgcagttcccattatgaaccattagttttattaatggtgaatgccttgcctgcatcaaattaattgatggtgtttaattaacagggaaggctacatctaattagaggtaattaatttatcagcactttggttgactgacaaaactggaggaagcctccaagtaggcatctagtactagacatgtactcgtagtcagtcaactgacagtttgatcagtcatctctatcccttgaattctttgccttcctgtccatatattcttccatgcctcccatcacaacctaagaccatactccattttggagttcgcagcaactgctcatctgggattgcagttgcaggtgatcaaggattaagaggttcatccaaaatggggaactgcatgggctcatccaagtgcgccagtgcatcggctccacttgaatcaagtaagatgctactctgatatatacatcatatttctgttcgtggtttgattagccaagaaacatgatgaggaagaagcaatcaaatagacaattagcagtatccatgctgatctatgtaatatggtttgaaaattattcagaggttacgagaagcagcaactcgacgacgacgacggacaacacctccaaggcatcgcagcgcagctcgtcggcgttctcgtcggggcagttctcgcgagccagctccgacgagtcgtcggcggcgccgtcgctgtcgtccctcaagtcgttcaacatgggcgacctccgcgcggcgaccaagaacttcggttccaactcgttcctgggagagggcgggttcgggtgcgtgtacaagggttggatcgacgagctcaccctcgcccctaccaagcccggcgtcggcaagatggtcgccatcaagaagctcaagaaggagagcttccagggtcacaaggagtggctggtaattaattaattaactaactacacttactaatcatttcaacttttcattgattaattaaccttcgatcacttgcaggcagaggtgacctacttggggcagctccaccatgagaacctggtgaagctggtgggctactgctcggattccgacagcaacaagctgctcgtctacgagtacatgctcagaggcagcctcgagaaccacctcttcagaagtgagtagtatatagtacactgtacactgatcaaatcgaatcgattcttcaattcagaagtgaatgtaatggatgttgcatactgtatgatgcatgcaggagggacgcagccgctgtcgtgggcgatgcgggtgaacatcgcggtggacgtggcgagggggctgtccttcttgcacgggctggagaaccccatcatcttccgggacctcaagtcgtccaacgtcctcctcgccggcgactaccgggccaagctgtcggacttcgggctggcgcggaacgggcccaccggcgacaagagccacgtgtccacccgcgtcgtcggcaccaggggctacgccgcgccggagtacgtcgccacgggccacctctccgtcaagagcgacgtctacagcttcggcgtcgtgctgctcgagctcctcacggggcgccgcgcgctcgacgccgcccgcggcgccaccgccgagatgctcgtcgactgggcgaggccccacctcggcgatcgccggaaggtcaaccgcatcatggacaccaggctcggcggccagtatcccaagaagcaggcgcaggacatggcggcgctcgcgctccgctgcctccaccacgaccccaagctccgccccgccatgcccgacgacgtgctgccgcagctgcgcctgctgcagcagaacaccaagccatcctcctcgtcgacctcggcgccggcgcacaggtcgaggccattccaagcgctagcgagctagctagctaggcgtcttgttaattaattacttcgtcatctctcaattactccagtattatttgtttgtcaatttcatgctagcatagtagcatgtggtgtctatacagacaaaagaatcgatgaacatctagctacctagtttgtaattagttaggtaggagatatatatcattgctgtgtgaaaattgtgaattatatattgctagctgcaaattaagtagataatattattatagctaggttcagaaattccatgcatttgtgtgcatcatcagtatagagacgattgaggatttgtgatttgttttgacactatgttcttgctttcatttccttttaccatcaaatgaaggctttgtttgctcatgccaatctgttgaacttcaattgattaattacggacgctgttagagtttttatcgaatatgtgtacagagtcggttatagttcagtaattggagttgtactaggtatatgaatagagtaagagtcagaatctatcctataatctcttttaaatagagagacggacctgttgtaacctcatatcgacttagcataacgagagagaatagctgccggtgacggccggctgtgagccgttgtaacttgtaactttgataagcgctataatatgctggatcggggaggagcgcctgtaatcagtaccccgaagatataggcttcggctgaacctcgttaacaaatatcatatctcggtatcgttattgtgtttagatatcctatgatgtttcttccgtgtttggtgagccggttttataacagacgcttctccttcatatgtggagtaattagcagcttcaaaatggttcagtcagcgctcaagacgtgcacgctacacacaattagcctagtcatacagcataaatcagacgacaatcagtaataatattcggatttgctgcctcacttttaaccgtgcctaatttcgcatcttcgcgctttcagaaagcaagaactgattaacaccactattacgatatctgtctaactttgttaaactggtcatgatctcgcatatatatagatggtatccacacactttatactttcaaaggacagtacgtattcacacactcaagtttcaaaagatagtattcacacacgaacttggtgatatattgactatttgactagagtcatccatttcatcatgattgcgcgccgtatgttgactaaaatgacaatcacttcctgcaataacatacacccttcatcctaaaaataattaacttttagaaatatatttgaacgttgtctatagaagttgtttttttttttgacatatggaatacgaagcttcttttgtagatcaaaagaggatccgcttcttttttttcccctagacaatatggcatagcgaagaggtagagagttaattcagtgcattataaggaaaaaagacagttaatttaaatcggcgactctgttagggcatcattacgagtaataaatataatgttcagtgaacaagaccactgaacttaactctgtatgatcactgaaaggaggacaattgatcttgagtagagattcgatcaatttaggcccaatggattacagagaggcctaattgcaaaaacgagcccattaggcagtttgcatagacggactgggctttgcattttcgccgggcctattgggcttttcttaggccatcatggactggcccacggaatcactcccgtcactcctcgagtccggcggcagcggcgccggcgctggcgacggccacggcgaggcgtatcggtattggggagcggcggctagagagaaggtggtggcgagatgcggcttggccacctactcggcgtccgccaccgtggcggtcatgcccaagaacaaggcctagggaagcaactgcggcgaccggcagtgccgcggcggcggcagcgagccgtatcggggacgccacggcttgagaggcggtggcggtgagatggtgaggttggccggctgctccccacccgccatcgtggcggacattccagtataggtacggcaaacctatgcacaaacaaataggcaactatcttgaatcagattcagactgatttccttcagaattaagccaagcaatcaagcaccattgatttttcttcttgttttctccgactctgagaatagtttttcgtgcgccatcttatcgaggaaaatgacggcacctggttttgcttccccgcgacgtgcagcagtggatggagaagtaagcttcaaacagaatgctgatgacgtccctatcggttcttatctcagttcctccccttctccttcttgcctagctttgcttccactcatgcaactgcttttgcacaacttgatgatgcatgcctcgatcgtctatctcatcttgtagtgcgtttcggcctttcaggcatatatatggaccgtgcattgagttggtgtgagctgcgagctcattgagcacaatggcagtgcagagaacagatgctgcctcttggctccgtgagctggttcttgtttacgccatgtgctggacagtctcactgggttttgttgcgggtcaaaccgggcagttgaatgtcgatgcctcgccgcagaatgcaaggaagatccctgataagatgttcggtatatttttcgaggtgagactgaatctggatattggtatctgtttagaacaacatttgttttctcactcaaaaagaaaatagaacaagcatttttgttctaaccggtatacgaactaaaagggacaattacttgtataaacttggtgccagcacaaacatttttcctagttgtagaccatattgttcagatagcatttctagttatttactgaatctcatacaattaaagtatgcactgtttggaacacagttattttctcctgatttgcaacattttcctatatatagtacctgcatatcaaatgaggttgcttcgacttctattccatgctgggagcttgaatatatttgtggttctacttgtaggagatcaaccatgctggggctggtgggttgtgggcagagcttgtaagtaacagaggtaaggcaaagcatatctgtgttaatcaagatgatagaagttatagaggagcttgtaagatgataggaggaacagcggtggttgggatatcgtacttttgcttaatgtttgtagtgctcaaatttatttccaggttttgaggctggtggacctaatacaccttcaaacattgacccatggctgataattgggaacgaatcaagtatcattgttgggactgataggacatcctgttttgagaaaaatccggtggcacttcggatggaagttctttgtgattctaaaggaaccaataactgcccttctggaggtgtaggagtctacaatcctggttattggggcatggtatgatgtgtttcttatttatttatctgtccgtctacaattttttttgaagtttccgtaatcttatttgacagtttaaatttgatctggcgtgtatttaactgattaaacatcatggaatacactatatagtatttcttcacattttccagaatattgaaagaagaagggtttataaggtgggcctgcacattagatcttcagatgcagtatccttaactgtttccttgacaagctccgatggtctgcagaaactggcctctcacaccataacgtaatatttatgtttccattaatatcgctgggatgctgcatttttttccctaataattgcttgaatttccatgttgcttccagggctagcaagaaacagtttgctaaatggacaaagatagagtttcatctgaaatctagccaaaccaatactaattcaaggctccagcttacaaccagcaaaagtggggtgatttggctcgaccaggtgtcagttatgccatcggatacctacatggtatactttattcatgtctcattttatttcttttggtgtaccattatctttacttatttcgtgcttcagctgcacagttttgcagactattcatcagtaaacgccagtagacaactatgatttttttaagagcaaacccatcactatactggatggcccatatcctataagggaaattccttttttgccgggtctataagggaaattcctactgagttgccatcagatttacaggtgttttatacttatcagttcccaccttttattcattgttatgttttcattttagggacacggttttaggaaagatctcgcttctatgttggccaatttaaaacctcaatttcttaagtttccaggtttgccaactttacatcatatattttttttctgaagttaggtatatcaatattatcatatagttttgataatatgtatcaaacttaggtggtaactatgccatgggaaattatctgcgaaatgcatttcgatggagtgaaactgtgggtccatgggaggaaagacccggtcacttcaatgatgcctggggatactggactgatgatggacttggattctttgagttccttcaggtaattggaacgtagtccatgacttcaaaactaatatttattaaaatatacttcataagttcatattgatattcatatactgcagctagctgaagacctcggtgcttcgccagtatgggtggtcaatgatggtagttcaaatctccatggattattaggtacaactaacactctgtttcatgttgtgtcaataaactattttcaacattgcaggagcaagccaaaatgaagaggtatctactgcaacaattgcatcattagtgaaggtttgttcttccaaaatattcaatcctttgataaaacgatcaatctagtacatcaataccttgttccccatttccttcgttcttgtaatgttcaggacgtggttgatggcatcgagtttgccaggggagggcccaagactacatggggttcagttcgtgcagcgatgggtcatccacaaccctttaaccttgactatgtttcaatagggaatcaagaatgctggatgctctattacagaggtctgtagctcttcagttgcacgtccttcctaacttcataccaagaattgatgtttgaacttaatgcatcatattcctgtacttcatgttggaaatttttgttaatcgaataatgtcatgtttgtgcttgcagatgatagaccaagagtttccttttccttcttatacatcaatttttaatagcgttttagtcctctataagataatttgtaaaataatttcatctacctttatatcttgtgggtaagcagggagagctcatattatatgatctttcaattaacaggcaattaccaaaaattctattccgcgattaaagctgcctatccagacatcaacgtcgtgtcaagttgtgataaatccactatttctccgtccaaccctgccgatctatatgatgttcatgtaatgtctattcattatgttcctttccttgtttgttttcacaatttcgtgttttttccaaattatggtttcgtttatggctgacaaaaacatcatctataccacaggtttatacctcatctagtgatatgttttccagaactagtatgtttgacaatacgacgcgcagtggaccgaaggtatgctcaaatgttatccctacatctgatatacatagatacttccactttccatgctcagaaattgacttggggagctctatgactctttaggcaattgtaagtgagtacgctgtgactggaaaggatgctggcaaaggaacactggtagaagcactagcagaggcagcatttctcgttggattagaaagaaacaggttaataatcatactttttttagaggaatatttatacttttattttctctccatcatggatttctgctgtgtaagctctgccataaattggtccatgataccaaagatttgaaactgcttgaagattaaagctttgggcatcaaagggcagtgtgaacgaacatgcttccccttcaggctaccatgtctgggctttctgcatcactggttgattgcattgcaaagataaacattccgtaccttgttttcctgcagcgacgtggtagagatggcaagctgtgcaccgctctttgtaaatgacaatgatcgcaggtaaggatccaacaactcaggaattcttatttttcagattgctttctttgtgtcatatctgactgagttcacaaccctcaaaaataaaatgaaatgatgcataccatagatggagtccagacgcaattgtgttcaactcatggcagaactatggatgcccaaactactggatgctacatttcttcaaagattcatgcggcgcaacgttccacccatcaaacattcagatttccagctacaaccagctggttgcatctgccatcacttggcagaatagcaaagacaagagcacttacctgaaaataaaggtgcgaactttgttaagctgctctttgtttcagagagagtgagctatgcattggtttagcttggaaatgaccaagtgagcacaaagcgaaactttttttttttttgcagctagtgaactttggcaaccaagctgtgaatctcagcatatctgtgtctgggctggatgagggcatcaagagctcagggtcgaagaagaccgtgcttacttccagcgggccgcttgatgagaactcattccagcagccacaaaaggttagtacactacacactgactgacagctgatcatgtatcctatcctgtaaattaaacaaaacagatggtagtaactatattgaatgtgtacgaaattgttgtaggtggcgccagtgtcgagcccggtggacaacgcgaatgagcagatgggcgtgttggtggatccatactccctcacgtcgttcgacctgctgctgcaaccgagcaagcactcgaccatatgaaaggagatatatactgtagtagtaatagtcttaagaatatttattagcctgcaaaaagaggggaaaagagaataaaggaatgttgatggggggcttgattgctcaggctaactgcattgcatggaacataatatgcccatcaatattcttattcgattcagcccaagaatagagagatttaccaggtgagggtgagtcatccgactcaagaattgttgtttcaatgaaattcagattagctgacgttgcaccgcatctgggatcttggctggcacacagcatatgtaagtatgtacatacgtgcataccatcaccacctgctagtgctaggaagcttcctaaattccttacagtggcaatttccttggcttattaggtcgcataaagctataacataatggtatattacttgtcaattgtattgctatgcaattttcagatgtttggtgtatatatagctgtatacgcgtcacctaaagtgcacttattgtattgttcgatcgagacacccatatagttcaggctatttaacttactgaaggcgaaatctcctggaaaatacatcatcttagcttgcaatgcagtgcgttgattgattgaactaccgatagctaaccaggctgctgatcggcgaccgctgacaaaaatatgcttaattaattcccttgtggctgacatgatagatgacgtataaattaatgacctgcagaaatgcttaagattaattaacggcaaattgtatatgcttaacctccacagttgactgctccaattaaaattcagacgtgcgcgcatctgagtttactcaagtttttcacatcatcgtgctaagcatgacgtcatgttctgatgtgcatgctgcagatgcctaaaaatcaatgcatttgagatcgattcatgtgacctgaaaaaaatcaagctactccatccgtttcacaatgtaagtcattctagcatttcttatatttatattgatgctaatgaatctaaacatagcatcaatataaatgtgggaaatatatgtctagattcattagcatcaatataaatgtggaagatgctagaataatttacattgtgaaacggaggaagtaacatgctaaaatggagttaaacagcccggcgaaaaaaatggagttaaacaagctagctagctgcaggtcaaggcagttgtgttagcctatattgattcccaaacaattcgcgtcttcaatttcctcgtacctacgggcgatcatcatcttgttctcttgtattgcaaagctaagagagagaaaataatctgtcaatggttaaataaaacctgccatagttgcatgtatcacgcgacctgaagcctctacttgcacttctcaattctcagcgtctgaccatctgatcagtaacttatgaaaaatatccgctctgttcataaatgtaaagggatgatgttggtggtactttcaaatgtaaggggtgatgtattccctccttacagaaaaaaaatccaatcatgagtgatgtgtccagatccaaactcaacattgagtttttcttttacatatatctagatttaaatttagaattgggtttctttttggaagaaagggagtagtatttgacaggaatatgataaaaaaatgaaatgccaagatattgaatggacaaaagagaagaggtgatgtgatacattttttctactcaatattttaaaatcttttaaatttatggataaatgaaagaattaaaatccttatacttcacccgtttaaaaatataacaactcctaacatttaatgtttgtcccaaaatatgacaatttcttcataaatattttctgtctcaaccaattataatcttccaccattcaattttcttatctaccttcacttctcaactaatcataatattcttctatttaattttatctacttgcttaatactcatatttaatttaaaaatattcttatattctgtgatggagggagtatatttttaacggaggaacaaatggctggacgatcggatctaagtacggacagctaaaagttgatgtcagtgcatcattaaccattcttctgttcaacttaaacatattcaattccttgattaaattctgcgggcaagagagaggagtcgtttgctgcaaaaacaaaaccaaacaaaacagctacgggcccctgtctcttcccctgtcgtctccacctctcactctctcctctccactgttccggcctcctctcctccatcctccctctcccattctaccagttcttctgttcttgaatgctccggactccatagatcacccttcttctcccaaaggtatgtccagttcttcagcattagttcctgttccttctacctctattagttacgccactcgccggaggagaggaatgctgtttctcattccagatgcaagggaattccatttggctcctgactgcgattaactatgtctccagctgcttgcatgtgcagcattctttcggtatttcgttccattctgtcaaggaatacatggaaagataaaaggactcgattttgacctatttcaagggttcgaatatggcttgttttgattgaacatggctctgtgttttcttcctaatacatgaacaatgaacatgatgttttattatttgttagctagtgccttcagattttggtttctttttttaaaccggcgtctacatcctgaaatggatgtacacagccaatactttggtttcttgttttgctggttatattaggtcgattccatcagcgtttaatttctgcacttctgcaaatttttaggagattctagggactaaaagcttgcaccttgcagattagcttacagttagatttttctttcatactatttgatacaatctcagttggaattttcatttgcaatgaaatttcgtatttctactgcaatggattattgttttctccttttgattaatagctttccattcagattcaacataatgcaatatcttctgtttttctatgtgctgaccatcaaatggtcaagctttatgaaaataaatcttgtaatattccctgtcagattcagttgaagtctagtttgaaggaaggattttttttttttgactgaggaaagaattttttttttctggaagatgtataaggctaaaaggactgctgcccagaaagtaaggcgctgccttggaaaatatgagcttggacgcgcaattggtcaaggaacttttgcaaaggttaggtttgcaaagaacatggagaccggtgatcatgttgctattaagatccttgacaaagcgaaggttcagaagcacagattagtcgaacaggttattttcagagtcagataattactcacaatattttgttctactttcctagattttttgcaacaacgaaaatagccaaaagtatctagaaaaaaaatattcctgtgtacgcgccagctgtgctcatgccactctaaagtctaaactctattgcagattagacgggaaatttgtacaatgaagttgatacaacaccccaatgttgttcacctgcatgaggtaaatctaaagcatgagagacaagaatatatctttcattattaccatgttgctagtttgaaactttgtgcagtagtacacccaagccttctgtttatgataacttggattacttttgtggtgttttataacaggtgatgggaagtaaaacaaggattttcattgttctagaatatgtgatgggaggagagctccatgatattattgttagtactattatacctctgaggctctgatcccctgtatgacatttttcctttgcagtagctgtaattgaagtaatctccacttacttttttttttgcatgacaattaagtgaatttcaataacttcataaattataaccaggccacaagtggaaggttgaaggaggatgaagcacggaaatactttcagcaactgatcaacgccgtagattactgccacagtaggggtgtataccacagagacctgaaggtctagtgttaaccccattgctctggtttataagttataactatgatctggcataaacaattggaaattgacaaattgatgttttatgcatgacagttagagaatttgttgcttgatactgccgggaacatcaaagtctcggactttggcctaagtgctatatctgagcaagtgaaggtaatatcacacaactactcgaaagttaaaaaaaaaaggttcctgcacatctatattgtttctatgtcgattgattgccttttttactgtgtgtgtgtgtcaattaacttcaactctgtcaggctgatggattactacatactacatgtggaacacctaattatgttgctcctgaggtaacatttgcttgtacaacttctcttatttttctttatccagaaatgagtttctcctataataaatatctttctgttttgtaggttattgaagataagggctacgatggtgctcttgcagacctttggtcatgtggagtaattctttttgtgctgcttgcaggatatcttccttttgaggatgaaaatattgtctccctttataacaaggtaaatttagaaatttaaccaaatcttgaacaccaatataccaggttatgatacatttttttttgtcattctgatgacagatttctggagctcagtttacttgtccctcttggttttctgctgaagctaagaggctcattgctagaattctggatccaaatcctgctactgtaagttttttgacacttacaaaatgtggatagaagctcttacagaagtgacattttgaagtttgtttaaactttaaatcttttattttttatcactgattgtactgactagataaagttgcaatttggatcagtaatcagtgcccaaaattacttgtttcttcttacttggttttctttgttgccaaccagcggataactacttctcaagtgctacaagatcaatggttcaaaaaaggctatgagtcccctgttttcgatgacaaatattacccttatttccacgatgtttatgatgcttttggagactcagaagtgagttaattaatcaatagtattatatctacaagggtacttatccttttgtgcttcagatgttcataatcttaaatataccgtctaataaatttgccaggaaaaacatgtgaaagaggctatggaagagcagccaaccttgatgaatgcctttgagttgatttcactaaataagggtctgaatctagacaatttttttgagtctgataaggtaaggatcttttctgattgcagcagtatggttaatgagccagtgggcagtgggatcaaatatgcacgtatcataaacatttttcataaattacttcagaaactatgcaattattgcagtggactcacttttttatttaaacatgacagaagtacaagagagagacaagatttacatcgcagtgccctccgaaagaaatcatcaataggatcgaagaagctgctaacttactaggatttaatattcagaagagaaactacagggtatgctaagaatccttgcaagtaatgtttgtcttactagtaccactttcagctcatttgtacaaactatgaagaagttgaatatcacaatgtgagattacctttatcacccctgcgctgcgtcctgaaccatgacaagcatctcactcgtttttttctactgttctatttagatgagaatggagaatataaaggaaggaagaaaaggacatctaaacattgcaactgaggtatagaaaacacaaaattaaagaagatatctgtcacaagaaacatgaggattgatcaaaatattatcccgctgtataggttttccaagtggcaccatccttacatgtggttgagctcaaaaaggccaagggagataccctggagtttcaaaaggtatatgtctatcaatggggttactcttattatggtcaattgatcaccttcagttttgtttaaatgacaaagtaactgagcaaaattattactatgaacagttctaccaaacgctctcgacgcaactaaaagatgttgtttgggaattagaagatgcggctgaggatatgagctaagcggaatgaggtttgctgcagaatagatttcagagtttagtgctagatttctctgtacatatcaaaatttccgagttgcagtaaatccttttgttacccatgtatggatagattcatataagtacccaacaggattaggcaacagcaggtcacggcttcactgctcaccatttgatttgttccttttagagcagaaaatctactcaattttatcttccacagatgtaggttgacataggatcagtataaccatgatcagtgatatgctctgaatatttccaccatgtgtaatttgtagtatcgttgtttttggcactgtaatagtatactactgtatcaaaaaacattgtgaaatgaaagtattgtattgagagggttatttaacaggatcttctggaatggaattgaaggtagatgaaatgcaggtcagaagcgaggaattttatggtccttgagaaagtagcttgaggtaatttagtatcttaagatacttagtgcttagatgtaccaaattttatactagaaaatatatagataccttctaaaggatagtaaaattatccccaaaagcaaaggatggatggtgggcgcttgcatcgagaacagcttcgccgtaagccgccgccactcgacggagatgtggctcaccttctccgtctccggcgcacggcgtccagatacttttcctccttttctgcttcgattggttcctgtttaaattggatctagcggctgaagttggatcgttcgtgtggccaaactgcccaacttggatcttaactcgcggcccaaagttggatgggcggcagaatcaggattgaaatcatttcacttttgtttttgtttttttgccttttttgtttttgtttctgataatggaattcactcagcctctgaattgaaaatcatctcagtttgaacctcagaatgttttgtggacattttacaccaattactctctcaagtagctggagctacagtgatgaatccctgaatccatttggtccggttatgagtcgattcaattagttcccccagagaatacaagcagtacccaggcaaatatatttgtggtaacaaagtttttaaacatcttcgctaaaaaagaaagctcttaaagacttaaacatttggatagatcgagtttcatgacggactaatccggtttaatttgaagcagcaatcagctccagcctccagacagtgtcaagactgtcagttaccatactcaagctgcaatttgctccaccaggttttcaccggactctgccacggtattaccctcagatggcttctccacaattgaagccttggcaacatcatctgcattcttgatgtcttccaggatgcttgagctccactcagaaagctgcttcacacttgcctcatctgtgaatgaacaatttccactcattaatacttaacaagcaagcaatgttggtgaacagttttaagaggagtgaaaagaaaaacaagatggaatgcaagtgctgggtagggtgcatgcataccaagcctagggacagtgtggccctggggatgtcttatgatgacagggtcctcaaaggcagcggccagctcctcggaaggcactttgagccaatccttctctccaatgaaatgcactgatttcaccttgatcggatccttataggctacattgcatatgcttgggtccctgaacttgctcccagctattgagaccatgaacttgattggtggatgatcattcagtactttgccctaagtcattcagcttaagtaagaatccagatggaactagatactgcagactttgaataacatctctcatataaaggacttatcccataaaagaagtaccctgctcaagtccatgttctagtgaatgaaatgttggtgcagcttacaaaagctagcacctagctaaacgatactattcagtatttaccatagcctataggagtgggactttatatttgtactagcatttaacaatttgaagccaaaacacatcaccaacaactgaatagctcatggaaactgctaggttcaaatatgggaccttgatgtcacagtcgtttcatgaatattcacacattattgccctctgttccttcaaactacaaccaaaattgaaaccttctgcaaaattaagagtacaagtgtacctgtgcttggtaacctatcaaaagagcagaaagagttgcaccctggaatgaaaaagaaattaacagatgagctgaaggacatgagcagttgtaaacaagatgttaaacaaacagtaagggatttcggtcaaaactgaattatgatattgttcagtaagtcagtactgattaaaaaatctaaaggtctgaccacaacccatgtcttttggctttcctatgtgagtgtctggtccaatagaaaaacgtgagtacacaggattctgtaaaaaaaaatgcgaaagtttttgcaacttggatatagaaataaaataagagatcgactgcaaggagtgagtgattatctatatacagcagaagcttcagataatctagtgttgctcagtgtgtcggaactgaactcataaattacagcacctcaaaagttgacaatttaaatggtgaatgcacttatctggaatttcatatgcaaattcttggcccaagatctctagcatgcacataataataacactcaagtaccaagtgggtcaaatacgtttcatagctaggttccatttttacctgggagaatccaagcaggccatcaaaaggtccatttttcaccatgtaatcacacaggtatgaaatgcactcatccagatttgtgtattcagtgaagtcctgtgtaggaacatgcacagtaaataaatgtttgtctatctttggtttgagccaaggcacactgtatagtatagcaacaaaactgaaactatagtacaaagtaagatctgacaacgctattgcaagtgttgtttcagtttgggttccatctgaagcatttaaccttgttgaactgaaaccactcaaagtagggtgggggaaatatgccttctatctctgatttccctccagctgggaatatgccatcagggaagacctgaaaaccaggaaaatcatgtaaacaatcaacaaagcaatacaaaaacctgatctttggatccagcgtagtaccatgtcaaattgttggaagatggaaggattccatttgctgatttgcttcttcagaaaactcccacttgtccggaagccgtgcaggcaaagcaccttaaatttcttgtccagctccatgcgcaatcgtgtatgactcttacaagcacagaatacattcagaaaaaggccttaagaaggccaggagcatgtggtagttgctacctactgccatactctcagaggctgcacgcagctatcagtctatcattcaacacttataattactagtagttgttgcaacctgccaggcaaccctctttgaaaggcatgcctgcctttcccatttgctcaattcaaatccaattcaaaccccaaaagatccttctctgcaattgaacaaattcttctgcatacaagcagaagaaacatatgtagatcgaagaagagaccaatggaataaaaaaaataccagatatccaattgatactagactcgagcataaattgatgaaaaaatatataactacatacaggcccaactgcaatctggacataccaaggacaagaattactggttcacataaaacacaagagatctgaaaacacacttcagaggaacatagcaggaaaatcctttttagcgactacagctagtaggatgcttcactggaaattgataaaacaagtgttgcatcttaactaggactatgcaacacacaatctcctctgccttagagtatggttccatggctcacttggccatcatgaccttcacaaactcctcatagtttatctgaccatcaccatcaacatcagcctcacggatcatctcatccacctcctcgtcagttagcttctcgccaagatttgtcatcacatggcggagctcagcagcggagatgaagccattttggtccttgtcaaacacccggaaggcctccttgagttcttcctctgaatcagtgtccttcatcttgcgagccatcagattgagaaactcaggaaaatcaatggttccattgccatcagcatcaacctcgttgatcatgtcctggagctcagcttccgttgggttctgccctagtgaacgcatgacagttcccaactccttggttgtgatgcaacctgtaaagttcacaagcaaccaattgtacaatcaattgctgaacagtgtagtcattataactagatactaacagaaaaactaggcacacactacacttcctaataactaataataatgtcaacatgcgtctaattggatccatacggaatggactgtctgatcctaacactgaagtccaaacgtaattacttgtttggtttgaagaatggaatgtgttggtacatagcaattgcatcctcagaagggcatgctaagaagaaaattgaagaatgggatcatcccaacaaaatcaggggatgactcaacaataaccaaatcattgtaggatgattatcctaaccaaacaggccattaggggatattaacttaaaaaagaaaaagaaaagggactccttattggctcatcaccagttgtaaagagtttgaaatagtacgattatgtctatttgaatatgctgagagtattccgttaaaagttacaaggctgagtgatatttgcatatttggatgcttttaactgggtgattcaccctgacagtaatatcaagaagggattgctgcagtcaaaacatttcagcacaaagtttcaaggtgggtatcgatcaactttaaagccatacttaatcaatcagtgagctaaaatgttagctgttcaacaataactagtccaagacaatttccacgaacatttcagctcaaaatttcaaggtgggtgttgttcaaccttaaagccgtacttagtgaatcagtgagctaaaatattaccaggttaacgagaaaccagtcgaagacaatttccaccaaggtaattgcagggttatggtctttaacaaggtccaaggtaaaccacaaaattatttgcatgtacttgctgtataattttttcaacgtgcccccatgaaatttatacaggatttccctgtggacaaatttctaacggagaaggtattccaagggctaggaatccaattacctaaactgaacagctttcagtagcgatcaagttattgatacaactacagcccaccataaaaaggttgaagctaccaaatgcactaacctaagaaaatgaccaaagttgcatgcgaaagggagcagttgatagctaagctacatccaacacatacactcctctctgttttcgactatgtaataaaccttttcgtacataaaaatcattgtaatgaaagtatattattctttgctgagcttattaacggcatgattaattaactactgtaaacttgaaaattaattttttaaaaagaaaattatatatccgaagtttttgcacgaaaaagaaaaatgagggagtaactaagcaaactagctgaatcaaacagggcctaatataagttgaaaagttattatgatgtagagtaagtgttcccgaaccaaacaggcagcgagacacgattgcgatagtgaagtcgagggaggtggcgcagtcaggaaatggtcaagtcagcacagcagataagcgttgcgtccatgtcggacaattcgccactggacacacaggacgatgacagcgaccggtttccgtccagatccgtgcccggatcggatctgccacccgacgacgcgaggaaggaagggcacccgcgcggtggaggcaatgccacaggcgcgagacggccagcgtgtgcaaacgagagagatcgatccaacgaacagatagagatggagaaagagagaacaaggtggtggtggtggttgttgttgttaccatcgccgtccttgtcgaagaggctgaaggcctccttgaactcggcgatctggtcgtcggtgagctgatccgccatggcctcctctgcgcgcggcgggtgagtggatcaacgaagaagaagaagaagggaagcggagatgggaggaggagagacttgtgtggcgtggcgtccggtggaagtttcccacccccgatttataccgcgtcttccgtcacctccgctttaccttcgaccacctgcttttcccaaactacccctcctcattagtaatgggtataatgtttttcaaaacatagacatgaaaatagtttcattttattacaggatcatatttttattaacatttttttacactttaaaccaccccgaactcttttatccatctacacctaaattgtcatatgtcaaaaaacatataatcatgatagtttattaaggaaccgacatactcaaaatcgctctcatatgtttcagaagagagttgaaatgatctaaaatatatagtatataagaagataaaatggtccaaagtaaaatttacttacttatttggtaaagttgcattttctttagcttgtcaatgtccaaatcatcctatatttgtggtggcatgagtttgctttgagccaatccctcaattggtaggataaaaaaaaatcagtccctggattggcgggattctacctagctattccctcagtcctttcgcttaaaaatatacttcctctgtcccattttaagtgtaaccatgagttttcgcgtctaattttaaccgtccgtcttatttgaaaattttttataattagtattttttgttgttatgagatgataaaatatgaatagtactttacccgtgacttatgtttttaaattctttattttttcaaatgagacagatgatcaagttgggcacgaaaaatcatgtctgcacttaggctctgttcgtttcaggcagttcggaacccaactcccctgcacggaaaacggagcaatccattagtgtgtgattaattaagtatttgctttttttcaaaaatagattaatttgatttttaagcaactttcgtatagaaactttttgcaaaaaacgcatcgtttagcagtttgaaaaacgtgtgcgcggaaaacgaggaatagaagttggaaacctgcccaaacgaacagagccttaaaatgagacggagagagcaactatctttttatttaaaatagaggaagtactattgtacatgttccattgattctctatgtatgcacaaaagcaaattctacaggattttcacataaaaacagttttattctttcagaatttacgtaaaactcatcccaaacgtcaaagtacagcatgtgtgtgagggcatttgtgtaatcttgaatgttccgtcaaggacaagcctctgtgactttacggcatgtgggcctgtaaaacggtggaattttccgatgatggatgctttcttgacatttttaaatgagcagaatgacgtatgtaccctcgacgcggtttggacgcggagtgcattttatcagtaaagtcccccgactttccaagctttcgtgttatggccttgtgggccatatgaaacgtgttactacaacttgggcctttttcctggttggatgctcgtactgggctttgggcccatcgcctttatgtgggctcaatttaagctttctgatatcatcgtatcatgacaaactgaaaagggattggtatgccctttgattagaaatcctctttctccctacaaaatatacatattagagaaaccgaaatataacaaagggataacaaatcttggaacgcaacaagataagagatgtgagcaaacgaacacaactacaaaactgaccaaccctgacacacacacacacaaaaatgtatgaaagagtatcgatcaccatctttattcttctggtagatccttaatatggcgtcagcaaacaaattggtgactgaaaagcacatcaatgggtctgtttttgttcctaacactgatgaaatcatcacggtccacgccctcaagattaccattattattactattccaaaacaatgaatgaacagaatgcatgactaatttgttctagcattgccagctaataaagctatctgtcctctctttggatggccttgtagaggactttggtgacaaacttggactggaacctgaaggtggtgccgagggcagcgaccatgggtggggtgcccttgccgatgaagacatggccgaggacgttgtgcttgggcatggcgcactctccctccttcccgccggagcctcctcgcgagttgagcacgcccaggtggagctgcggcggcagagcgggaggctccttggtgaactccttgtcgtcaggagccaggaaaccgtagctggagtccggcgatggaggagccatcagctctgacacactgtccacgctatccgggacataatcctgcaagcatatgcacaccagttatacattcaggcaatacgcaaacactgaattttcaagaagcagagataggtgatgcattcgtagtgtgtgtttcaaatgctagcagataaatcatgatgtgtgggaatgatctgtgcaatgcccaggctttgtgctccttctttggtgctttgagttgtagtctaatcctaattacattagaattgtttctctcatatatatgtgcctccaagttagactcttgcaagacacaatgaagaacataattttattgattataacgaaacaaggggacaattggttatactagtgcaacgattatttgcatcattcaattgattcttactaggcgagaaatataattttcagatatctgagcttggtccctttcttaatcatcatcaagtacttgagtgggaatctccctagcacattttcttgggtttaaataatcatggtcaagagtaagttttgctgatcaagttcgcacaaacaatcgtacgtgcaacggggaaaaaagttgaatgaaaaaaaaatactcacatgaacatcaataagatttgaaatggtgcccataatgtcagcttcacggggacgatcaggctgaaatcttctttctccatcaacaatgaatctataacggtaaactccagatgcaagccctaacatgacgcagtgatcctttccacatttatggacgagttgcctgtgatacacactaacaatgtcagaacaaaatcagttctatccttaagcttcagtttaggtactagaaacaaaagggaaatactatatgctatctctccaaaaaataaaaatgtactttgatttccagttatcccatgatccttctatatagacattcttccctccaagagtccacacaagcagagtaggaatcagcttgtcagggggaccatcgtgatcctcctcttgttcactcgttaatatctggttaaatactggaggaggtccatctacagctctatgcaatggagttacaggactctgcagtacatttatatcagtgcattaaaaacacaaaacttagaacaatgacatttgggaagaggtagactgacttggcaagaaacaaggtaattagatcatctgaagcgaccgtaagattaaacatgttcgctagtagagcaactgagcaaagttgtatgcctgtactacctctgtttaatacatgagacgtcttatttttttcaaatatatataaaaaatcatgtctaaggaactgataaatcaagtcacaacataataaatgataattatattaattttttataagacgaatggttaaatgtatctcaaacagtcaacaacatcatatactaaaaaggaaaaaggagggagtattattctagataaatctgataaaacaacagtacattattctacaattttaattgtcaaagttgtaacgaatatatttcatattatgaactttctaaagaacatatatttcagatcatgtttttttaaaaaaaacaaattgttagcaaccaaaataaatcatagaatcagcgaggagtccccaaaatgcaacgccgatgaaattgtggcatgcacattacaagtgcgacgcgcgtcacatgcactgatcgatcaagaggatgtatattgcacatggatgggtggaattgaaatcgagatcgaattgagtttagcgtgatctgacctgcggcacgaacatgcgcggggagtgcggccgcgggggggtccccggcggggacgacgaccctccgccgccggagtaccccgctgccgacgacgggggccgcaccagtccgccgcttcccccggcgccgccgtacggcgggaggccagcacggtccatggggcgcagcgaggaggagtagtccccagcgccggcgcggttgccgcctccgccgccgtcatccatttcggcgtcggcgatgtcgtccagcctgccgctcgcgttgcccatctccggccaccggcgccgcaccaccttaccaagattatatacacacacgcggaagaggaggagaggaatgggcctaagcccattttttcacttatgggcccaaatatctgttgggccgaaaatgtggctctgcagtttgggcttgaggaagcttgttggtctttataagtcaagatttacattttaaaacttaaactgattttatgttttttaatcgtggttaatttaataatatttgtttttatcactaagaacacatataaaattttacctataaattattatctattatattattaaaggaataaaaaaaggagcttccacgttcgctctcatggtctagaaattctcacattaatcggagaaaaagaaaaagcaaagtccacatagaaatacaatttagtaatagctgaaatttggaattaaaaaaaggagcctccacgttcgctctcatggtctagaaattctcacattaatcggagaaaaagaaaaagcagagtccatatagaaatacaatttagtaatagctgaaatttggaattaaaaaataaggaatattagaagaggagactagagtccatatagaaatacaattaagaaaaaatagaaattcggaattaaaaagtaaggaatattagaagtagagtatagagtccatataggaatttaaaactaactaaaattcggaataaaaaggagcctccacgttctctcccatgacctagaaattctcacattaatcggaagaaaagaaaacgcagagtccatataaaaatacaatttagaaatagttgaaattcagaattaaaaaataaggaatattagaagagaagactagagttcatatagaaatgcaatttagaaatagttaaaattcggaattaaaaaataagaaatattagaagaggagactagagcccatatagaaatacaattaggaaataactgaaattcggaattaaaaaataaggaatattagaagaggagctagaatccatatataaataccattaggaaataatagaaattcggaattaaaaaataaggaatattagaagcagagtatagagtacatataggaatttaaaactaactaaaatttggaataaatgtaataaaattaaaagtagagtttagagtctgtataaaaatacaatttacaagtaactaaaattcaaaattaagaaaaacatgggaagaagagtttaaagtcaatataggaatacaatttagaagtaactgaaatttgaaattaaaaattaaagaatattgaaatatgagtttatatagaaatacaatttagaaatagctgaaattcggaattacaaaataaggaatattagaagaggcgactagagtccacatagaaatacaatttagggatagttgaagttcggaagtaaaaaataaggaatattagaagaggagactagagtccatatagaaatacaattaggaaattactgaaatttagaattaaaaataagaaatattagaagtagagtatagaatccatatagaaatacaattaagaaataataaaaattcggaattaaaaataacgaatattagaagtagagtatagagtccatatagaaatacaattaagaaaaaaaatagaaattcagaattaaaaaataaggaatattagaagtagagtatagagtccatataagaatttaaaactaactaaaattcagaataaacataataaaatgaaaaatagtgtttagagtccgtataaaaatacaatttacaaataactaaaattcgaaattaagaaaaacacgagaagaagagtttaaagtcaatataggaatacaatttagaagtaatagaaatttgaaattaaaaattaaagaatattgaaagataagtttagagtccacatacaagtacaattagaaataataaaaattcagaattaaaaaaagaaatattaaaagacgagtctagagtccatataggaatatatataatttacaaataactaaaatttgatattaaaaataattaataactaacacgtatataaaatacaatatgaatattacacattagtagtttcttaaagttattgcaaaatttaaaattatgttgtcattgtaatatattttaataatataatgagaaaacatatatgctattatatgagaaagaatataatgatgctagccacatgctagttttactaatataagcggtacaaataagcataagaataaatgaaaaggtggatgttggtttctcatacaaaaccagctaataaaatagagtggaaatggataatataatttgaattctaattgataatttaaaaacctctcataagtgttttttttcataaaattggttggggcttttcttcacaccggcctgaccgaaaaaataatactaatataataatttgcaaaccttcatatacaataattttacagccctgcagtttcaactagacaaaacttaattatttcactatgagtgaattcaattgatttcctagataataatataatttaacctccatatatatacattattattcatctactaattaggagtaatagtgttgtctaccagcggtgcccttgtccgccgtgatcatacgactgaaatgtttgcggcggcaacggcggagtcagcaccggcggtggtacagctgcgacgggaggcgccgccgccgtggccgacgcagcataactggcacagtatgctggaggcggcggcggcggcggcgggagatcaatggtggagtcaacgtagtgacggtcggcgatgttggagtggcggccggtgagctcctgcacgacggcgcggaactcctcggggctcgccgtcagcttcatggggctggctatgtacaccaccctcacggcgccagggcattgcggcggcttgtacttcctcgccgccgccttccccttcttcgccggcggtggcttcgagatgccgtgccgctgccggccatgctgctgcaccccgagcatgttatctagagctttttgtgagcgtggtgtgcagccgtacgtgcaatgtgcgtgcctttatagaaacagtagccctgtttcggaacgatatcctgcagtaacagacgaaacagtggtaattttctgcagtaacagacgaaacagtggaaattttgggagaattggatcagagcattttcattgggcggctggggtgagagacaggagtagatattattgtgccagttaagtttttttttatatgatgaatattctggccttttttttaaaaaaaaaagaactggcattttcttcaattaagatagaaaccacttattacaaaattttgaacgtaatgaccaaagatgatgagagagtaagttcgaacaacaaaaggagaaatcttattcaatcctatgtgtaaactttcatccaaagttaagccaatatctacattaatggacttcaaattccaacatgcagtatgtataaatcttttatccttatcacacatttgtagttaagttcagaatctgagctagtatgctatgctaccttgaaaaaatcctgcctataaaatttagttggagatttgtaccagctagctactgtagttattaattttaaccatagaaaaattcacgcatggaaggaaggaagacaagacaagagacttgttggttcgagttagagggaggtcacccagtcaagtactcttacccaaaggataggttggaattaactgagataacccattcaaagtccagattcataggatgtgtttcatctatctacaaacaagaagttatctaggtaaaaagatgaacggtaaaaccagattgctagctagctagctgtctcacggctattcgctctctccagtcagtctctagccaattggctagcaggtaaacacaagttattctcttcagtcaaaaaatgaagtcgttttcgagtatatatattatatttggattctttgaaagcaaaatcatccagcgcagcattgatcgtcagtgatgaccgtcatcgacgatggcatcgcaaccgctcgacgacgaattgaagaaggtgggtgtgctagcctgctactattttttaaagacttgagaaattcagagctagaaaatcatccattcgttttgagtttgacctgccgatcgattaattatattccttgagatcgatcgataaattgtctcattcacacggacccaaggcgctcgtacatttcaacatccgtgcgcacgcgcgtgcgactgatcaggatatatagtttttggtgatcgataaaattcccaggtagctagcatgcagatgcagatcatacttatgtgcctaatgcatgcctagactagatcaatcgatcgattgctgatcgaggacaaaagcaatcaggaatccagatgcatgcattgtcgattcataattgactaattaagcaaacgcatatccaggatcagatactagtccaattgagtgattattgaccatatagcttgagtacttttatggtacattctagaccggtatacgtactaatagctgctgtttgcagtcaagatacatatagatactagtactacagtcaatgtctatccctttcacgtagctaccgccagtaaaaggcagaacgatgagagagaatctcattgttcatatatgggctttcaattaattcctcgcaatatatattaccagtactgtacgaatactagtattaccagtgataagagaccgatgcacgattaaaggtagggtccggatcaccatatgttcggtgatgctggtttgctgaatttttttagagggagaagttcggtgatttgttcgagtaacggaaatggtggccgcattctaagcgggcctcattcttggtagggaagcaggtggaaggaggacaggaaggcccaatagtaagtaaaatgggccgtcggatgacatgtcaggcccaagttgaagtgagcccatacagcgactccggccttgttgacgaacgaacgaatgatgcggaggtgaggggatctttctcttggcttcactcgtcttccaatccttcttcctcctccctcctctcctctcctctcctgcagcagcgcccaccgccatcggagcctcgccctcgcgcggccatgcttggtctgaggggagccagggcggcgcagctcccgtacgcttccgccgccgtcgctcccacccccacgccctcgttttccggcttcgcgcgccgcctcccgctcctcgcctccgcggccctctcgcctctgccgccctccttctccttctcctccgcttccgccgtcaggagggatagggaccctcccatgcgtcccgtctccggcgccctctccaggtccaggccaaccaccaggggtgagtcctcgtgctactcatttacctctactctgctgctgtatatgtatcgtatgtccaccagatatctagctattctcgcatgtgccatccgtatcaatactaggttttgcttcattttatttcctactatactatccggttactagttagtactagtgttgtttgcatttgtgtgcttcttgcatggtgccacatggtttcatcaagtaattgacatgaacacctgtttgttagttttctgctctgcggctgctactgctcccagggagggcaaggagttgcttgtccagcatctgctcgtcggcgaacaggatgtcaggcttttggtcgatcttgaaaagaacatcattacaggaggtactagtactagtattcatgtggatgctgatatacactttcacataaacatggagactaattaaaaggatattgctcagcatctagcttttttgtgtgtgtttcaggtgcagacttgagcgatttagctgtcgagtactctttatgcccatcgaaagaaaatggtggaatgctggggtgggttcgaagaggacagatggtactccatttacatgcttttctggcatggtagtagcgacttttcatctaggactttacatattgttaattgatcaaagggctgatcaaaactacaaatgagctaatcacatgcctaaaatgtactatggaaccatccagtttctctgactatgcttggtggtgctgataaggtccatactccatacaagatgcagttggaaaccttatgcttggcagtataaatttttactttaccactaaaatttggcttgactttcgttggtcaacttacttctttatgatggttccaatttgttaggagttcccaacctcaccaattggcgaactagaaaaatgtagaattaattgttttggtattggtacttggttgcttgccttggaaactaactgctgtgaattcatgccacaagttttgtcttttcttattaagcgcattgatactgatgtatgtactttatctaattaatttcaggcctttatgacatacacacctaaatccatctgccccttattctactctatgctagctctcttctcacaaccattaaattcaagtgtgacaatcacttgctagcttgatgtgtgaagctccaccaattttgtgtgtgtttttttttccttttctcttttctgtaagcaccgtgaaggcattaacaatgtcttcaatggagtttgaacatttttacttgaactgagcaggttccagaatttgaggaagcagctttcggtgctcctttgaacaaggttgtacggtgtaagacaaaatttggatggcatttgttgcaagtgcttgctgagaggtagatacttgtaacaaaattatgttctatgtatacaaacaatatttattgatttcttttccacctaacttcagagaacaatgcgtagtggaagacattccaccagaggagcttcatgcaaaaatgcaagatcctaactttcttgaagaagctcagttgattgatgttcgggagcctgatgaagtgtaagatttacctgtgtcctgattgctagaataatactcataattacgcatcagtgaaatgatagacatgtttaaccaaaatagtactactaggacctgtccatttcttttaagagctgtccttatattgccatcctcacacagaaaatgagcttcattttgacattttgtacttttctaaactatattccagtgaataactgttacgacatcttcgttgtggttttcaaaatacacattatcaggagtaaagaaaaactgttaagatgatcaaacatgaagtatttatctccatatccatgatgttgtggttacctagttcagtacagttactgttattgttcgcctattcgcatgaagcttatgttgagttttacttcttgcatggcagagataaagcttctcttgaagggtttaaagttctacctcttcgacagtttggaacttggggaccagttatgacagatgaatttgatcctcagaaggacacttatgttctggtaagttggttactcctctaatgaaacttgctgccagtgtgcatccataaaggccaagtacctgtcaaatgaaaaagagagcaccagtacctcctacatattgtgattttgagttgatccggtgattgcggaaggaagtaatatgcacacatcattggtacacacatttgcatcaatgtgttattattattcattctaacacttgtcctttcatatttgcccccagtgccaccatggtatgcgctcaatgcaggtagctaaatggctgcaatcacaggtaattgaagtactcgcatagttcttgcaaagtgtagtcgcactctatggtggatgtgcaatgcagagcaactgagtagtggaacggcatcctcacatgaagttccattgttttgcaggggttcagaaaagtttacaatgttgcgggtgggattcacgcttatgccgttaaagccgattcttccatcccaacttactagacatctccatgatcaccaatgcaacgtcagagccttttctacgtgttcgtttttcaggccaaaccaaaagcatgcttagtatagaatgataggattttccacgatgattttgtacggaatatcggtaccagaaattcagagttaagttttgtcgttctcatgctgctgtcatgtactagcagttctcttgaaattttatatggaggatatatcacttttattagtttgaatacaagggaaatacctgggaggaacttgtgggactgatccaggctcatggcctaaatttcattctgaatttctgatcaaacatgctttgatcattttatttacaaaaaaaaagtgctttgattattgggaaacgctgaaattctatacggaggttaccattttgtcagcccgaatagaagagatacctgggaggaactcgcgggagtactgatccagtattgggtctcatgaccaaagtttcattctgaattttctgatcaaacatgctttgatcattgaaaaaaaaactttgtgattttatcagtttcattctgaatttctgacaagacatgctaacttaaaaaaaggaagtggaggtgcggggaatcgaaccccgtgcctctcgcatgcgaagcgagcgctctaccatatgagctacacccccatttgtgctattcgttgaactctcacttactaattatatgtaaatacaccatatttttgtgagatgatttgcaccatgtcgccgtcgcctcctcctcctctgtctgcgccgccggccgccggcgacggcttgctcaccaggcgttcctcctttggtgtcccggcgttttcccttgagttgaagtgggcaagtcaaagacggagattagcaagaggaggaggagttggtgagcggaggctaagcggcgggccccaccagcgccgcctgcctatccacaaagttgcgtcacgcgacgagccaactgttgctgggcccacctgtcatcctcaccccaccccatgcaccgagtccaccccgccctccccccactttggcgccttccctctctccacctcctccactctcccaccaccacgagaccttctcgaagcttcctcccccccaaaccccttccgctcctcctcctcctcccaaatccaccacggcgacgccgccgccgcagagcccctagctcccggaggtccctcgcccccgccagctccgacggcctcacggaaggaggagtaacgtgggcgttgattggatttttttgttttccccccaccttgagtgagtctgtgccgtttccccggcggcgagggagggcagagggctgatcatggtcgtgcgccgccggtgccttgccgagatttcccccaaccgccaccgacgatcgttcactgtatgcatgctctcgctccccttcgtttttgagttggtttcgattatcaagtagtatgtatcaggccgggtattagtattaccaccaaattctcttatgctagtgtgcgcccgctattgctctagtatttacaagctgttatttttactccttagtactacttgttttggtcaaaattcaaaacgtctactgtacctgttgtattggaaattttaaatggttcatgaatgaattcactacccaagaacaaagcttgtccagtaatgacattatctattggctcgatttatgtttggtccagtggcacaaaggggagtagcactgtccaagctgttgtggtccgtcagggagattggccaacctgtggggtttcagatcgacataagtacgtcagtgtgcgtattcttgtccccacgtgcttatcatttaaattcttctactattatgttttctactatgtacgattgctgtaactcctgaggagttactgtctttgattagaaagaatttggcgcaagcatgtactgtacgatatccttagctgtttgaggtttcagtatgtaagctactaagtcgtcaaagatttcccttcttttttttaaaaaaaaaatgatctgtagatttcagccatcgatcaatctggcggttcatagggctgtgcttgcaacctttctggcagaaaggagagagcaaagtgatttgctgtctcctgttgattgtggcctgttgaggcccagtaatggcagatgctagttcaaggactgacacatcgattgttgtagacaacgacgacaaaaaccaccaggtaatcctttttgaggttgtcatctttcctttacacgttaagatgccatcaaattgactgctagagctcaagaatagagctggtgctgttagggtagtaacttcttttctcgttttctacttgctatgagttggataattgagagatactcaaccaatagtcttctggagaatggagataccactgactatgacagtagtaagaagaatcaaatgtaattgaccgtttaaaccttgcaattcttgtgctgtttcatctactgacactgaagcactcatacttttaatctattttatttactgattcgcaatgtcatgttttgctgtagcaccctgataacatattgatactatgaatccactgccaaatagtgctctaaatatgctcagttgctcaaacttgcagttagaaaacggacatagtggtgcagtcatggcttctaactcttcagatagatctgacagatctgacaaacttatggaccaaaaggtgacattttagttccgtttcttttcgtatacaatgtcacttaatcttgtgtgattaatttcatattgtattttggcatgcaatagacaattcggcggcttgctcaaaatcgtgaggcagcaagaaaaagtcggctgaggaaaaaggtactactgcagatttgctcttatgttcgcttttgctctgaataaaaaagccttgtttggaaaagcataggattaattctgtgaacttacctgtgcaaactaggtctatctaatttgaattgtcgcagttgttatctcttttatatgggatggcaagggcttaagtcaaatatgaatcaagtttaattgtttaattgcagtttttagtgatagttagttttgatccaccatgacatgtattttctctttgaacatttaaggcatatgtgcaacaactagagagcagtaagctgaagcttgcacagctagagcaggaacttcagaaagctcgtcagcaggtaaaatctttatggttgcatgctggatcatcaaaaaatagttttgaaaaatactaccttctgtcctcagagaattcttggatattcaattgcagggaatcttcatctctagctctggagaccagacccatgccatgagtggaaatggtaatttgtcatattttcatcgcttggtacccattaacattttgtgtcttgtgtacttacattgttttatctttttaacagtttatattaactgtttgctgcatgctttctaaaacattaagcttgtgttttgcaggggcattgacttttgacttagaatacactagatggctcgaggagcaaaataagcagataaatgagttgaggacagcagtgaatgctcatgcaagtgacagtgaccttcgtcttattgttgatggcataatggcgcattatgacgaggtattcaaggttaagggtgtagctgcaaaggccgatgtgtttcatatactttcaggcatgtggaagacacccgcagaaagatgcttcctgtggcttggtggtttccgtccatctgagcttctaaaggtgaccgcagattaaatctcaatattttcttatttgtctgatgcccctttctggtcctgtaatttatactgatttcaccatatggtacaaaatttcagctcctagcaaatcacctcgaacctttaaccgagcagcagttgctgggattaaacaacctccaggaatcttctcagcaggcggaggatgcactttcacaaggtatggaagcactgcagcaatctctggcagatactttggctggatctctcggttcatcagggtcttctgggaatgtggcgaactacatgggtcagatggcaatggccatgggtaaactaggaacgctcgagaatttcctttgccaggcaagtatcttcaccttctaagtgtcatcgttcttctgcctgacaacatggatttattaactggtgattcgtgtcagatgtcgcctttgcagtgattaaagcttagattttgactattcttttggtttcatttttgtcaggcggacaacctgcgacagcagacattgcatcaaatgcaacgaattctgacgatccggcaagcctcgcgtgctcttcttgccatacacgattacttttcacgcttgcgtgctttgagttcgctgtggcttgctaggccacgggagtaacaaaatggtcatgtgtgcctgtgacgaggttagacgctcattttgatggactgcagataattgggtttttccctgtacaattgtgtttggcagctgtggactaaagttaaaaactgtacctaaagtggtgtatgcaaataggtgaagcctctaagtaagttataacgattgcattattgtgttagcaataaaagttgggtaattcaggatgtgtcctgagttgttttgttgtagtagaagaactgcatgtagtggctggaaatgcagtgttgaatgtaactaaagctctgctgctcacgttgcataatgttgtgtagtaatagttagctagtgatgcccattttacctgcactcctctgggaagctgaaactgcaacctgaagcaaccacggtgcagaagaccgcatgcatggtaaatgattaaaaggatatatatgggctcaacatcgctgccaaatcctgagataatgaacaggcatgctaaactgctacttccacatgaaacctcccagttgacatgaagaatgagctgttcagttttatggtttctgtgttgcactgtacataattcctgtacgggtctgaatttatcctgaaatcatgctaaactgcagaagcatatgaaatctccagaccggttgacatgaaagatgaagtgtcccagtttttacggttcccgcgttgcgttgcacatgttttccgtatgtttaacgggtccgagtttatcctgttatagtattgacaattactgtaccattcacaggtgattgcgacctaagaagtcatgacatgtaacagtaacgaaacaagaagaagactggggattcgtgtgacaattttagaaaaccgtcggcagacaaggccgtctgccccttgtactctagaaaaaaattgactaattaatggccggttagccaaaatggccgggtctccctttcctgatgtgagtactgaagttaacggcaagacgatggcagcctgcagcgcgcggcggtcgctgtcccaggtgactcaatgcacacatatatactacgtatatgactcatttctacgtgctcatccaagctgagctgagccgtagtcaagctaggcaggaaacacattacacatagatggatggatagacggtggatggagtgctccttccattccaaaataaatataagtatttttagcgcagtgataagtcaaatattttcaactttaactattaataaaaaaataaaaaaatcaatcacgtaaaattgatgtcactagatttattattaaataaactatcataatatataactcttttatttaaaatatcttacttttatatagattttgttggtcaaaatagtatatcagaaactatgttagagtctaattttatgactgagggagtacctgatttgtcgtcgcccgagcggtgagggcgatggtgaggcgacgaatgaaggtacgtgccatggttaggagggagcaagacagtgttgacatgcatgcatcgcctactctcaaactctgttttgatttgatctgtttccttatggttttcgttcagcgcccttcgaattgcctcacgaattaatcctcaggcagccaggcgatgcttactttgaacctggcactatgacaagggggctactacttgctccctccgttttatattgtgcatcatatatttttttttaaaaaaagcaaactactctgtgcttcatttaatgtaagtatgtgatgaaaaaacataaaaagagacatactgacttgaactccctctacaacacttacattaaatgttcgcatgcaacatagatacaaattacaataagattacatgtgtcaaacaaaaggaccaaggccatagttcacgtgccaaaatttttctaagtatacggacacgtatttgaagtaacaaaacaaattacatattaataacaaaacaaattacagattccgcatgtaagctacgagacgaatttattaagcctaattaatccatcattagcaaatgtttactgtagcatcacattgtcaaatcatagcgtaattaggcttaaaagattcgtcacgcaacttacatgcaaactgtgccattggtttttttcgtcaacatttaatgttccatgcatgtgtccaaatatttgatgtgacggaatttttagaagttcgaaggaacctaaacactgcccaaggtaatattaataataactttagaaatttctatttttggataatgtgatgatcaatatataacggagagactactttactaaccgtactatttgttacttatcggatgatgcagtttgaattggttaagtggatcaccggtgcaattcaagcagcaaaagaaagaaaaaagaaacgggtggataattaaggtaggtagtacgtggacgtggttgaagatgaagggcgttggccacgtaccccgacaggtgtgcaaattcgattgcgactcaggagacaggagagtgcatgtgtcacccgtccatcgtcatttgcgcgcccaatttccaaaataagtgcagtcgtaaatatccgtacccaacgtttgactatccgtcttatttaaaaattttatgaaaaatttaaaaatatttagtcacacataaagtattattcatattttatcatctaagagtaataaaaatactaatcataaaaaaatttcaaataagacgaacggtcaaatattgaacgtgaacagtgtaaatgtgtacttattttaggacggagggagtagtctcaagttttgtttcggataaggtagcgtactcgatccatgatccgtcagccagtaattgaattgaattgtcctaagcgtgggcggtgcaccgaccaaaccaccccctctcctgtgcatgtgctgctgatgctgatcgatcgtctctggaacccattcttggcattcatgtcaattaacggcttgatgatgatcgctttccaaaccaaacgacatgtacatgacaacatccgaaattaccgcttcattctggatcaagacgtatctgatttccttcccttttttatactcttatcttctctttcatttttcataatatctcttgtttagatttttcttatatcatacctttcattctttaattttcacatcttaaaagaaaagatatagtctacaacacaggcctaggtacgtagttacatgttcagatcaggacgctaagttatcaaaatattgattgtcttcctccctccgttccaaaataagtgcagttttgcactatttacgttcaacgtttgactgttcgttttatttgaaatttttttatgattagtatttttattgctattagatgataaaacatgaatagtactttatgtgtgactaaatattttcaaatttttcacaattttttaaataagacggacggtcaaacgttgggcacagatattcacggctgcacttattttgagttggaggtagtacaattttataacttgacaatcttatttaagatttttgattctacaattctatatgtacttagagcttgaaacttttagttcagaatcgtgattttaacaacactgagaaagacattgacaatatcatagaagctagtacaaaggtatatagaagaaaaacctttattaactacaaaatgtatcagcagtaacgtacatgtatagtaggcagatctgtttatagttagaccaaccatatacgtacgtatttacaaactgaatacagactttgggtgttccctcgtactaaacaaaagaaaaaaaaacacactcaaaagtaagaccatgaccgatatatctgcaatactaaaatgtttatgcagatcatgtcccctaattaatcatagctagcactccttaataagcgccaattattattgtagctatcaagacttgacggcggccactgccggcgacgagcgcgcctacgcggcggagggcgccgggaagtacttgacggcgccggcctcggcgagcgccgtccgcatcggctggctggcctcgtcggcgttgtcctcctcctccttgtagtcgaggctctcgtcgttgtagatgtcccaccacctcttcaccagcatctttatatcttctctgttcatgttctcctccttcccggtgaacctccatggcttcgaaccctgcaatcaaatcatgccatccatcgctcgatcagataatcgatcattcaccgatcgattcatcgaattatcgagatgatcgatcatgtaatgcttaccgctgcacagtaatggacgaccttgacctggtcgaggtcgacgttctccgggtgcctccagagcatggcgagaacgaggttgtagacgttggggatgggcttgtactgttcgcggaagaacatgttgaggaagtcctgctcggcgaacggggtgggcggcgtgacgacgagcgcgtcgagcaggtccttggcggtgccgaggccgggctcgtggacgaacatgccggcgttgaagtagagcggcggcggggggccgagctcgcgctccggccacgccacctcgtcggggcgctgctggcagtagccgatgtcgtactgcggcgtgtggctccacgtcttctcgcagaagcagtccttgacggcgtagaaggcgcccttgtcgaggtcgaacaggtggtcgatgttgtcgaacacctgtatgtcggcgtcgaggtagaccatccgctcgtactccacgaactcccagatgcggagcttcgagtagttgatcacgtagtaggccatggcgaactgcgtctggctctccggcgggtacaccggctgaatctcccggaccacgcacccctgctcgaccagcttccgccggtgctcgccggggacgtccgggagcacggcgaccaccagcgggtacgccgagcggacgcggcggagccccttggcgagccccacgacgcccttccagtagtcgccgtcgccggccaggaacgtcacgtacgccctcctcttcgccgccgccaacgccttcttctccgacgacacgttcggccccatcatcgatcgatcaacaaacaagctttgcaaatgatctagctagatcgaaatttgcaagagaaatgttaatttgcttcaatggattggtgtgctgcaagattttgatgaggagttcgtagcgggaggaggagtttaaatagggagcctggtcgcctctacccgtggcggttttgcggttgaggacggttatctcgggggatctgggacgtacacgtgtccggcacgggagatcgaacggctgcggtggaaaggacgggcctcggcaggttggcgcgatatttctttctggatttatgaagtggggtccactgattaagtaaggctgggtgcgatgaatattcggcgtcatggtatggccggtgattacgtgagcaaaatcgaaatggataaagtgagtaaaaaaaggaagaaattattactgacctggttggtaaatgtaaattaaaggtaagaaagttaaggcggttggaatgtggtagatagctctctcgatcgaatattcgatcggatggtgtttttttttactgcctttatccgttgcagtttggaatgcaatggggatccttccatatttattgatttttctttccttttatttctggccagccttcaaaatttaggctgttgattttaatcggggcgggtttactgggatttgatcggaggctaccttcaattcctttttttttatctcctacattcaattccttcaattcctactgccttaactgaatgaaaggaaatgaattatcgaaaagaaaagaaaaagtaacggaaggagctagaagctggaatgaggagcactcagactatatggtatgaactttgggtatgttcagtaaatgggggtagaaaaataatatcacatcttttaaaaataatattaattgcatcatagttatttatttttcacacctcgtttaattctagtcattcattcatcgtcccttttcattcttatacatctcatattacctcgtttgccaaacacaccatttgtggtttagaaaatctggtgtccatttattcggaaatcaaaaaatggtctaagagacgacgattacgccatttgcataatatattataataattcggatgggataataaaagggaacacgtagtatattaaaaaaaaaagggcttgcatgtgtcgctggagtaaagaaccaacctgaggaaacaatattccgatggttcgctttatatatccgtgaagggaggcacgtggtgaaatgggaggggattgcatggaaagaatatgcaaatctcatcttcatttttttttggttggggataaacgtgcatggccggtatctgcagaagcctctcctccagtcttttaatttgtttctagagtattttggcaatctggctactagctagagagtaaaaattaagaaaaagaaaagaatctggaactgctgctggttgtagatgggcatatcaagggcagacacatgtacgtacgcgtgggtgcagaattaagaaacgattgatccattctgttgcaacaacacacgtagtagatcagctggtatacctagcttacccttgttgggtcaaattaaaggtctcaaggatgacatatgttgcgatctggtcggtgtgtgtgtgtcattcatattcggtcctgctatgctagctgcttctgcttcttcttctccttctccgctatatgcgcgtgactcgtcggcatggccgcgtgcgcgctgtcctgtacaatatctactgtccgtaataaatataaataatatgagcctatttagatcgtagctataataaatcttatcaagtttcggtaatattgttaaaattttggcaggatttcttacgtattgaccaaatttagcaacaaactaaatgtaaacattttttttaactttgtaaaaaaatggtatggttgaaatggtatcaaagtgaacatgccctatataatatagctagataatataagtttatataagttaacatggtttacgataatttaaaccgtatacataatgatgatccaaatgtaaaagtaaggtgatgtggctttacgagagaagaaaaaaaggaaggtaatttcgatcgtagcttaattaatcatctaagggttaaaaataattaagatgatatagcttaggggcatccacaatgtagtgcaaaagtagtccataagcaatacaatattttattcagccacctagcaatattgtggaactagtccacagaaaagaataaataataaatgctacccataagtatatgggatggccatagagaataaaatatgttatttgtctctactttctctctctcctaatattatttgctatatatatacattgtgaaggttacaatagttaaagctcatatatatatatatatatatatatatatatatatatatatatatatatatatatatatatatatatatatgggtcccatctatatggactagtttttctatatacattagtgttgccctgatgagagtataaaataagaaaaaaaattggactatagattaatcatataagggcttaaaaaaattgatacgttatggcttaatgagagaagaagaaaatagcattaactaagtgatgatgaactctgtaggtatatagagtcctatgaaaaatagtgaagaaatatattcaaatattatatgaattatgtgggatgatgattttatagaattatagataatacaacatacttgtatgatattttagaatggtgcaaagaaataacaaatcctatcatatcttataacccactaaattctaaagttcaacatgcaagtccttgcatgttaaactttagattgcatgttgaactttagaatttagtgggttataagatatccttgcatgttgaactttaggatttagtgggttataagatatgacaggatttgtccttacaaggtttggttcacttcaacaccgatccacatactatacacattttggctgtatatatccacacctgaacacattggcttctgggcatctcagtgggggtggctctgagcatgcgggataggagcttgactagcatgacgaggcagaatccccaaccctcacgcgcacaagtgaaggcgacattatagttgcagttgggacccagccgccacacgtgcacaggtccatgacgcgatcactcccggccgttgggagccactcacccgggggccttcgtcgctgagcttgtccccgatggctgccacccttctcccctactcattgtcggctgacctggaggttgcgttgagatgggaaggaggtggaagaagattgccagttgatatgcggggtctacatgggtcccacactgactcaaccgtcaagtcaccaaaactggagagcgatactgtcttataaccaaatgtgacatggttttacaagattctggtattccggttcaaggacgggtttaacactcgatgacaagataaaggactgcaggtgaactttttccgagatgaaaaatttccagcctcatgggcctgtgcatatgacccataggccataggcaggccgcaggcggcagcagagcgacttccccaatccatcatcccgtctccgtcctcgcccgccgccgccgccgccgccgatctccatcctgcgaggtggcgccggcttccgccgcatcatcgctcaccgttgagcatcctaatccatcccatccgccctcctcgcccgccgcttccgccgatccccatcctagccatcaccatcacgcacgccacgccatccgcctccatccctcgccgccgccgtgcaccaccgccgtcatccgcctcttcctcttcttcttgctccacaagtaatctcatctccctcgatctcctcttctctccatttctctccgtgtagagaaaggaggtggagacaggggttggggaacaccgccgcgtagataaggcccttcttccattcggtatgcctatcatttttcgattttgcgcaacacgtgatcaattgttctgattatatttcaaataattaatcaaattatccagctccgtaataattagggttccccactttcttcatttttttgtacactgataattgcttcaggtcaaaattgatacaacaaggcaaacacgcactatctttgcaatacattaattttaatactacacaaggcaaacggcaaacttctttattttagtaatcgtactacatttcagtgttgttctttcgatgttcttgaaaatcaccacaaatttagttttcttgaatgccagtttttagtaccgcaatccaaattcagactttcaatatcaatcatttggcaattaaaaaaaaatcacatatagatacaaagagattcattttactttgaacgctcccatatcatgatatggagctaatctgctagtcaaacacttctaaaagggattatgactgattaaggggaaatcaagattcagagccttaccaaattgtttggtgaatttgttagtgtagactatgacttcagtaatgtgcaagagtagcattaaagtagaaaagtacaacgtagagttctaacacctgtttagaccgtgctcaaatcctttcctcgttattgtggcatggtgcttatattataactgattcaatattctgaataaacctattccaggttctatcacagagatgatggctgtgacaaatggagtaatccatgcatcttctagggaacccttattttccttcggtgtcattgctgatgtccagtacgctgatattccagatggtcgctcattccttggtgtcccacgctactaccgtcatagcatcagcgtcctccaaagggctgtcagcacatggaacaaacaacacaacatcaagttttcaatcaactttggtgacatcattgatggatattgcccaaaggacaaatcgttgtgggcagtgcagaaggtccttgatgagtttgagaaatttgatggcccaacttaccacatgtttgggaaccattgcctctataaccttcctcgtggcaagctagtatcgttgctgaagatgccaaccgattctgatcgtgcatactatgacttctctccatgtcccgagtacagatttgttgtcctggacgcttatgacttcagtgcacttggctggccccgtgaccatccagtgactgccgaagcaatgaagttcctggaagaaaagaacccaaactctgacaagaacagccctgacggtctggttggcgttgaccggcggtttgtgatgtttaatggtggagttggtaaagagcagttgtcatggctcaatgatgtcctccaggatgcatcagcacgccggcaaaatgtcatcctatgcagtcatctcccaatggatcctggctcagcttcttttgcagctctcatgtggaactacgatgaggtgatggctattgttcgccagtacaaatgtgttaaggcatgctttgccgggcacgaccacaagggaggtcactctgtggactcgcatggcgtacatcaccggactcttgaggctgcattggagtgtcctcctggtactagtgcattcgggcacatcgaagtgtatccagacaagttgttgcttgtgggttctgataaaatggctgatactgagatgtgttttgagccctagagtgaactgtgtagcggagggaaattcatccaacttcattgttttgattaatattcagaaacatgtgacttcattatactcattttctggcagcataattacatgtatgtaatagcatggaaactggaggtggcagcagctgctatgcttgccgcttaatctcccctcctctctcccaagaggaaagaggcagcaagatgaaaagcaaccgaaaggtaaataaagtaggataactttttccatgataatatcacaaattagaacatgcttgtttcttgaatattggacaaatatcagaaaatagagtgtggtaattttagaaatgaatcaatccaacgattgcttcttgcctgttccctttgtttcacaaccacctatgggtattcaatatgctaatatttatctggcattgtttatgtgccatatatctcactgtaactgcaagatgcagagaatactatcttcctggggtggtaccttagcttttgcccagtaattttcaccgttaaccatattttcctgaccctgtttggatttgtaatgttttcaattttcctttaagagaattgaaatggttcctgtagatagtcttttctgtctctctacttgtgtgaactctgaaccaacattggtcaaacttatgcagccaatttgacgatcaagtgaaaagcttatcatgtctaatatgcatatttacacattgatgactacatcgccaaccaactgaactactatcaagtatcatctggcacttaagatacaatattgttcacatccttcgatgccatttgatcaagtgatcattatctacaaaagaattaattgatcatctgtccaattctgaattactgattttcttctccaggggtgagaagaccttctgcagtcacgaatgctgctaccaagagatgttcctttttgtaacttgtcaattcaattagccaggataat

SEQ ID NO: 9199 - DNA, 21188 bp, Oryza sativa
atttgttgcatttgatccttcctttgttaattgttatatcatgtccccttgtaaccatctagttgcgtctcgatattcgtgcaccctgtgcgagtatcgacggacgccttcaaaacttaaaatctgattaacaacttgggtaaaactttggttttacaaaagacttggaaaacccgacacctgggttggtgcttgcgaactaaatgaatttccaaaaccgcggaccggggaatgtaccgggtgtacggtttcccgctcttgcacttaaggaccgtttccttggaatttcatccaaacataagacaagtacgaccacatgggtggaatgggacacccctagctgagtaactagcttatcaggggagccttgatgccgagagacatgtggatccgccggggtggtgtcggggaggacccctgggcttcctggcacagtatggtttgggacctaacctgttgttggtctgggacccctctcgtcggcatatggtaaacctgtgtcggctttgaaaatgccttgtcatgaaagcttggaggtctcccgacgtggctgatccccacgggctgggtgatccgggttagtaaatgtcgtgtgggtaaagtgtaccccctctgcagaggttaacaaactgttcgaacagccgtgcccacggtcatgggcggatgtgaggtgtttcctatagcgtagatttgtttgcctgtgctttgtaaaaagttgttgtggtttgggaatcgttaccagaatcagtctatgtggcagaggatgacctgagtggtcaagaaacgaatctgtgtgattcgggatgtctgcgggcatcatagactaggcttcccgagtggaagcggattgttgtgctgctaggcagctggactctgggagtccgagaaaatgaaaaagctctgggagccgattaatcaagtgaaatggctctcggagccgagaagtaatgatctgacccgggaggtcggtacagtaccaattgagttgttgaaaagcatctcttaagtcgatttgagacgcaagtctcttttcgacccaaacttaaaaagaagtaaatcacttagtgatttcaaaatgatttcaaaattaaagatttgcaaaacaaccttgcctctcttccaagcttgcattaaacacctaaattcccgtgacttgctgagtacgaaagtactcacccttgctctatataaatatatatatatatatagttcctccgcctcgaagtgaagatgaagtgaagtgaagaatagggtttcgtcctggttcccagccttcgcctgtggtgttgggtgttagtccgttggttccgctgctgctgctgttgttggtgtttctcgtccacgtcgtcggttgcattctcgggctgttctgagttgcaacctaagttaaggtaaataagtcctctatttattttaaggattgcaatgattcatattcgtcaccgtgggtaccagcgctatgtcctgggactggtactgagatcgcggtttcgtaggaagcggttcgcgccgtttttcctacgacacgcttctattaggtgccgttctacggtggtgccagattggggtgtgacagagaggtgtaacatcccggcctagcgcttaataggattaatagaatactcatattaacaagttgcaacttcttttccagaagccgatctccaaagaactccagggttaagcgtgcttggcctggagcaatttgggatgggtgactgaccgggaaattcttttcccgggttcgcacgagtgaggacaaagtgtgtagaaaagacatgtgttggtctgtgagggcagtctatgacctatgaaagctgccagatgtaagtgggcccggcctgggagaggcgggtcgttacaaggtctgactcgtagtcgacaacagggtagccttcctcctcgaatccaatatggatacaatccgagtagtccttgtcgtttacatgtagaactctgttgtctttccttatctagaactctctcgaggtcagtttctgtataagacatggtatgtggtggatcgtggtggatcctgccgagatttagtcaactactattaggtatgtggtatccataaccctgacagtagcccccgacttcgatgcaaatgaacgagttcatattctcaaccgcagactttggaggaactgttatcgagctcacgtgatcgttctcggtgagtttagagataacattagatttcctttatcagcctcgtgcaggcaccgaaagggtttgtctaagtcaatctctaatgccgaccgagaaagtacagagcatacgactaagtctcccgtcttgctgtaatcgagaatttggattgaactcaagaaattttatctcggcgggtacaccatctcttcattccgtattccttgtcgagatccagcaaccgttctcgaacaatcgagaaggcgtagagtctgcgacagagctttgtcaacattggtcgtactcgccttagtcgatcttggtgtagcactatagagacatggagtcttcgtcaatgtcgcatagaattttcctgaaatcaatactcagaaaagaatatcaaatagaaatagcccctgagcgaacgctcaaagggtgacatgttataatatgtatggaaaactgtaaatgaattaaatttacagatcaatgttttgtatatgagtgtcttctctcttaccgactccgatcagtcagtttgtagagtcatacactctccctagcccccagccttgtcgtcagagaatcgttctcggaggataaggctcttggacccttgacctgccttggttgaacaagcactgatcctagcccccagccgtgaagttggaaagttaatttccgattacacggcttggttaatacgcacggcgagaactcttacatgaccaggtcttacatggtctttcgtctctacaggatctgacaaggccttatcggctctgggcgtccccagccgaagatcccttaggttcctcggaggccttgttaagacggcgtaaagggacaataggataggtttcaacgctaggtgtcatcgtggtaagggatctctgggtaaaacacttggcgatattatgtacctgctatcaactttgttgaagtagaggtagtaggagaaatcgctacaccgctggtcgaggaccagatagtagtcgtaactcgaccacttaaagtggaagtagtgggagaaacgctacatcgttggtcgaggaccaggcagtagtcgtaactcgaccacttgaagtggaagtagtgggagaaatgctacatcgctggtcaaggaccaggcagtagtcgtgactcgaccactccaagtgaggcgagagagatcactacgttttactggttcgagaaccaggagtaggagtctcttaatcacctataggggcgctaaagttggtttattacatgtgcacatcatgtggccagcatgactcacatacccaacttatagcatatcctgatgtctgctcgcaatcatgtcgggtgatcaagccgacgacgttcgcgaggaattatccattaacaaccttttctcgagtagtccagcgatggccggtgctatgagataggtcgtcggtcttcgttgataggttgggtgcgataactccgcatttgtcaagaatgttctcaataatggagtgtactcgaccacaacctactcgagtgctcaattgttcctgaaaattattttctagaagcaagacatatagcagataatatcgagtatgtactcaaaaactgcgtggatcttctagcattatcaggatataacgatcagattaaatatcaggcattatgtaaaccgtaaacaagcatgatttatacagaagagaacggagcgagcccccagcgttagactgtagttgacctgacatcgaaagcactcgcacaatagatattgtataaaaaacatgctctaggtaaacataataaattattgatctgacaatgctatatgatctgaataggtacgataaattgcatataaaatattgcgtacctgtgtagatatatgacggatatatctacggaattaatagattaatttaaaaaaccaatctaccaattaccttactgcgtactcattcgatatcatgtgatctgacatctcttggtacgccgcggagcttgaggcttggtcgatctcgagagatcgagttgttgatgacgatgattccgatctcgtcgggggacatactccggttgggttagatctcctatagccgaagttgtcgagtagtatgttgtcggagaatccatcttcttaaacccatctcgtcgaaatcctagatcaccaaaatccccctacctggcacacactgtcgatgtttggtgtcgcaattctggtatttgtatagtatggggatcgtcgatactaggatatacgcgagactgaggtaaaagagacggagacagagatttttatacaggttcgggcccctgagttgtcaagtaataaccctatatcctgttggccgaagccggtattgctcttattcaccataatcacaccaatacaatatgtgggtagcctatctaactattgtcgacatgtcagtctgaaggtctgactcgtagtcgacaacaaggtagccttcctcctcgaatccgtgcccggcgagattagagagcgctttcgtctctcctgactgtatccggagacaccataggaaactagccgtggctatccctaaagtcgatatccggcggcttgtcttggcgtatgtaggcttgtatgttgtcccgtgtattatgttgggtgttgattgaggtcgttgattgtctgtgttgatcgccccatggtgggtgtccccctgtcctcctaggggggcttgtatttatacccataggagtccccttgtccaagtagaactagggaaaccaatatggatacaatccgagtagtccttgtcgtttccatgtagaactttggttgtctttccttatccggaactccctcgaggtcagtttccgtataagacatggtatgtggtggatcctgccgagatttagtcaactactattaggtatgtggtatccataaccctgacaacagtcattgacatgtcggtcccacggttttcctaattttaagtgccacgtcaacaccacgtaagcgccatgtcagcctaaactgccaaaaccgtcttaggaccttatttgcactggttttgaaagtagagggacgtgtcatatctggtattgcggttaagggatgaatttcagactcgatgacaaattgatggacctaaattatacattcctattatatcgtcgacttctgtctacaggattttattggacctaagccgacttatgcggggacaccaatgttttaaatagcgggctaaggcatttagcagtttgcttcttaaacagctatagctgcagctatagcaggctaaatggagctatagcggctaaattgtacatgagagcaaatagctagaatccttctcaaacatctatagcgggagatttaaaaccctgggggacacctaactcgcgcgtacaataaaataagcgcttagcattaatcacactggtagctttataatataaaataatataaaataagttgatttttttctaatttaggttgaaattttttaatgtgagctgaaaattttaattttgaaataggatatttcaaatttttagttgaaagttttaaattttaaatgtaaagtttttaaatcttgagttgaaagttttcaaattttggtttggatgttttaaatttgacttgaaagttttaaaattttgagttcaaagttttaaaattaagttgaaagttttcaaagtttgagttgaaagttttcaaatcttgagtgaaaagttttagtttttattagaaagtttactcaaaaatttgaaacttttcaaacttgattcattttaaaatttataagtatattcatttttttcaattcattttgaaattatttacttctaaagtattattcgtttaagttactgcttattatgtgcaaagatatatactgttaacttgcaaatatatgcttagcagaaagacggactctgaaataaatattgaaatcatcaatcagtagctctcaattaggcatccatgcatacatcttttaagcaagagaaaggacatgtatgtggtcaggcgggcggtcaagcttgaagactgacttacacgttgaccaaaaaagcacgcctaaccaactcaccccaattaccagtataatccttccctccctaaaaagaaaaaaaaaacaattctgttaattgatgtacctcgcgggagtactaattaattgagcctctgcctttcaaaagtgtagtgatccagtaaacaattctatccagccaaggcatgcatgcagatgagaaatgcatgaatgataccatctggtctcgctgtctggctgtttgatgagccctaattaacatcacatatactatttaatttaagcaactgatgatgatggaatgaataacccagcatatagtagtatgtagatatgtatagtggagtactctagtagaagatgcatatgatggaaaaagaacaagggatttttttttaaagacgagaacaaggaattgattcagctaatgtagacatatatgcatgcagcatctagctagccaagtcatccatcacatcatcagatcgatcagctaaccttaccttagtagctctctggttaattaattaggcacacgtggggaaatgaatctgtcgctaaaacggagtagtagtagtaagtgcacaaaccaatcggccaaaaaaacggggatcgatcgatatatactctacattatagactccttaagtccttattatatgatcgatttccccacctgaagccggataatcatgaaatagtccgcacaaattaatttcagtttctagaatctgaatatacacagatgcagaatgtgcatgcacctggaattaatcctgtacatacgagaaaacaaataatatgtcacattttgttctaaaacactgcgaggtggcattttaacggaaaggcaatatgcgtaatattttatccggtgtattgatctagtgagtggtattttatccaaatcacaagaatggagtgacatatcatttgttttctcatatatattattaggtgacggattcagaaaactttttaggcctgggcaaacttaataatagataactagcacacacgataatccatataatttaccattgatataacacatgtgatgtagtgaggtttaattgctttgctaattttcttgttaatgtggtttcattagtttgtacatgagtttgattagctaattttcaaaacaattacatagagtattgtgtactccctcgattttacactataaaatattttaggttttaaataaattcatatatggatcatgtatgtgcttcgtatatgtatctaattttatatggatgttagtgaatttagataagagataaaaagatcaaaacatcttatagtatggatcaacgtggaactaagggagtacctactactaaagatcttgcatagtattttgataagatcattgacagtaaactaaggcctcctttgaatcaaaggaaaaaaaaccataggaattttagagcattttatcatatggaaaataattctatagagttctttgaaacaaaggattgtttcctatcctttttttttgaaattcctatgaaattgattttactagagcaattttagaggaaaataagcatgattcctcttctcatgttttcctctccatatgtctaagattcttgtgtttttcatttgtgctaatcaaacaataggaatcctcgtatgttttgtttcggatctgctcagttgagtcaatctgtgtctcactgtcttgttagtgagtgggtgtgtgagacagagaaaaaaaatcatttactggttaataaataatgaattactccaattaattgtgcaagttgcatggggtttggggagggggaaggagcagagcagtatatataaaagggcaaagcctccgtccatttattcatactcgatctattattcggcggcggctgcctctgcttgcttgtgactgtcgtgtctgtgcgtgtgtgtgtacgtacatactccagtatatatatgcattgctgcatgtcgcttcatcctcaccgccgccacggcgacggcgacgtcgacggatcagcatcaggatcaggatcagcgcgcctcaccgccggcctcatcaacttcctcgaatcgcgtcgcgccggcgccatgagcaccaccaacagctcatcctctgtctctgtcccagccatggacgcccatggacaggaggaggaggaggagccgatgcaggtgcagcaacagcaggcgttccgcggggtgcgcaagcggccatggggcaagtttgcggcggagatccgcgactcgacgcgcaacggcgtgcgcgtgtggctgggcacgttcgacagcgcggaggaggcggcgctggcctacgaccaggcggcgttcgccatgcgcgggtcggcggcggtgctcaacttccccatggagcaggtgaggcgttccatggacatgtccctcctgcaggaaggggcgtcgccggtggtggcgctgaagcggcggcactccatgcgagcggcagcagcggggcggcggcgcaagagcgctgcacctgcaccggcggatcaggaaggcggaggaggggtgatggagctggaggacctgggacctgactacctggaggagctgctagccgcctctcagcccatcgatatcacctgctgcacaagcccaagccaccactccatctgatctctactcgtattcctcacacgcgcagaggatgcacatcctctgcactacacttgtactagcagtggttaacatgtggatccggttccatgctctgattgttgcttatatttttcaaggaatataaacaaatccgatcctgagttaattagtgtaaatatatagattttgggtttcaggattaccatttttatttttggtggcaccatccagcttaacattgctccgattcacaaaaagaaaaagaaaacactcctactgtacatatacatatatgggcgagcaaattaaagcgggaaatgacgctgtgtttgaaatcgtctaatctgggcccttgttttggtttgctttggtccatggacagattgacggtgctgacgtcacgttgcatgaaagcgaaccgaacgcagatgttgacctggtcaagtccaaagtccaggaggcacgcacgtagtgattcacccacgtgcgtcaatttttttactcactcaaaagcacccagcaacctaaatagtgccctacaatataattatattccctctactatagcactactcctatgcaaaaaaagaagaagagagatattcatttgtaagattattttctactccagcaacttctcttttttagattatccattaccttaaaaaaacaacttttacagtaagtaagacaaatttgtaaaagataatagcctcaagattaaagacacgtggcaaatagatcatttcctccgttggtttgtttgcccaagtgcaatgaattgaaccagattgttgacgaatggggaggagtactggcgattaaaggacgatggatggatcagagttggcaactgccttttaattcatcacatgtggccttggtttgttgctcccaaaacaaaaccaaaagaaaaaaaaaagtcttgttgcctttgactcgaattaggagtattaacaattactagtagtaattgataacaatccttttgcttctgtaaccttctttccttcattctgcgtgcctgttatatatgctaatgctatcggtacaagtctagaagattgagaccgtaatactcttttatcttctctggcctctgggatgatgaatccggcagctcttccccaacttaactgtcatccagttcagtttctttaaagacgacctatctcactacacgtgcgggagttgttattatcacaaaaacataccgtcacggacaaattgtttcaaatctaaccaggcctttggaacatatatatgaatttcagaggattgtcggaagaattgcaataaatcctgcaaaagaatctataaaattcatatagtatttctttaaaacttattcctagcttattagtttgatgaatttcgtaagtatgtttgcattagaaattggtggtcaaattaagattatctaaaatgttgtgttttcttttggattgtgaactaatcgagtgagttgcatgctggctgctgtcttcatcaagacatgtataaaatcgatggaaaagccagaggtcgtggtgcaaaaccatcggcatggagtagttctcagtgtcacgtgaccaaaacaaaaaggatcatttcaatttcaataataataattataatactcctccttgattggtgattgcaacctgtccttgcttaccttggagacgaagagcatatccgttgagcttgcttggaattggatagcctaccatgcaatgcgtaccgctcctgcttccttgctgccgtaacttctaagaagcatccaattgaacacgtgcacgctagttgcacccttttttaaaacatttttaaaagaagaaaaaaaagtggactagtagtataaataatttctaggaaatacagtatatggtacacagcactagcattcagtttgacctgtacctagatcactagatggaggagctgtagtatcagattcatatgcgacaaggcatgatatgcagtgaaaagtggaaacgagaagtttgagcctcatcagttggcctaataagccaaggaaaaaccaaaatttgatttattttttaaacttgatttttttaagttgattttaaaatatttttaatgtattttattttagcgttaacttttaaatcgttacgaacaaatatataaaaaacttactaataaattaaatttttattcccttataaactgatgaggcttattagggaatatgggcaaccgatgaggcttagtcggttccatccattccttgccaacaaatatatactgtactatatacttgtgtgcagcgatatgtgtgcggtgcagtgtgtagcatgagcgttactaagtggtactcatccattgacaatcccaacatagtacattccatccgcgagcaatgctgcaatcgtggaatccacatccacacatgctgctttcttggagccgtcctattacgacttccctcacactgcaccagcactgccactacactcctatactagtagtagttctatgcatctactagacgacgacgactactactatcgaagtggagtagtatcaatgtatctcctccggaaaaaaaaaagaagagggttttgctgccatttctttgggctcttctcccctgatcccctccccctcccccggagaatcttctgatttagtactataattacgtgcattacagtaacaaaaagtgaatcccttgggcttggctttgccactagtatgctttactacagcagcggcagtagtactagtatgacaatcgcttcctggaagggacctcattgtcgcccgccacagcaaagcaatttcgtgccagggtcacagagagatgcatgcttgctggctgccaacatgaaacttcccctttgcatgcttgcttccttcacaaaaaatcacaatcacattgctttcgtcttgtgatagcacatgctactctcatctttcttcttttataaggggaacctccgaaaagggcaggaagttcctgtaatttcactaataagaagaaaatacttgattcagtttataagaaaaaccgatctcaaaaactttacaacagcacaattaattaaataaaaccggccaaaaccctgacattatcaaattgagctaaccacgcagacccagacccactgacaaagaccagcggtccaataagggaaaactcctaagatgaagccttcgagaaggacacaccgacagaatggcgagatcgcccgatccaaacggatataaggttttcacccagagagatccctttaggtggtggagaaggtaaaagatgcccaaggatgtcgttgctagcgtcggcaagccgcaaaggctttcgcctcagagtcccatccaaccaccgcgtccacgaagaaagccacttaatgccacttgcacaccgaaaaccaccacctgtacaacacggccactgaggcactggtgctcaccgatccgttgaaagcatccgtccgtagccccggtcgccttccaccaccacaccacaccatggagctccacagagagaagtgggctaaacgaagagcggccatagctcggcagagcttgccaagacgacctacgtcaccaccttgcatgtcccacgcggagctccacgtcaagccgcgtagctagattgtcggatccgccggacgaccaccagttggacagtctagcctgctagaaaacctggacctggatctagatcttgagaaaaaacggaaggggaaacagagagggaaggaggaaggggaaggaaagacagatgaaggatgagaggcgccgccgccgcaggtggcgagccgagaaaaatagggtcaggagaaaaatgagaaaaggaagaagggaaggaggaaagggaaaggataagggacgaagggagaaggaggcggggggtgggggggagcctactactcggcgttggtcacctcccgtgagtcgtcctctattcctcttgtctttcttcaattgttattattgtcataaatcaggagaacataggattatgtagggattattatgtaccagcccggccgggcagatggaaccgtctgtcgaattcagtaaaacaaagttccaggaagcagatataattcatcatggttaatactttgattggttgcaataaactggatggagttacatgctaataatttaaaaccgcaagcaatactagtacttgtttgcctcggctttggcggccttccaagggcaaacacattcaatttggtcctgcaaggccctcatgctctccgcgattgcaatgcaagtgcaatttcagaaatatactactacttacaagcaatactactcaggaatgactcaccagatatttactcaggccatcttttcggagctgattgctctcctccctcactaacattcattcgcttcaatcccctcagtgccactgcaacaagctaatgaggcacacattagattgcgcaacaagtgaacacagaaactattatgcatcaatcaaaaatacaattctatgtgacttcaccagaaaatataatgactgattgttcaaggaactctgggaaacagttccacataaatgtttcttactccaaaccatttcaggttaatttcttccaaaaaggaattggtctacagcattcaacctattgtgcctagtggttagagattatcctcccagtgacaattaacagcacgtcaaggatgtgctactggaaaaaaaagcatgacactgtacatgatctggatgcatcatcgcattgtttcgccatgccacaagaattgtagtactaatccataaagggattgaaatagtgagcactcaccctactgggaggttcattttgtagtctgggacttctccgaggctctgcattctggttttgcaaataggactgaccactttggagaagagacgatggactctggttttgcaaaagcgataccctcctgttcgagacatcagccgacagattctggtgcggcaaataggacagattgtgattttgcaaattgggtagattgttctggacaaaggatggcatggtctggttcttcaaatagggtggattggtcagggcaagagatggtagattctggttttgcaaaacgggtgatctgtcgtggacaattgatggccctgaagtgttatctgcatggttttccctagaaaatctttgtcgagtttcttcggttggagtactagtaatagcagtattgttgcgtgaatactgagtggcggcagctcgagctccggctatggcggcagtgacactgggagatttgtctagtgcggcggaccttgaggagtgaagttgaagagatccagggttgagagagaggggattggtggggtcagggagtgggaaattgacaggcagtggaccttgaacaggtgaaagacccctgactgctccctcatagatctgtgacatgacagaaagaagatgaacagattcattagaaggacaagtgagaaaattaagcagcagctgcattgtttatgcactgtgatctctcttatgttatttagaagagaagagaggacacacccgtctctctaaattgtaaacaccctggtaaccacgcatgtcgaatggaaccaccagtttctgcattgcattgcataattcgcattgcagcaaaaaaaaagaataatacaattaagcaaatttagaatgaaaagaagtgcagcgtgaaatactagtgagttgaggtgacctgtgggttttcacaaagccagcagaagtcggtcaatgcttcgagcctgacctgcaggtagtgaagaagatgattggaattgggaaggtgcaggtagtagtaatagagtagggttgagtagatacagattggggcacatgttcccaggaagcaagctcttgagaggtgacacagcctaccacctcgacgcatcctattgagtagtagtaggagtatgagaattgaactcctagcatggtagttgcagttagtagtagagagtagcgtcgtaccgaggaggcgggagacagggtagtggtgcgggaaggtgatgttggtgattccgtcgagggcgtaaatctccctgtagaactcctccatggccttgatggtgtccgcctcggggaccttggaagccgcgtggatccaaagccgccctgctttcaattcaattcatcaatcttaatcttattaatcttggattggaggaggaaggaaggaaagaaagggatagatagctaccggtgaggggcgatggccatgagcggccctcgacgcgcttgattccgtggacgagcagcgacgcccacggctggtgcatcgtcaggcaagggttccggagccttcccccgccgccgccgcgcatgccgccgccgccgtgcttccaatccaatcggaatcggaatcggaatcgggattgccgtcgaatcgctcctactcctacctactctttttttttttttgaactttactcctacctactcttggtcgaggggaagaaggatcatctcatctgtctgctcttgtcttgggccaactgtgtactgctatttgttagttgggccaaattaaggctttgtttgggcccaacatatattatatagactgtgagcgtctgattttttttgatagatagtactcctagatggtttcttcactcttaattaacaactggaactactcgtttcttatacaaagtgagtctaacttaactggctagattacttgtggtggaactatcccaccaagtttaaattctagatttaatacgagtgctcacgattacgtctaattatttatggcagacgacgtgtttgtagtgacttcgccaatcttaagtcaatcactggattatcattcaatggataagaaagctgctatattttttaaaaaaaataaaagaagaagaaagaaaatcgcgtgcgcctgaaatctacacattcgatgcatagataacatcattggatagccatagattaattaagatggtctccgcaaaacaaattaattaatactcatacatatataccggcaaaaaaggaaagaaagcagagatggaatcagttcacattgggagtaggtactgaaagtcgtagtcgtatggaatgacgtcgacgaggtgatggatgttgagacggtgtccggaccacctgaggcaatcaaccatggatttcctgagagaccaggacgtgggcagctggtcgcaaatccagcgaacaagcgagtccaggtcctttgcgaagtcgtgcatgttggagtgtatgaggcttgggatcatcagcctcctcctcgtcgatgtcaccaccagcgatgcctgcagatactccagcttcgccttctccagatccatcatcacacgatcagccttgtatattcgtagctgcaatgcaatgcaaatccattagttacagttgcattcaacagctagctagcagcttaatggagtagtaattaattaccgcgggagatgatctgttgccacagcagagtgcgaacagaatgttgggttctgagctgttgagcccgtaacgactcctcacctgctgttcttccacatccacctcgcatttccagaattcctgcattctcgaatggatataatcgttgccagagccagagccacgagaagaatgaatgaatgaaatgcctcacttctttgacactggatggctgtctgaggatgaaattctctatcaccaaggcgttcaacttttgccctgatacattcagcgtggccttgttcttcagtgcaagtagcttttcagggtttgagggtagtccattgtgcaaaatcccctgaaatacaaagttgatttaattgtcatcatcagctagacagtccgtttgtgcagagagaccgattcgattcaattattaataaatactccacgtacgtacgtgcatgatgcaggtgttgtatatgttgagccagaaggcaagcttttggtggtgagtgagaaacctcaaatccacatgctgcagtgcctccagcatccccctgcatatgaaatgctcaacttttaattactaattagtggatctgctgctaattagcaggtgcattatcaggtagtagcaaataaagtaggcaagcattagtgtaagtacctgagcttggtgagcaggggagaggtggagaatcctctgaggtcgaaagcggaggaagtgaagctgacgaggttcttgtaggggcctatatctctgacgatggaatccgggatggcgaagatgccgtagtgatcctgctgccccgaccggcaatcctgctgctgctgctgtttgttcattaccaggctggtgtcgattctgaagcttccacctcctcctcctccctgatgctgcctggtcagtgaaggcgatgaggaagaggacctactactagcgttgttgttgttgttgtcctgctgctgcagctgcaggtcggcgaccctcgaggacctgagcagtcggatgaagatgcagatgaggcacttgacgatcctctccgacagcttgttgggctgctgcaccatcttcttctttttgttactactactactagtatcatcgagtgaattaagctttggactgggagtgggaggtttattgctgacgatggtcatgagaggatgatgatggcggcttgtgtcgaggccgttgatggcctgactgatgaagaacatggacttgatgttggcatgatctcctgctgcagatcctccactattaacattggcattgacagtgtcgtcgtgggtgaggttgattgcattctgggtagttgtggtggccgccgccttcttcatgcttcggatctgggtctccaggcgggcaatctcctcctccaccagcaccagctctgctagaagctccttggcctgcatccattttcattttcattctcattcctagctactccactaactcatcgactctgcttctggcttctaccttgtgcgggatgaatgcagggatgttgtggaggacggatggagacgacaatgatgatgatgatttggtggtgtttgagtgctgaagggcgcggtttaggatatcatgcaccgcctcctcgttccgcagctgcttcttcagctcactcacctgcttatattttataatgtacactgcttattgcgtctgctgctgatccaacaaataaatttaagctaattaattaattacctcttgctcaagtctctgccgcagccgccgcgcgggcactgttcttctgctctgtaattgaaattaaacagctagctagccttgtcagatactacaatatagtacgtattttttttcagagaatggattaccggacactgtcatcgatatgatcgaatttaattagctacaatggcaattaaggtggatgggacgggatcaatcatcagacctgaggatgagggtgaggatgggcgtcatcgtgagacgacggtggtggtgcagcgccggtgccggagagcagctggtgaagatggggcggaggagtagtgcttcccgcggtcacgtactcctccatatactatactagtgcactgtacgatgggatgaactagctagcgatggttcattatattagaaccgtctggcgggagcaagctagctaggtgaagaagaagaagaatgatcgatgatggatggatcgaggaggaagaaaggtagagctagagcttagagagagcagatggttgggagggcgctgtcgtacaaggattggcaggtgaggtgcggccgaagtacgcaaactgctgctgctatgtttgggcgatccgatccagggaggggaggggattgatcaccgatcgatcgatcacctatcctatatatatgcaagcaaccaaacacttctagttctagcttatgtggtagtcgatcttgtgctagtgccatgggttggtggcgtcatcgagcgcgcgcgttacatcccatctacatttcccattccaattttattttaaatactactactacgactactttttttcccttccacacaacacatgcctatcttgccttgtaatccacacgcacaactgcatccaccatgtcatgtaatctctctgtttttcctctcctctccttgttgagtgcaacctactcaacaccgctaccttacctggcgccttcttttctctgcttattttctgtatcttagtgcagttgggtggaatcaacattttcatcttcactaaccacctgctatccgtacgtaccacgcatgggttttaccattttaacttttttttaatcatttatagctagcgtccgttatattcttactgttttcgacattcatctcaatatatacaagatggggtcctgcacatatatctcttctctgccatcttcaaagccaagtcatcctccttccatatgtattcccaccgtgtgtaacccatgcgctcgcggatcatacgtaattaaataactactgcatctaatgttttattctcaatcaccctcctactatatcctaatttatatgggcatggtccgttagaacgtatgagtatgttactggttacaacaaaatgacaatatatttcaagaggcctggatggctgcaaaatttcctaattcttccctctacaacgggtaggaaaggattattttcccttgttatcctataatttattgagtgaatggcaatttgggtcacattttattacacaagtttactttggaccacccttaaaccaatattttcactttggacccgagtaactttgttgttttctcggtttagaccaccccaaacaatttattcatcaccccaacctcaattaaattagttttgatacaccggtgaactttcccgtatatatcttcataaaaatggacggtagatatgaaccgtaaagagagttgggtggtccaaactgaaaatggtaaagttagtccaaagttaaacgattactttaaaggtggtccaaagtgaaactttacgaacaaaaggtggcctaaactataatttactctgatttattcatgcaagccaaatggcatatataaaaattaatccttataaattcaaattatttgttttctctgtgaacctaacaagccgatttgaacctaacaaattcaaattcctatctccgcccctctaccaccggcccagccccctcccccccccccaaaccgccgacccctcccggtagtcaagaagatcctcgtccgacctcggcaacaagagcgacttcctcctccgctctaaccccgcccacaagatccccgtcctcctccacgctagtcgagtccctgatcatgctccaataccatgatgacgccttccccgatacccccacctcctccctccgtcgaactcctcctcctccggcgaagccgacaccgcgtacgcgcgcaccaaggcaagattctaagcagactacgtcgacaagaagctctaccgctgcgggatcaagctatggaggctcaagggggagctgcaagccgcggtgcgatgcaagatggtggagatcctctggacgatggaggcgaagcgggagttcttcttttgtagcggcgggcttggcttcaccaatgttgcgctcgtgctattcacgacatggttctacagctacgagtggtgcggtgggttcagcatcaatgaggtagcgccaaagctggcgacgtgggcacgacagtgcatatagatcgactccatcgccaagcacctcccctcgccggagaaggtgcatgacttcatcagcgtcctccgaaataagtacgacgttaagtagatgggatctcaacatcgatcggtctccgtcgagtgattcatcgtgagatcgatcgatgcaaagttgcagggattgattggctgtttcgtttgctatgtcattggctttcccgcgctccctgccttgtcgctctctaggcacttactggtggagagaggagatagagatagagaaaaagagggtgaagtgaaggaagtgggtcctactattttttattttcttgtttgattgacataatgggccctacatattttttttaaaaaaatttagttttcaattttgttatttttttaatcaaactgcacgtcaatgtcatgtgggacgaagtcctagtcgaactagtcacgtaggagccagaaccggagacaatacaaccgaaggatttcatttgcactagttttgtaagttggtgttgtatatttttcggttcaagatgaaaattggactgagtgacaacttgaggagctaaagtgaacttattcttataaaaggccgtgggtttacccgcaaaaaaggggggccatggatcgttgggccgaaacaacacacaggtcatccggccgctctcttctttgggctggtggaattaattatagtataataaggaaaagcagaaagaaaagcgtggcacggcacggcgacggcgagcgatacaagaagaaagaaaaagtctcacctcggaacggaacagcagcatgtgggcccacaccacacgtctttcgtcgcaatgccacgccatcatcgatccctttccttcatcaggagttaa

SEQ ID NO: 9200 - DNA, 3364 bp, Oryza sativa
tccttgtgtgccatttcgtcgaacaggttgcaggcaggcggtattgcggcggtgggagaggaggcggcggcagcgtagaaggcgagcagggagcaggccaggacgggattggaggccaccaagccgcgccggcatgcctgggcgtgtatctggtaggccaagcgggcatcgcagcagcggaggagggcggagcaggcgagctcgtcggcggcggcggtggtcgggtggacggcgagaacgcggcggaagacagtgagcgcggcgtcgtggcgaccggagcgagcgtggtcagcgacggcggcggcccaggaggaggcagagcggcggaggcggaggcacatatcaatcgatcgatatgggttcattgaattcatttcatttcatgggttgggttgggtgggggattgcaatgcagactgcagttcccttctctctctccccctctctctctacaccttctctctcctcctgaaccttgcaggaactctctctctcaaaaaaaaaccttgcaggaagaactgaagacccaattcaaacaatccacattttgtgattttgatcaggtaggtcagtgctccagatcacctgaggaccaatttcttcgattcgagttgggaaatgctccctgattatccatcatttgcaaccttcaccaacatctctccaacaaatatgcctctccaacaaatatgcttctccaacaaattatgcttctgcagcgaattctccactcatctctctatcaaatgcctttgaactcattcctgcaacaaatactagtatgccttcatttattgtgcattttcctgtcgaacaaacaaatcgtcaattgcaaaccatatgcaacagaactgcagtagagtagcagcatcttctccattctatgctccgctcattaatccttgttcatgtatacagcatgtattatagtagcattcaacaaggatgcactcacagcatctcttacatacaaggcaccagtgcattctcatcttgttaaaaaaaggagaaaaggatcttaaaaacacagtgagcatacatcacatgggacaaaatgaatttccatatatatcctcttaagtctcttcctcctcttcctcagatgcatcatgcgcgccaaacagcctgttcaagatggcctggttccatcctaatcgtcgagctgagcttgagtgcaagattcttgtggtaaagttgcgccacttagaggggctgttgcgaccatcatcccctgatgactcaccatggcacacgccagatctgcgagtatctggatagtacttgaggaccacaccgttcttgtaaggatctactcctagttcccgcggcagtggaatccccactatttggacatgagatatgctgaaaattagtacatgtgccacattgtcagtgcaacgaaacaaagttcagaacaaaacaataactcaacagtacccaactcaccatatgtaatatagatcatccatttcctgtttctgaaccctaccaagaaactcaatcttcacaactccaccgatgcatagaactgcgcgtggaagcttaaaagactgaaggacactttcctggaatatggtacattatttacattcagcaagtttgcacacgagaactgcaatgatgtattgacctatatatgttggaccaggaacacaagatttgcccctctacatctagcacattcaaaaaactgctaccaggatatgtagggttggtttagtagggcaatatattgtatttggtttgttaccaaccaaagtgataaaaaaaatttgatgctacaaaattttggccgattttttttaatctaagcacatgcaacctcataattccaaatgtgagcatgtattgtcctgaattctgtttctaatcaaactagctagcaggcacaaagcaaatgatccattaacatgttttgctagtattacaattaccctttgctgatgcagcttctatgtgaaacaaatcaagatttgttagcacacataatattatgattttgatgatccaagcagatggattatatttcaaccggccgctacagttccaattttcaaaacgaaaacaacatccaagtcaaatatggattaagaaaaaaaaagacgaagaaagctcgagactaacggcatgacggcacggtgccctatctcgtaatggttgatccaaccaattgcaaatggtaataagattttcttttctgacgacaaacaatcaattagacctaaacaagtcgctacgagctagtgatttgtccaatgatcagcagccattagtttgttatatttcgtttgacattaagtccgatggaagaccactgcacacacatgtgggcttcttgattaaaaatagaattccatccattacctgctcatatttggaattagaaggttgcatgtgcttagatgtgaaaatttctgaaattttggtaatgtagagtgtgtttgatttgctagcaaaaattggtaaaccaacccatacatgccaaaaataaatcctgcatcaagaatgcttagtttttaggggaggcatgtgacggcatgaaaaacactgacctgcagcattggaaattgtggagatgtgtacgtccagatatagttgtcatcagcagccaactggccttcattatcatgagatacaagtaattgagatggtagaggtgtctttgggtaacccatctggaagcggacatattttgcggagtatattggatcaccatactggaagaaagctgggtgcaagagacaggtaatactagtatttagcaagaggagtaaaaagaaggaaggaggatgggtgggctgacctctgaatggctgtatgttgatttgttgaacgaggcatagatcggagcgaagcctgtaaaagaggcattcgggcacagcaggatcgaagtggccggcgctggaccaataagagggcctcatcatggccacccaatcggtgggcacaagggtgttttgtatggtctcctcagggaaattgtcggtggtggaggcaccgatgcagcggatgatgcagtcctgggggtcatccaagagaagggcatagctgagatgcatgtacgccctgtgctggtgctccgcatccgactcagaagcagaggcaatggcttgtttggtaataatacgggtgaagtttgaagcttcagggcaaaggcgcaggcattggatcttgctgaagccattccgaacaactgagggcaaggacagcaaaaccagttggtccaatatactactaatttataaggattaaggatggagaaatcaatcaaaaaattggagtacttggtgcaattaagaggatatattactactataccgagtatatattattgaaggatgaggaaagagaagagatgggggta

SEQ ID NO: 9201 - DNA, 3814 bp, Oryza sativa
atggtctccaactccaatcgaatcgctcgcgctcgcgctcgcgctcgcactcgcagtctcgctcgtgtgccgatttggatttgccgctcgcctcgcctggaactggaatccaacaacaaaggaggaagaaatggaaccaggcgtcactgacaattgggccccacccctcttctcttcggtcaaactgacttgccttcctgccttacctctccttcattccgcttccacccaaatactacttataaggtaggaggagtttttacaagtgatttataatttagagggataagactattaactgttttgtttaatttagatttagaaattataaaattttaataggatggagataaggaattggagaagaaactctctcctttccaatacctaggtatggggtgataattgggaaggaattcctcctttactcgacctaaacaaatcacaaccatccgttttcattaatgacttaatctccaactaaactccctatcaatttccctcgcctttaccaaacaagatattgagattaaaaaatcaaatttctatgatattgggattaaaaaatcaaatttctatcttaatctcatcatcaataaactcctaatcccctttgctcgagttgccaaacacgccgctactactcctataagtgtagttgtggtttttttttccaacatttcaccgtccatcttatttaaaaaaattatagaaaaatttaaaaaatagtcacacataaagtattattcgtgtttttattatctaatccgtacctaattaaaaatgtgaagcttccagtagtttttggtcttttttttctattttttcccgattacgttgtcggttttttctccttctgaattttgttcgctgttttttttgccttataatgatttggtatttttgtcatcctattttttcccatcgctgggttttcatgttcgatcccgccaccgcaggccaaaccctagcgccgccgcaacgtcaatatgtatccccgtgcgtttctcaaattaattgcaaaaatcaatttctcaccccctcccccattattttcctcatgatttccactttcaattcgactttaatttgctggatttaatctcatttgttgatgatggccggccggcgagcttccctggtcgtttttatcacgagttttgtggatttgcttcgattttgagaaaacgaaaataggagatcgaggggaataaaagccctcaatattttcggagttcgagaaagattcagtcggatttgatggggagtatcggctccggcatacgggcacgggactatcttccggtcttccggatgttaaagacggtagtcggctatgcgagcagggcctgtggctccacttgtgggcatggccgaagtgaggcagggcaagtggagggaggtagaactgagctagggctgaaatggaaggaaagaatgagcttttggccttaaaaaagaattgtcattaactttttcagctataatgtatagcaattctaatgtttcaatttatttctcacctcctaatagttgttgtatcactgaaaaaacatctttgcatgttgcaacgcatgagtattttttctagtagcaacaaaatcatgtacggttttggaacatagatttttttgaatagaacgaacgaccgtaacggatgttggctcaatccgagggaaattatgtggaagctttgcatcgattactaaaactagactttctcaatttagagacttaagagcagaagaaaagatggaaaaattcaaccatctcccaaaaagagatgtggcaatcttaaagagaaaattatctaccaaacaaagatatctcggcgggatcaaatatatgacccaattatgtatatacgtaagatttaagaacgaggtgttttaacgtaaggcagaaggcgcgaagagcccgggctgctgctgtaggatttgaaaagggagtcattgtatcgttgggtcggaggtttgctccagaaaaattcggaacaaaacgtctaccgcgttgaagcccacagccccatggagtccgattcaaccaggaggattacgccatgctaatgtgccggttcttattcgaagaaccttgccttttgtttagcttgagactcaatcattgtggctctagtatgaatctaaggttttaattgaattgattcataggatcgcaacaagataatttctaccagaaaactaaagattcaaagggttaggtttttctttttttttctagggtaataaattcaaagttataaaattcaaacaaagatactaatcataaaaaaaatcaaataaaacaaacagtcaaacattagacataaatagtgtaaaactgcagtccatctaggttagtaggattgaagcacttgtgcctatcagcatatccgatgaatatatttatctttttttaattgaacatatatattactcattattgtaaacacaatattatactttttctgtccccaaatatgttagcttttatacatggatctagatccgttgcaacttctctgaaaatattaatattactcgagtggtacttctttcccatgtttcaaatactcctgacaggacctaaataagttattggacattctcttaatggtttctattcagatgagcttattgacggtaccttttctagaaaaggtcaataaattccaaaatctatttcgccctcgagtagcaacaaaagttatgcctagattcgtgtacaaaaatgaacttgttttcggacaaagggagtatacctttgttttggcttccatggcattttacctgtggcttaagattagctaggtatatgatttcaaagtcacattagtagctttaattataaacagagtagaaaactttgaatctacaaaagacaatattggttgtagacgaggtcacccgcgaatgatacaggagctagctaggttaagatagagataataaacgatataatgccaccatggtgttaattaataggcttgatgatggcaatataataggaggcagaccacttagtgatggttgagctaaattgtggtggctagaattggaatgagatatatattttttttattacatttatgttattctttcttttcacacaagaagggccgctataaaagggagagttaaatgaccctagtgtgtgtgtaaatgtgtttttaagttgttggggattgatgtgtgttcccttgttgacatatacaccttctacatgcaatacttccatgtccttttatcttcactaggctaaaaaaagtaaagaacataggccaatcaaagctcttgacgcttggtcacattgccacccctcctctttccatcgccgagttgctcctcatattctctccaaaattaagtatacatcacaagttaggggcctccatttggtgttttcatacgatcgagggcaatgccagatcgtgagatttagctataatttatcaccctctttcttggctttcttgatcatcaccgtgttcccaaatattacagacataagttggtggtatcgattgcatcatgggatagaattgatgtctacaattttggctcgataattccatcctacgcaatggtaatagcttgtttccttattgttcttgtttctttgaatatcaaaacttattattgcatagcatctttcttttctaacatggtgttaccttgacttctgttgaacattccacatattgttagacaaaaaatatttgacaaataatgcatatgagtcgaatgcatttattacgctatgtataacaatttgtaccacaaaaattcatgtatgtgcattaacactttatgatgca

SEQ ID NO: 9202 - DNA, 2238 bp, Oryza sativa
actaacagtatgacctgcacatttcaggagagatgtacaatctgctaattttcaagcttcatgatgttttttcaccttagcattggcaacaatgtaaatgtactcatttctatctatagcattaagcattgtattttcaaacttaaatttgctttatgacacaaatccagttttctcttgtgggattaaaacccaggtaaaaaagacaatgaacaataaactttagaccaaacagtaaagaatgttatatgttgcatatagcatttacgaggagccaaaccggtgatgttgtatgagaggattgtgagttcctttcagttaactaaggcagtggacgtcatactatacatgaactttagaagagcatatttcaaagaaaagggggagcataataacgtattcaatgtaatgttctagttgtggtcaccataccataaaatttccaaaataacgtttgcagatgaaacatgtgcaccaaagagctaaatggattcatcattactcttctcacctcctgtgctcaacttgaagatgccagaagggaaagcccaagaaataacccttgtggatcttggggcctgcagacgacactcttctatcaccggagtaccgcagatgccatccttgatgaatgattggccacaatctaagttccttgcaatatttccacctatgactcgattcttacagagatttcaagatgccaatagagccctgcacattaactaggtctggctggatgggtataacatcaatggtgctcgctgcctctgtaagacgacctgatcgtcctaacatatccagaaagagtgtgtagtggctcctctgtgggagaacaccaaacaaattgcccatagagttgaagtatttgatgccaatgtcaactaagccactgcggttgcaagcgaaaagcattagtgagaaagtgatgccatcaggcttagctccaaccaatgtcatgtcttcgaaagccgacaacgcttcattataatactcgttggataccagtgcagacatcaaggcattccaggacacaacttttggctcgctgattgactggaaaacgctcctagcatcccccatacacttgcatttgctgtacatgtcaataagactgttagagaccgaaatgtcactactcaatcctagtttcaccgagcagctatgcaactgcttcccagtctctatggatgccaagcttgcagcagacgaaaggaagctagcgatgctgaaaccatcgatatcaacatcctcatggaacatccggacaaacatttcaagggtcctctgttgaaggcccatctgatttaaccctctagcaaggcttgtgtatgtgaacctgtcccttatgaaggccattgtggtcgccactgcccatgcatcatccatccttgcaaacctaacataaacatcaaccaaggagttcccaacagctgcatccaaagattcaaagctggtcttgagaatgtagccatggattttcctggcatgcaggaaagctagcgaggagctactgcctttgagaagagtggagacggtgaacgagttgggaagcaccccgctaagccgcatctgagaaaatgccaaaaacgcctcctcatctctgccatggcatgcaagtccagcgatcaaggcagtccaggacacgacattcggcttgtcgactgcatggaaagtgtgcaacaagtcgagtaaacggctggaggacttgctgtacaagtccacaagtgcattgcagactgaggtatcatgctctagtccaaacttgaacaagcgggcatgaatctgccgtccaggctgcagtgcccggaaggaggagcaagcagagatcagggcagcgtaggtgaaggcattgggcagcactgcagcacgggtcatggagcggaacatctgaagagcagactggaggtctccactccgcgcgtagccagtaatgatggcggtccagagcacgacgtcggtttgaggcgtggagtggagcacggtgtgggcatagcccatgttgccgcagttgcagtacatatggaggagcgcggtcttgagcaccaggttgagacccgctccccagcgcaggagctgagcatgaagctgagtgccttggtggtgcaggcggccggaggcgcaggcagagagtagctgggcgaaggtgtgttgagtgggcggcgcaccggcttggagcatgcagggatagagcgcgagagcttgcctccatgggccgcgcccgcgcggacgagagca

SEQ ID NO: 9203 - DNA, 3993 bp, Oryza sativa
cagatagatcaatatagagagatgtggcagtaactaaaagagcctgttcttttttaaaaatctgatttggcagcttatgcgatgagtgccacaatagcacccatagaaaggtttgtgatagaaaattccccaaaaaattccttgtttgcaagagcgagcttaaaaacagtaatatacatagtaggtgatataggtttgcggtgctctcttgccacagccagaaaataaaagtttacgatgcaatgtcaatagtcagctctgaaatgaaccaaaaaggaaagtataacttacctaagtaagaaaattactatagaggagaaaaatagatagataaaagactaaaaagaaattacttcgattgcattccatagtcgaacagttccatcagaagatgatgtagctaactgagttgaattcggtttgaatcttatatctgtaataaagttcgtatgttcttctattttagtatccatgttaagattgtccatattccagaggaagacctgcaacattgtagaattctttagaaccaaatatgccccagatatacaaacatctttacttctcttcccaagtcaaatagaagaaaaaggcactaagaaaattataacatcattctgcatgtaaaagtggggcaaaggatgtacggagaagacaatgatgaaatgtcattactggaaacacaaatttgattttgccagttataactgtgtgaaaacatcaaaattacttttattagttgaattgcagttatagaagaaatagcaatgatcttcaaggaatatatattcttacgatctggcacaacagagcaacttcttgcgagagaaattattaaaccccctcaaaatatataatagagtttaacaaagcaacctttttctcatggccagcactagccagcaatttcccatctgtggagaagtgacagcaaacaaccttattgttgcttgtacggttattaccaaactcactcaacgagagacctacacaaaaatgaacttattctaaatttttctctgttcacagatgtatgacacaaatcaagaacttgaaatatttaccctttaaggaatcctgctctgaggaccctttcttcaatgaagcaaatatgtcccgcccatctccatcatcatttgacaaaaatgaatcaacgttttcatcaaaatcaacaaaactatccagattatcctgtcaataacagaagttactcaagcacagccaactgattgccaaaaactgataacgttgatggaagagcacagcacataccatttgatttgaggatgaagcaagtccactggttccatctgcaccgcaaattaatgaactcttttgtacaatgttcatgttgctagccactggtaacccaccaccaggtgtgtgagtggaaggagttgagggtggggaagggccaacagtatttcctgtgcctgtactattagctgcgccggaagaggttggtttccgttttctagtattctggatatcaagaataattggaacattcaggtatcgcccatatagagttagggaaagttgatattatttgtaacaagctaattagttcattcaacctgttgcaattgctgctgctgctgctgtaattccataagacggtgacctgagggctgctgcatttgagccatcttcaactaataggattgcaaaatagtgtgtgcagttaatgaatacatgcatacagtactaaaaaacgacaaaaatagtataattacccatagaatatattgtgttgctagaacaaggtgaaaatgaacctccagaattgttctcaattagaaattatcacattatcagagaaagcgaatatctaagccattgattttgaggtgggtccataagttaaaacaaaaaaaaatactgaaattcggatttagattttttttttaaaatacaagataaagagctaatgtcaaatacaaagcagggaaaactgtaatattattacaaaataaaacaaaatggccagtttaatttccattcaaatatcaaagaaaatatcctgagtaattataacacagaacaaggaacagaaagtgaaccactaacgtagtgttcttaattgaaacaggtgaatgtattgatagaaccgtagaataatatgaaagcaaaacataggtcattatggatatgcaaacttatgtttggacatgtcattaactcttaaataaagtttctcagaccgattgcatactgaccttcatcatataatctgattcatctggtcgaacctttggtgaaccagatggagctggagaacccattctagcaaggtcattctgtgattgtgcttgagcaattaattgttgttgtggcgataaaagttgaaattggtttggagatgccatcaactgcttctgcacacctaaatttgaccggagttggtcaatacctgggaccttcagcaggcaactagtaggtaagcttttcttcaaggaaaccagagaagtatgcaagcatatggaaagggatatcagcaaactcactgtaagaggccagcctttcagtggtacactaccaacaccttgatttaatcctaagtagaagcaaaagaattataaggaaaaatgtgccttccatcatttactggaattgctaatcaaacgctgatggccacatgctaactagctacaaataaatcaagaaatccccaagtgtgaactttggggctaaagcttatcttccatctgagaatactaggcataaaaaaaaagcgcttgtacacaaaacagatttttatgggaatgtcatgcacctattccataaagtccaaggttaccatctgttttcctcatagagaaacagagagaatagttgtgtgattgcaattaactcaccagtggaaactaatccagattttggttgcatcattcctgatccatacaaagttgaagggtctgtaggcattgatctttgtgacatggcagcatcacctttcatgtccttgaaaatggttggacagagagtaagaagtgagaggcggtacataaaccaatggagtttgagaagatggaagggtattacaggttgctggtttcttgagtggatctgctgtagagctgacatgttgaccgaggcaccctgaaccagttgtctgaatggcgagagttttcatgaggaacggtaatctttgagatggttgctggggggaagaagaaaataaagttacccagtttggttagttgctggtttgaggagagcaatcctgttagcgtccaggagttggtgggaagcatcggaatcggtgggattggggttcctcattcggtcttgcatcattttagaagcgaggacagcagaaacatcagagttgagagcatccatagcagcattgagagggggatctcttcgctgctggtgggcattctgctgctgttgcagtagctggagcctcatctgctgttccctggatttgatctaaaacagaggcaagagcattagagattttgggacccggcatgattgtgatgatgattttctgttacgagtagtgcgagaatacgtctatcggaataggaggaggaggctgaggctgaggctgtggtggtttgtctcttgttcttgcatcgaagatgtcccagaagatggaccaccattcgaagaggaagcctccaggagcatcgatggctgcgttccgttggctcagcatcaatcaatcaatctatcaatcaagagaagaagaagaagaagaagtataggatgcgtgcgtacccacgggatcggtggcgaccttgccctcggtcatgaaggccttagcggtgttgtgcatgttgcgcttcaccaggtagtcgtagatgtacacatccagcctggaatcgcacgcatccatcagatcagttcagttcatccacacccccaaatcgatcgatgaatctaatcaattccgcatccgaaaggaggaagaagaagaagaagaagaaattcacaaaacacgcacatcttgtctgcctcccaattgctccgcgccatcta

SEQ ID NO: 9204 - DNA, 27590 bp, Oryza sativa
  unsure (1)..(27590): unsure at all n locations
tggaccccgggggaggcaaaatagacttttgcggaggaatttgatttggaaggatttggattcgggattgaactcgacgatagatcggggatttgagatctgagatggcacggacactagacaacagcaaagaaacaaatttcgcaattagggtttttaagagataattttcccgctaggcgccacgacggaacgggcgctacatcagtgaaattcaataatattcttgagaatattatttctataaattccataaaccatttctcgtattccagaaaattccgataaatctttttcttgtccagaaaatcaagttaagcttccaaaattcatatctcccgatccgtaactccgattgactccgttacacttcctgtaattctctaaaattgagatctatctaatggcactattaattagtctaaatagggtttttcttttggtcttttgtttaggttttcgattgtttgcgtatagtcgcggttaccggatttttgtcgatcgtgggatttctcgaagattcgtgaagcttcgtgaagactttgagcaaggcaagtcaccctttgaccaattgctcctataattggaaaatcattattattttgtttgcaacttgcattattagaatcacccgtttaacttgcttggcctcggtttgcatgccaaaccgacggacctacctagtagtcgcactaattcctgtaggctgtactaccctgattccttgtagctccacctttgtggtacctcggtatccgtgctctctgagcgcgtataccaaatatcccacatacaccgttgtttgtcgaaaacttgggaaatgggtttgagaagccttgaaaacccgacatgtggtgtcggcgtgtttgaaaataaaataaattgtgaaaactcgcgatgcaggggttgtgcctgtgtggcactgtcccgtattcgcatataaggactgattcctgtgggaacttcatccgagcatataacaagtgcgaccacacgggtgcaatgggacgcccctggctgagtaaatagcaaaccagggaagccttgatgccaagagacatgtggattcaacggggtggtgtcgggtagaaccctcgggcttcctggcatagtatggtctgggacctaacctgttgtcggtctgggacccctctcgttggcatatggcaaccctgtgttggctttcgaaatgccttgtcatgaaagccttaaggtctcccgacgtggctgatctcacgggctgggtgatccgggttagtaatgtcatgtgggtaaagtgtaccccctctgcagaggttaactaactgttcgaacagccgtgcccacggtcatgggcggatgtgaggtgtttcctatagcgtagatttgtttgcctgtgctttgtaaaaagttgttgtggtttgggaatcgttaccagaatcagtctatgtggcagaggatgacctgagtggtcaagaaacgaatctgtgtgattcgggatgtctgcgggcatcatagactaggcttcccgagtggaagcggattgttgtgctgctaggcagctggactctgggagtccgagaaaatgaaaaagctctgggagccgattaatcaagtgaaatggctctcggagccgagaagtaatgatctgacccgggaggtcggtacagtaccaattgagttgttgaaaagcatctcttaagtcgatttgagacgcaagtctcttttcgacccaaacttaaaaagaagtaaatcacttagtgatttcaaaatgatttcaaaattaaagatttgcaaaacaaccttgcctctcttccaagcttgcattaaacacctaaattcccgtgacttgctgagtacgaaagtactcacccttgctctatataaatatatatatatatatagttcctccgcctcgaagtgaagatgaagtgaagtgaagaatagggtttcgtcctggttcccagccttcgcctgtggtgttgggtgttagtccgttggttccgctgctgctgctgttgttggtgtttctcgtccacgtcgtcggttgcattctcgggctgttctgagttgcaacctaagttaaggtaaataagtcctctatttattttaaggattgcaatgattcatattcgtcaccgtgggtaccagcgctatgtcctgggactggtactgagatcgcggtttcgtaggaagcggttcgcgccgtttttcctacgacacgcttctattaggtgccgttctacggtggtgccagattggggtgtgacagagaggtgtaacatcccggcctagcgcttaataggattaatagaatactcatattaacaagttgcaacttcttttccagaagccgatctccaaagaactccagggttaagcgtgcttggcctggagcaatttgggatgggtgactgaccgggaaattcttttcccgggttcgcacgagtgaggacaaagtgtgtagaaaagacatgtgttggtctgtgagggcagtctatgacctatgaaagctgccagatgtaagtgggcccggcctgggagaggcgggtcgttacaaggtctgactcgtagtcgacaacagggtagccttcctcctcgaatccaatatggatacaatccgagtagtccttgtcgtttacatgtagaactctggttgtctttccttatctagaactctctcgaggtcagtttctgtataagacatggtatgtggtggatcgtggtggatcctgccgagatttagtcaactactattaggtatgtggtatccataaccctgacagtagcccccgacttcgatgcaaatgaacgagttcatattctcaaccgcagactttggaggaactgttatcgagctcacgtgatcgttctcggtgagtttagagataacattagatttcctttatcagcctcgtgcaggcaccgaaagggtttgtctaagtcaatctctaatgccgaccgagaaagtacagagcatacgactaagtctcccgtcttgctgtaatcgagaatttggattgaactcaagaaattttatctcggcgggtacaccatctcttcattccgtattccttgtcgagatccagcaaccgttctcgaacaatcgagaaggcgtagagtctgcgacagagctttgtcaacattggtcgtactcgccttagtcgatcttggtgtagcactatagagacatggagtcttcgtcaatgtcgcatagaattttcctgaaatcaatactcagaaaagaatatcaaatagaaatagcccctgagcgaacgctcaaagggtgacatgttataatatgtatggaaaactgtaaatgaattaaatttacagatcaatgttttgtatatgagtgtcttctctcttaccgactccgatcagtcagtttgtagagtcatacactctccctagcccccagccttgtcgtcagagaatcgttctcggaggataaggctcttggacccttgacctgccttggttgaacaagcactgatcctagcccccagccgtgaagttggaaagttaatttccgattacacggcttggttaatacgcacggcgagaactcttacatgaccaggtcttacatggtctttcgtctctacaggatctgacaaggccttatcggctctgggcgtccccagccgaagatcccttaggttcctcggaggccttgttaagacggcgtaaagggacaataggataggtttcaacgctaggtgtcatcgtggtaagggatctctgggtaaaacacttggcgatattatgtacctgctatcaactttgttgaagtagaggtagtaggagaaatcgctacaccgctggtcgaggaccagatagtagtcgtaactcgaccacttaaagtggaagtagtgggagaaacgctacatcgttggtcgaggaccaggcagtagtcgtaactcgaccacttgaagtggaagtagtgggagaaatgctacatcgctggtcaaggaccaggcagtagtcgtgactcgaccactccaagtgaggcgagagagatcactacgttttactggttcgagaaccaggagtaggagtctcttaatcacctataggggcgctaaagttggtttattacatgtgcacatcatgtggccagcatgactcacatacccaacttatagcatatcctgatgtctgctcgcaatcatgtcgggtgatcaagccgacgacgttcgcgaggaattatccattaacaaccttttctcgagtagtccagcgatggccggtgctatgagataggtcgtcggtcttcgttgataggttgggtgcgataactccgcatttgtcaagaatgttctcgataatggagtgtactcgaccacaacctactcgagtgctcaattgttcctgaaaattattttctagaaggcaagacatatagcagataatatcgagtatgtactcaaaaactgcgtggatcttctagcattatcaggatataacgatcagattaaatatcaggcattatgtaaaccgtaaacaagcatgatttatacagaagagaacggagcgagcccccagcgttagactgtagttgacctgacatcgaaagcactcgcacaatagatattgtataaaaaacatgctctaggtaaacataataaattattgatctgacaatgctatatgatctgaataggtacgataaattgcatataaaatattgcgtacctgtgtagatatatgacggatatatctacggaattaatagattaatttaaaaaaccaatctaccaattaccttactgcgtactcattcgatatcatgtgatctgacatctcttggtacgccgcggagcttgaggcttggtcgatctcgagagatcgagttgttgatgacgatgattccgatctcgtcgggggacatactccggttgggttagatctcctatagccgaagttgtcgagtagtatgttgtcggagaatccatcttcttaaacccatctcgtcgaaatcctagatcaccaaaatccccctacctggcacacactgtcgatgtttggtgtcgcaattctggtatttgtatagtatggggatcgtcgatactaggatatacgcgagactgaggtaaaagagacggagacagagatttttatacaggttcgggcccctgagttgtcaagtaataaccctatatcctgttggccgaagccggtattgctcttattcaccataatcacaccaatacaatatgtgggtagcctatctaactattgtcgacatgtcagtctgaaggtctgactcgtagtcgacaacaaggtagccttcctcctcgaatccgtgcccggcgagattagagagcgctttcgtctctcctgactgtatccggagacaccataggaaactagccgtggctatccctaaagtcgatatccggcggcttgtcttggcgtatgtaggcttgtatgttgtcccgtgtattatgttgggtgttgattgaggtcgttgattgtctgtgttgatcgccccatggtgggtgtccccctgtcctcctaggggggcttgtatttatacccataggagtccccttgtccaagtagaactagggaaaccaatatggatacaatccgagtagtccttgtcgtttccatgtagaactttggttgtctttccttatccggaactccctcgaggtcagtttccgtataagacatggtatgtggtggatcctgccgagatttagtcaactactattaggtatgtggtatccataaccctgacaacagtcattgacatgtcggtcccacggttttcctaattttaagtgccacgtcaacaccacgtaagcgccatgtcagcctaaactgccaaaaccgtcttaggaccttatttgcactggttttgaaagtagagggacgtgtcatatctggtattgcggttaagggatgaatttcagactcgatgacaaattgatggacctaaattatacattcctattatatcgtcgacttctgtctacaggattttattggacctaagccgacttatgcggggacaccaatgttttaaatagcgggctaaggcatttagcagtttgcttcttaaacagctatagctgcagctatagcaggctaaatggagctatagcggctaaattgtacatgagagcaaatagctagaatccttctcaaacatctatagcgggagatttaaaaccctgggggacacctaactcgcgcgtacaataaaataagcgcttagcattaatcacactggtagctttataatataaaataatataaaataagttgatttttttctaatttaggttgaaattttttaatgtgagctgaaaattttaattttgaaataggatatttcaaatttttagttgaaagttttaaattttaaatgtaaagtttttaaatcttgagttgaaagttttcaaattttggtttggatgttttaaatttgacttgaaagttttaaaattttgagttcaaagttttaaaattaagttgaaagttttcaaagtttgagttgaaagttttcaaatcttgagtgaaaagttttagtttttattagaaagtttactcaaaaatttgaaacttttcaaacttgattcattttaaaatttataagtatattcatttttttcaattcattttgaaattatttacttctaaagtattattcgtttaagttactgcttattatgtgcaaagatatatactgttaacttgcaaatatatgcttagcagaaagacggactctgaaataaatattgaaatcatcaatcagtagctctcaattaggcatccatgcatacatcttttaagcaagagaaaggacatgtatgtggtcaggcgggcggtcaagcttgaagactgacttacacgttgaccaaaaaagcacgcctaaccaactcaccccaattaccagtataatccttccctccctaaaaagaaaaaaaaaacaattctgttaattgatgtacctcgcgggagtactaattaattgagcctctgcctttcaaaagtgtagtgatccagtaaacaattctatccagccaaggcatgcatgcagatgagaaatgcatgaatgataccatctggtctcgctgtctggctgtttgatgagccctaattaacatcacatatactatttaatttaagcaactgatgatgatggaatgaataacccagcatatagtagtatgtagatatgtatagtggagtactctagtagaagatgcatatgatggaaaaagaacaagggatttttttttaaagacgagaacaaggaattgattcagctaatgtagacatatatgcatgcagcatctagctagccaagtcatccatcacatcatcagatcgatcagctaaccttaccttagtagctctctggttaattaattaggcacacgtggggaaatgaatctgtcgctaaaacggagtagtagtagtaagtgcacaaaccaatcggccaaaaaaacggggatcgatcgatatatactctacattatagactccttaagtccttattatatgatcgatttccccacctgaagccggataatcatgaaatagtccgcacaaattaatttcagtttctagaatctgaatatacacagatgcagaatgtgcatgcacctggaattaatcctgtacatacgagaaaacaaataatatgtcacattttgttctaaaacactgcgaggtggcattttaacggaaaggcaatatgcgtaatattttatccggtgtattgatctagtgagtggtattttatccaaatcacaagaatggagtgacatatcatttgttttctcatatatattattaggtgacggattcagaaaactttttaggcctgggcaaacttaataatagataactagcacacacgataatccatataatttaccattgatataacacatgtgatgtagtgaggtttaattgctttgctaattttcttgttaatgtggtttcattagtttgtacatgagtttgattagctaattttcaaaacaattacatagagtattgtgtactccctcgattttacactataaaatattttaggttttaaataaattcatatatggatcatgtatgtgcttcgtatatgtatctaattttatatggatgttagtgaatttagataagagataaaaagatcaaaacatcttatagtatggatcaacgtggaactaagggagtacctactactaaagatcttgcatagtattttgataagatcattgacagtaaactaaggcctcctttgaatcaaaggaaaaaaaaccataggaattttagagcattttatcatatggaaaataattctatagagttctttgaaacaaaggattgtttcctatcctttttttttgaaattcctatgaaattgattttactagagcaattttagaggaaaataagcatgattcctcttctcatgttttcctctccatatgtctaagattcttgtgtttttcatttgtgctaatcaaacaataggaatcctcgtatgttttgtttcggatctgctcagttgagtcaatctgtgtctcactgtcttgttagtgagtgggtgtgtgagacagagaaaaaaaatcatttactggttaataaataatgaattactccaattaattgtgcaagttgcatggggtttggggagggggaaggagcagagcagtatatataaaagggcaaagcctccgtccatttattcatactcgatctattattcggcggcggctgcctctgcttgcttgtgactgtcgtgtctgtgcgtgtgtgtgtacgtacatactccagtatatatatgcattgctgcatgtcgcttcatcctcaccgccgccacggcgacggcgacgtcgacggatcagcatcaggatcaggatcagcgcgcctcaccgccggcctcatcaacttcctcgaatcgcgtcgcgccggcgccatgagcaccaccaacagctcatcctctgtctctgtcccagccatggacgcccatggacaggaggaggaggaggagccgatgcaggtgcagcaacagcaggcgttccgcggggtgcgcaagcggccatggggcaagtttgcggcggagatccgcgactcgacgcgcaacggcgtgcgcgtgtggctgggcacgttcgacagcgcggaggaggcggcgctggcctacgaccaggcggcgttcgccatgcgcgggtcggcggcggtgctcaacttccccatggagcaggtgaggcgttccatggacatgtccctcctgcaggaaggggcgtcgccggtggtggcgctgaagcggcggcactccatgcgagcggcagcagcggggcggcggcgcaagagcgctgcacctgaccggcggatcaggaaggcggaggaggggtgatggagctggaggacctgggacctgactacctggaggagctgctagccgcctcccagcccatcgatatcacctgctgcacaagcccaagccaccactccatctgatctctactcgtatttatcacacgcgcagaggatgcacatcttctgcactacacttgtactagcagtggttaacatgtggatccggttccatgctctgattgttgcttatatttttcaaggaatataaacaaatccgatcctgagttaattagtgtaaatatatagattttgggtttcaggattaccatttttatttttggtggcaccatccagcttaacattgctccgattcacaaaaagaaaaagaaaacactcctactgtacatatacatatatgggcgagcaaattaaagcgggaaatgacgctgtgtttgaaatcgtctaatctgggcccttgttttggtttgctttggtccatggacagattgacggtgctgacgtcacgttgcatgaaagcgaaccgaacgcagatgttgacctggtcaagtccaaagtccaggaggcacgcacgtagtgattcacccacgtgcgtcaatttttttactcactcaaaagcacccagcaacctaaatagtgccctacaatataattatattccctctactatagcactactcctatgcaaaaaaagaagaagagagatattcatttgtaagattattttctactccagcaacttctcttttttagattatccattaccttaaaaaaacaacttttacagtaagtaagacaaatttgtaaaagataatagcctcaagattaaagacacgtggcaaatagatcatttcctccgttggtttgtttgcccaagtgcaatgaattgaaccagattgttgacgaatggggaggagtactggcgattaaaggacgatggatggatcagagttggcaactgccttttaattcatcacatgtggccttggtttgttgctcccaaaacaaaaccaaaagaaaaaaaaaagtcttgttgcctttgactcgaattaggagtattaacaattactagtagtaattgataacaatccttttgcttctgtaaccttctttccttcattctgcgtgcctgttatatatgctaatgctatcggtacaagtctagaagattgagaccgtaatactcttttatcttctctggcctctgggatgatgaatccggcagctcttccccaacttaactgtcatccagttcagtttctttaaagacgacctatctcactacacgtgcgggagttgttattatcacaaaaacataccgtcacggacaaattgtttcaaatctaaccaggcctttggaacatatatatgaatttcagaggattgtcggaagaattgcaataaatcctgcaaaagaatctataaaattcatatagtatttctttaaaacttattcctagcttattagtttgatgaatttcgtaagtatgtttgcattagaaattggtggtcaaattaagattatctaaaatgttgtgttttcttttggattgtgaactaatcgagtgagttgcatgctggctgctgtcttcatcaagacatgtataaaatcgatggaaaagccagaggtcgtggtgcaaaaccatcggcatggagtagttctcagtgtcacgtgaccaaaacaaaaaggatcatttcaatttcaataataataattataatactcctccttgattggtgattgcaacctgtccttgcttaccttggagacgaagagcatatccgttgagcttgcttggaattggatagcctaccatgcaatgcgtaccgctcctgcttccttgctgccgtaacttctaagaagcatccaattgaacacgtgcacgctagttgcacccttttttaaaacatttttaaaagaagaaaaaaaagtggactagtagtataaataatttctaggaaatacagtatatggtacacagcactagcattcagtttgacctgtacctagatcactagatggaggagctgtagtatcagattcatatgcgacaaggcatgatatgcagtgaaaagtggaaacgagaagtttgagcctcatcagttggcctaataagccaaggaaaaaccaaaatttgatttattttttaaacttgatttttttaagttgattttaaaatatttttaatgtattttattttagcgttaacttttaaatcgttacgaacaaatatataaaaaacttactaataaattaaatttttattcccttataaactgatgaggcttattagggaatatgggcaaccgatgaggcttagtcggttccatccattccttgccaacaaatatatactgtactatatacttgtgtgcagcgatatgtgtgcggtgcagtgtgtagcatgagcgttactaagtggtactcatccattgacaatcccaacatagtacattccatccgcgagcaatgctgcaatcgtggaatccacatccacacatgctgctttcttggagccgtcctattacgacttccctcacactgcaccagcactgccactacactcctatactagtagtagttctatgcatctactagacgacgacgactactactatcgaagtggagtagtatcaatgtatctcctccggaaaaaaaaaagaagagggttttgctgccatttctttgggctcttctcccctgatcccctccccctcccccggagaatcttctgatttagtactataattacgtgcattacagtaacaaaaagtgaatcccttgggcttggctttgccactagtatgctttactacagcagcggcagtagtactagtatgacaatcgcttcctggaagggacctcattgtcgcccgccacagcaaagcaatttcgtgccagggtcacagagagatgcatgcttgctggctgccaacatgaaacttcccctttgcatgcttgcttccttcacaaaaaatcacaatcacattgctttcgtcttgtgatagcacatgctactctcatctttcttcttttataaggggaacctccgaaaagggcaggaagttcctgtaatttcactaataagaagaaaatacttgattcagtttataagaaaaaccgatctcaaaaactttacaacagcacaattaattaaataaaaccggccaaaaccctgacattatcaaattgagctaaccacgcagacccagacccactgacaaagaccagcggtccaataagggaaaactcctaagatgaagccttcgagaaggacacaccgacagaatggcgagatcgcccgatccaaacggatataaggttttcacccagagagatccctttaggtggtggagaaggtaaaagatgcccaaggatgtcgttgctagcgtcggcaagccgcaaaggctttcgcctcagagtcccatccaaccaccgcgtccacgaagaaagccacttaatgccacttgcacaccgaaaaccaccacctgtacaacacggccactgaggcactggtgctcaccgatccgttgaaagcatccgtccgtagccccggtcgccttccaccaccacaccacaccatggagctccacagagagaagtgggctaaacgaagagcggccatagctcggcagagcttgccaagacgacctacgtcaccaccttgcatgtcccacgcggagctccacgtcaagccgcgtagctagattgtcggatccgccggacgaccaccagttggacagtctagcctgctagaaaacctggacctggatctagatcttgagaaaaaacggaaggggaaacagagagggaaggaggaaggggaaggaaagacagatgaaggatgagaggcgccgccgccgcaggtggcgagccgagaaaaatagggtcaggagaaaaatgagaaaaggaagaagggaaggaggaaagggaaaggataagggacgaagggagaaggaggcggggggtgggggggagcctactactcggcgttggtcacctcccgtgagtcgtcctctattcctcttgtctttcttcaattgttattattgtcataaatcaggagaacataggattatgtagggattattatgtaccagcccggccgggcagatggaaccgtctgtcgaattcagtaaaacaaagttccaggaagcagatataattcatcatggttaatactttgattggttgcaataaactggatggagttacatgctaataatttaaaaccgcaagcaatactagtacttgtttgcctcggctttggcggccttccaagggcaaacacattcaatttggtcctgcaaggccctcatgctctccgcgattgcaatgcaagtgcaatttcagaaatatactactacttacaagcaatactactcaggaatgactcaccagatatttactcaggccatcttttcggagctgattgctctcctccctcactaacattcattcgcttcaatcccctcagtgccactgcaacaagctaatgaggcacacattagattgcgcaacaagtgaacacagaaactattatgcatcaatcaaaaatacaattctatgtgacttcaccagaaaatataatgactgattgttcaaggaactctgggaaacagttccacataaatgtttcttactccaaaccatttcaggttaatttcttccaaaaaggaattggtctacagcattcaacctattgtgcctagtggttagagattatcctcccagtgacaattaacagcacgtcaaggatgtgctactggaaaaaaaagcatgacactgtacatgatctggatgcatcatcgcattgtttcgccatgccacaagaattgtagtactaatccataaagggattgaaatagtgagcactcaccctactgggaggttcattttgtagtctgggacttctccgaggctctgcattctggttttgcaaataggactgaccactttggagaagagacgatggactctggttttgcaaaagcgataccctcctgttcgagacatcagccgacagattctggtgcggcaaataggacagattgtgattttgcaaattgggtagattgttctggacaaaggatggcatggtctggttcttcaaatagggtggattggtcagggcaagagatggtagattctggttttgcaaaacgggtgatctgtcgtggacaattgatggccctgaagtgttatctgcatggttttccctagaaaatctttgtcgagtttcttcggttggagtactagtaatagcagtattgttgcgtgaatactgagtggcggcagctcgagctccggctatggcggcagtgacactgggagatttgtctagtgcggcggaccttgaggagtgaagttgaagagatccagggttgagagagaggggattggtggggtcagggagtgggaaattgacaggcagtggaccttgaacaggtgaaagacccctgactgctccctcatagatctgtgacatgacagaaagaagatgaacagattcattagaaggacaagtgagaaaattaagcagcagctgcattgtttatgcactgtgatctctcttatgttatttagaagagaagagaggacacacccgtctctctaaattgtaaacaccctggtaaccacgcatgtcgaatggaaccaccagtttctgcattgcattgcataattcgcattgcagcaaaaaaaaagaataatacaattaagcaaatttagaatgaaaagaagtgcagcgtgaaatactagtgagttgaggtgacctgtgggttttcacaaagccagcagaagtcggtcaatgcttcgagcctgacctgcaggtagtgaagaagatgattggaattgggaaggtgcaggtagtagtaatagagtagggttgagtagatacagattggggcacatgttcccaggaagcaagctcttgagaggtgacacagcctaccacctcgacgcatcctattgagtagtagtaggagtatgagaattgaactcctagcatggtagttgcagttagtagtagagagtagcgtcgtaccgaggaggcgggagacagggtagtggtgcgggaaggtgatgttggtgattccgtcgagggcgtaaatctccctgtagaactcctccatggccttgatggtgtccgcctcggggaccttggaagccgcgtggatccaaagccgccctgctttcaattcaattcatcaatcttaatcttattaatcttggattggaggaggaaggaaggaaagaaagggatagatagctaccggtgaggggcgatggccatgagcggccctcgacgcgcttgattccgtggacgagcagcgacgcccacggctggtgcatcgtcaggcaagggttccggagccttcccccgccgccgccgcgcatgccgccgccgccgtgcttccaatccaatcggaatcggaatcggaatcgggattgccgtcgaatcgctcctactcctacctactctttttttttttttgaactttactcctacctactcttggtcgaggggaagaaggatcatctcatctgtctgctcttgtcttgggccaactgtgtactgctatttgttagttgggccaaattaaggctttgtttgggcccaacatatattatatagactgtgagcgtctgattttttttgatagatagtactcctagatggtttcttcactcttaattaacaactggaactactcgtttcttatacaaagtgagtctaacttaactggctagattacttgtggtggaactatcccaccaagtttaaattctagatttaatacgagtgctcacgattacgtctaattatttatggcagacgacgtgtttgtagtgacttcgccaatcttaagtcaatcactggattatcattcaatggataagaaagctgctatattttttaaaaaaaataaaagaagaagaaagaaaatcgcgtgcgcctgaaatctacacattcgatgcatagataacatcattggatagccatagattaattaagatggtctccgcaaaacaaattaattaatactcatacatatataccggcaaaaaaggaaagaaagcagagatggaatcagttcacattgggagtaggtactgaaagtcgtagtcgtatggaatgacgtcgacgaggtgatggatgttgagacggtgtccggaccacctgaggcaatcaaccatggatttcctgagagaccaggacgtgggcagctggtcgcaaatccagcgaacaagcgagtccaggtcctttgcgaagtcgtgcatgttggagtgtatgaggcttgggatcatcagcctcctcctcgtcgatgtcaccaccagcgatgcctgcagatactccagcttcgccttctccagatccatcatcacacgatcagccttgtatattcgtagctgcaatgcaatgcaaatccattagttacagttgcattcaacagctagctagcagcttaatggagtagtaattaattaccgcgggagatgatctgttgccacagcagagtgcgaacagaatgttgggttctgagctgttgagcccgtaacgactcctcacctgctgttcttccacatccacctcgcatttccagaattcctgcattctcgaatggatataatcgttgccagagccagagccacgagaagaatgaatgaatgaaatgcctcacttctttgacactggatggctgtctgaggatgaaattctctatcaccaaggcgttcaacttttgccctgatacattcagcgtggccttgttcttcagtgcaagtagcttttcagggtttgagggtagtccattgtgcaaaatcccctgaaatacaaagttgatttaattgtcatcatcagctagacagtccgtttgtgcagagagaccgattcgattcaattattaataaatactccacgtacgtacgtgcatgatgcaggtgttgtatatgttgagccagaaggcaagcttttggtggtgagtgagaaacctcaaatccacatgctgcagtgcctccagcatccccctgcatatgaaatgctcaacttttaattactaattagtggatctgctgctaattagcaggtgcattatcaggtagtagcaaataaagtaggcaagcattagtgtaagtacctgagcttggtgagcaggggagaggtggagaatcctctgaggtcgaaagcggaggaagtgaagctgacgaggttcttgtaggggcctatatctctgacgatggaatccgggatggcgaagatgccgtagtgatcctgctgccccgaccggcaatcctgctgctgctgctgtttgttcattaccaggctggtgtcgattctgaagcttccacctcctcctcctccctgatgctgcctggtcagtgaaggcgatgaggaagaggacctactactagcgttgttgttgttgttgtcctgctgctgcagctgcaggtcggcgaccctcgaggacctgagcagtcggatgaagatgcagatgaggcacttgacgatcctctccgacagcttgttgggctgctgcaccatcttcttctttttgttactactactactagtatcatcgagtgaattaagctttggactgggagtgggaggtttattgctgacgatggtcatgagaggatgatgatggcggcttgtgtcgaggccgttgatggcctgactgatgaagaacatggacttgatgttggcatgatctcctgctgcagatcctccactattaacattggcattgacagtgtcgtcgtgggtgaggttgattgcattctgggtagttgtggtggccgccgccttcttcatgcttcggatctgggtctccaggcgggcaatctcctcctccaccagcaccagctctgctagaagctccttggcctgcatccattttcattttcattctcattcctagctactccactaactcatcgactctgcttctggcttctaccttgtgcgggatgaatgcagggatgttgtggaggacggatggagacgacaatgatgatgatgatttggtggtgtttgagtgctgaagggcgcggtttaggatatcatgcaccgcctcctcgttccgcagctgcttcttcagctcactcacctgcttatattttataatgtacactgcttattgcgtctgctgctgatccaacaaataaatttaagctaattaattaattacctcttgctcaagtctctgccgcagccgccgcgcgggcactgttcttctgctctgtaattgaaattaaacagctagctagccttgtcagatactacaatatagtacgtattttttttcagagaatggattaccggacactgtcatcgatatgatcgaatttaattagctacaatggcaattaaggtggatgggacgggatcaatcatcagacctgaggatgagggtgaggatgggcgtcatcgtgagacgacggtggtggtgcagcgccggtgccggagagcagctggtgaagatggggcggaggagtagtgcttcccgcggtcacgtactcctccatatactatactagtgcactgtacgatgggatgaactagctagcgatggttcattatattagaaccgtctggcgggagcaagctagctaggtgaagaagaagaagaatgatcgatgatggatggatcgaggaggaagaaaggtagagctagagcttagagagagcagatggttgggagggcgctgtcgtacaaggattggcaggtgaggtgcggccgaagtacgcaaactgctgctgctatgtttgggcgatccgatccagggaggggaggggattgatcaccgatcgatcgatcacctatcctatatatatgcaagcaaccaaacacttctagttctagcttatgtggtagtcgatcttgtgctagtgccatgggttggtggcgtcatcgagcgcgcgcgttacatcccatctacatttcccattccaattttattttaaatactactactacgactactttttttcccttccacacaacacatgcctatcttgccttgtaatccacacgcacaactgcatccaccatgtcatgtaatctctctgtttttcctctcctctccttgttgagtgcaacctactcaacaccgctaccttacctggcgccttcttttctctgcttattttctgtatcttagtgcagttgggtggaatcaacattttcatcttcactaaccacctgctatccgtacgtaccacgcatgggttttaccattttaacttttttttaatcatttatagctagcgtccgttatattcttactgttttcgacattcatctcaatatatacaagatggggtcctgcacatatatctcttctctgccatcttcaaagccaagtcatcctccttccatatgtattcccaccgtgtgtaacccatgcgctcgcggatcatacgtaattaaataactactgcatctaatgttttattctcaatcaccctcctactatatcctaatttatatgggcatggtccgttagaacgtatgagtatgttactggttacaacaaaatgacaatatatttcaagaggcctggatggctgcaaaatttcctaattcttccctctacaacgggtaggaaaggattattttcccttgttatcctataatttattgagtgaatggcaatttgggtcacattttattacacaagtttactttggaccacccttaaaccaatattttcactttggacccgagtaactttgttgttttctcggtttagaccaccccaaacaatttattcatcaccccaacctcaattaaattagttttgatacaccggtgaactttcccgtatatatcttcataaaaatggacggtagatatgaaccgtaaagagagttgggtggtccaaactgaaaatggtaaagttagtccaaagttaaacgattactttaaaggtggtccaaagtgaaactttacgaacaaaaggtggcctaaactataatttactctgatttattcatgcaagccaaatggcatatataaaaattaatccttataaattcaaattatttgttttctctgtgaacctaacaagccgatttgaacctaacaaattcaaattcctatctccgcccctctaccaccggcccagccccctcccccccccccaaaccgccgacccctcccggtagtcaagaagatcctcgtccgacctcggcaacaagagcgacttcctcctccgctctaaccccgcccacaagatccccgtcctcctccacgctagtcgagtccctgatcatgctccaataccatgatgacgccttccccgatacccccacctcctccctccgtcgaactcctcctcctccggcgaagccgacaccgcgtacgcgcgcaccaaggcaagattctaagcagactacgtcgacaagaagctctaccgctgcgggatcaagctatggaggctcaagggggagctgcaagccgcggtgcgatgcaagatggtggagatcctctggacgatggaggcgaagcgggagttcttcttttgtagcggcgggcttggcttcaccaatgttgcgctcgtgctattcacgacatggttctacagctacgagtggtgcggtgggttcagcatcaatgaggtagcgccaaagctggcgacgtgggcacgacagtgcatatagatcgactccatcgccaagcacctcccctcgccggagaaggtgcatgacttcatcagcgtcctccgaaataagtacgacgttaagtagatgggatctcaacatcgatcggtctccgtcgagtgattcatcgtgagatcgatcgatgcaaagttgcagggattgattggctgtttcgtttgctatgtcattggctttcccgcgctccctgccttgtcgctctctaggcacttactggtggagagaggagatagagatagagaaaaagagggtgaagtgaaggaagtgggtcctactattttttattttcttgtttgattgacataatgggccctacatattttttttaaaaaaatttagttttcaattttgttatttttttaatcaaactgcacgtcaatgtcatgtgggacgaagtcctagtcgaactagtcacgtaggagccagaaccggagacaatacaaccgaaggatttcatttgcactagttttgtaagttggtgttgtatatttttcggttcaagatgaaaattggactgagtgacaacttgaggagctaaagtgaacttattcttataaaaggccgtgggtttacccgcaaaaaaggggggccatggatcgttgggccgaaacaacacacaggtcatccggccgctctcttctttgggctggtggaattaattatagtataataaggaaaagcagaaagaaaagcgtggcacggcacggcgacggcgagcgatacaagaagaaagaaaaagtctcacctcggaacggaacagcagcatgtgggcccacaccacacgtctttcgtcgcaatgccacgccatcatcgatccctttccttcatcaggagttaatcccctttctctccctcccggccgccgccccgccccgcccatcttgtcagatccttcttcatagttacgaccaatcctatccaatccaattgttttgagaaccaagggaattaaggagaagaatcgaggaagaagaagaggccatggttgtgtacgagcaggatccggatgttctccgatggagccttcaccttcttcttccacccgccgctgccctacactaccaacaacgcaccagcagcgtcgactgcgatgagatgatcgcccacgccctccaggaggagctttcctacgcccaatcccaatccctatcctcctccatcctccatctccccccctctggtattccctcttccctttcctccgctcttgtacactacagtattaatctttcttgttttttctacagctcctccactaaaggaagacgaacaagatgatgcgccaccaccaccacccccctttagttcttgttcaacccctgcagattatactaatactaataatcataatgcccatgactgcttaatcgagtttgtcgatgatttctctgctctagatggccaagttggcaaaagattacacgacatgattcccattcctgtaactaactctctactgcttattccccaccttctcttcacccattcatcatttaaatattcttgtcaaaatattaatccattaatgattaccttgcttcttcctcttcttcttcttgatgctacttgttggttaccctttccttccttctcttattgtagcatgttccaaaaactaacggggacattccttctgttgatgaagccttttcagatcaccaaagactccttcacaggtaataaattgccctcaactgtatttctaactctaccaatacaactttaacctcatgccaacttttctatgttcatgtcttagtaatgcgcgagtctcccataggtgtttcacttaatgttggttctggaaactgaccccatgcatggcgccatgtgatttcttatttaggttggagctgtatgatcttgctgagctcaaggttgaaggggatggcaattgtcaggtattacttcaaatatgtactctttttctctattttatgctctacttatctcttttagcatgtatcttatacacagttccgagcattgtccgatcaattttaccgcaccactgaacaccacagatttgttcggcaacaaatagtgaaacaggttattcttggtgaagtcatcatgttttcttgttacaactctacttcctcatctcatttttccctttttcaaccgttccacagcttgagtcttatccggaaatttatgcaggatatgtccctatggattatagggaatatctaaaaaagatgataaagtaagtatttctcgtttttattaacaagtaaatctttgctttatagtgtaacattaggcattttcactttgtggccacaaaatcgaccaggaacggggagtggggtgaccacgttacattgcaggctgctgcagactcggtaaagatgatgtttccacacttcctgacttattaaataattattcttctgtttatcggaattatgctgtatacagaataagagttatttgtattggacagcatggtctgggattcattaagtgatgaataatcgaaagaaatcatatatatctgaataatttaaatctcaacaaaaaaagaatggtattttctctagtttttattttggtaaccagcataccttaacaggtacgtagtatattgcaatctcatgcacatcattaatatagtataggtattgctccccctggacttggtcgtgttgcttttgtgctacttgatttttcttctctttgcccaacactcaaacttcatgattctcataggtggtattgtaatgtcctcccttatcataataccaggcctatacatctgttgtgttctcgtttgagattgagtagcattttgtgaatgaccaagtcatggatttcctagaaccagggataccgtgcatctgctccttgctatcaatgtgaaactcaagtatctgcattgttttttgcagtatggtgtaaagattttcatcctgacatcattcagagatacttgctacattgaaatccttcctgttgttcagaaatcagaaagaggtaacctttcttttcaaattatgttgctactgaattgtattactgaaattagcaactacttatattatccagtcaaacatagatgcagatcttcatcagttgatatgacccgccttatcattaagaatctctgcatgtaacttcattgttcttagttagtttgcatagtggattgtactttttcaatagatgtgtatctaatgtgtttctgttcattttttccttaaaaaacccagttatatgcttgagtttttgggctgaggtgcactacaactcgatatatccagaaggaggtacagtttgtcatttagataccgtgttcatctaggagtgtctctttggcggattgatgcggtagctcaccagtgcatgtttgtggtgcagagttaccagttatggagaacaaaaggaaaaggtggtggcatttttagatcagcaactggtgtacactccattgggctgggtacactccatttgatttgatttgatgttggttagatcagtggccattttgttggggctatatgtcagtgtaggaatgttgatttgtgagtgtacataacacatttagtcaggaggaagaatagctgtgacaatagatgaatgtatcatgtattggatattattgatgttatatagggtcacttagagttgggtttagaatagagtagctgggtgtggagctatctaaacctcttctctgtctctaatttattttgcaacatgtttggttgaaatctaactctacgagaggtgaagctaaagctttaccaaacaaacccatacgagaggtgaagctaaagctaaacccacaggagtatgttaagaagaatcgattcttttcttctgacgtaatgcagtttgcatattataccactcgctttaatcatagatacacgatggtcatacatatattatgattaggacagtcaaaccttcaaaattttaaacataaacaacttctgaaatacttagtttaaaaacaaaagagcggtactaatagatatgatactatgatagtacttttcaagacatatgcattgatatttttttagaggaagagacaaaaaaaagaaaactagcatttaaaaactttttatggttgatatctcacaggtttgacacaatctcttttaagctttaaatatttataactggaaagagtgtatttttgccaagagatacgaactagacactcttttatgttgatagcgctagacgtctaatgtgcacgtccaaattaaaaaaagaagcctgtctccacaaacttaatttaatttaattccagagaagattagaggccacaaatgatatatggtgctaccttcaacttaaaatatactagcaagttttttttttcaaatatatactacgtagttagatgttgccatattttaagacggatggaatagtggtgtgtagtttcaaaattgaaatcgagatcagagcgagtatatgcaacattttgtttttatttgactctgaatatgaaagtatgcatatgtaaaaggaagagtaaatttcataaaactacatactatattaccaaattattgtaaatctacaggtgtaaggtggcgtatcataagattacatatttaacattttatttataaacaaatatagttttaacactaattctctagcaccaatgttatgtttgagttataaacatgtaatagttgtgattaaattgcagctgaacttgtagttttgtgacaactttgcgattttcatcattaagtctgcagtgctataataaattaggttaggtattaacttcctatagctatataatacatcacgttgaatctgtagttttatgatagtttggtgcaagtaaatctgtttattcttaggttaaaatctctcctataaatgcttcgtccatctcgaataaacaaaacaaattcgaaatgtgacacattgaagtactacagtgaatctcgacatgtgttttagggttgtttattttaagacggcgaaagaatttttaaaaaaaaaattttaaaaaaaaaaggggaaaaaggggaaaaaattttttaaattttttaaaaagggaaaattnttttttgggtnttccgttncaatatgcactagggttgtaaacatatattatggattcgactcgatcatcgtatagtttttgtaaaaaatattccgtaaagaaaaggaaaaggttttaaatagaagcgtgtggtaggtgatggtgaggaagaagaggagaggagacacgcttgaaacggcggaggccggcccggaatgttctggaaaaccaccttttctttctcgcaggagtagtatttttgagggtttggtttcaaccaaaaaaagtccaaatctgaaaacaagagagagatcacagcagccgccgccatcgccatctctcggacggaaaccctagacgagcgaccatggccaccatgccaagcacttgcgcctcctcctcctccctcttcctcctcctccgcgtacgtacaccctttccttcccttcctctacctaaacccctactaaaccatggattggattcattgattttgctgctgtttccagagggacaggaggagcagcaggagtgccagcctccccggacccgcccgccgtttgggggttgtgcgcgcctccgccaaggagatcgccttcgaccagggatcgcgatcctccctccaggccggcgtcgagaagctcgccgccgccgtcgccgtcaccctcggtcccagaggttcttacttccttaccctttcctcaaatactagtcgctgtacaccatttgtcccttgatcttgttggtttctttctgtatgcaccttattaagccttttgtccttttttttcattctgctgcaggcagtgtctgactaattcttcttgtggtattgtaggaagaaatgtcgtcttggatgagtttgggagccccaaagtggtcaatgacggagttaccattgctcgagctattgagctcgctgatccaatggagaatgccggtgctgctttgattcgtgaggtaacaacaatcttgctctctctctctctctctgagctaaacattaacatacttaccttgtttcttctaatgcttaaaccgtatgcattctctgaatgtgtctactttctaacaacattcactcatttctgtcaaacaaaaggttgccagcaagacaaatgactcagcaggtgatgggactacaaccgcatctgtcctggctcgtgagatcataaaattgggcctgctgagtgttacttcaggggcaaacccagtatctatcaaaaagggcatagataagaccgtgcacagtttagttgaggaacttgagaagaagtcaaggcctgtgaagggcagtggtgatattaaaggtgagccgccacataggaggatttcggtcctttcttttgtataaaccacatagctagctagcgccctccatgatgaaggaatatctaatcttgagcatttctcctctgtctttccctgttttagctgttgctgccatatctgctggaaatgatgacttcgtcggtaccatgatcgctgaggctattgacaaggttggccctgatggtgttctttcgatcgagtcatca

SEQ ID NO: 9205 - DNA, 11346 bp, Oryza sativa
acataaatgatcattagattttgccccaactaaccactatggtcttgtccaagtttcacattaactccaagttgcatctttgacattgatttcaaacaaaagggtatacctatataagataattaaacaatcatgacgacacatatctactcataatctttgtatgataaagttaggtatttaaaaacataaaaaatggtcagataaaaaactttggccacatgcttcctttgataacaattgtttatgattcagaaatagtgttgaatttcagcagaactaatatgatacaagattgttttttaactgtatgtcaactaatatctgctcaagttagtttcaaaagatttaataagggttgtaggatggggtatttggaagttatcttgactcttttattcccaatggttttatatgatcctcaggtatttcgtgcttcaaacattactgttgacatggatcttgtgcgccaagttgaggccaagtatcctgcatttctttttaagcaacaacttacagcttttgtggaaggcttatatggaatgatccgtgataatgtgaagagagatatatcttcagtactcacacttattattcaggttaccccatctatcacgagtcatccgcaggttaaaaattatttcgtattttaaacattttttgtggtaccattatgggtctgagaataagtatacttctttggaatcttgatgcgcaagctagcattgcaagttgagaactagagtactaagatgattttaggtcgatcaaatttgtcttgttccccttagtagaacgcttgaaccctttgcacgcaaagtttgaagaaaatcataatgtcgttatatgatgtgcactattgtgcacttgtgctttgagtttttcttggttattgattaggttgtcatatagattttgaagcttcatgatagttgtataccctttttctcaatgagtgttaattatatatctaaacttaatgtcaagcagttatttatgttcctagtctaatgtcgattcttgtatgatattgaacacaccaagaagtgccaaagctggtttattaacagatcaaggtaacaattggcaagcaatagtcaatcatttgaatgacctcctgaaaaccttacaagaaaattgtgtaagtgttaatgtgcatatcggaattgcatttggttacgttgtatcttgatttttgatcactgtgctgaaatttcaggtcccatcaatttttgctcggaagatatttacgcaaatattctcattcatcaacgctcaactcttcaataggtgatttactgctgtctggatttttaattcccttttccaaatgttttctcattttcctggtactatgttctagccttcttgtacgccgagagtgttgttccttcagcaatggagaatatgtaaaacaagggctgcaagaactggaagcatggtgtacacaagccaagccagaggtaagcaaaaacatgttattttgctagtattctttttcaagatacacactttgtggtatgacattattctcatgtactttgtttaaatgccatcaactatataattcatacatgaaagatttgtgcatgtattgtttgacatattgtattaggggtgatcataattaccaaacatcgaacctaattgatctgaaccaataccgaacttaagtgaaaaccaagcaaaaaaaaacaatgaaataattcggtttttttttctaaaatttggttttcgaattacatcatcaccagttcactaatgtcttgcatgacctttacattttatctatttaagaaagcatcatatggattcaacactatctgttagtataaaaattattccatattacaatcatattgtgttgttagtatcttttcagtttttttccttgtgcagtcgtacctaactgagacactaacagtatgcaggatctgcgtgggatgaacttaagcatataagccaggctgttggtttcttggtatgtaactccaaacttaaacatgtggggcgttattaattactattatatatgtgaaaaaaataaaactgatgtaatgcatggctgattttgaatgatgtacacatgatctttcatagacaaaactaccttcttacatggggtttcttgttgtattttgtggtgcgctataggtcatcttcaaaaagttcaggatttcatacgacgaaataatcaatgatctgtgcacggtaagaccgcccctccctccaaactctcacatgaaaaaaagaaaagaaaggggatgtaggtgaagatgaaattaaacccattggcattattatatatgcaggcactgagtgttcaacaactttacaaaatatgcacgcagtactgggatgacaaatataatactgaaagtgtatcggaagaggtgagcagtagatgcaactaattaatataatgcatgccggttgagtacttgagttaccctttgcaaaacgattcaagatgaaggaataagacgtgcatgaaggtagtcgttggtgtgttgaaaatattttgacgagcatcgatgcttggttgattgtacataggtcctaaatgagatgaaaacattgatgaatggaaaggatgcttcggatggtaccttgaaatcattgatgaatgaaaaggatgcttcggatggtacctttttattaaatgaggagataaggtacgtactcaaatataacatatagctagagttttactagtactaccttcgttttctaatacaggatgtcattaactttttttaaaacgtttgattatttgtcttattcaaatttttttgcaaatataagaaaatttaagtcatggttaaagaacatttgacaataaatcaagtcacaataaaataaatgaaaattacatgttttttttcaataagacagaatagccaaacatatatttaaaaagtcaacagcgtcatatattaaataacggagggagttctattttgttgtgttttgtccgtgctgaaaatgaaaagtggatcgaaggaggttgaattaattagtttggagattattaacatgcagcatgccgttatcattggaggagataggcgattcaatggatgccaaggaatttcagaatgtggttccacctcaacaactccttgacaaccccgcgttccaattcttgaagagctgatatatactatattacggtccagctagcaatcgctgtaaattagtgtaggtttccaacatgttatttttagtatagcgatctctaggccggttgggttgggttggtggtgtgtaaggtgcacccacattctttataggcatcatatgcagctgacattgtttctttgtgtaagtaaggtatttaattactaggtactgtacacgtagggggatcatagaatagagagagagagagtcatatgtactactaaaactagctgacgagtaatttgtagtttgtacacacagacaaatagtcccgatggatgatatatgatgaatgcatcatgtgaatatatatatacgtacatacatatatactgtaattaattaaagtagtacgagtccgaaggtacggagcatatctgtaagaaattaagaaaaaaaattaatgtggtggagatgaaggaggagggatcctgaagtggtggagcgcggatcggccgtcgaggcctttggctctgtaatgcgagaggaactccggcatggtggtgctcctgtagagcggtggcggcggcgtggtggtgacgggggcgtacaccctggtgcaggcgtagtcgggacggaagaagcaggcgacggagaggcgaggctccgcggcggcggtggttgccaacacccggtgctccacgcttcggaagaggtcgttggacactagctggaggaggtcgccgatgttgaccaccagagcgccggccaccggagggacgtccacccaccgctggcgctgcctcatgagcacctgcaggcccttgctctcctgcagcagcactgtcaggaagctggggtcggagtggcgtgtggtgcccagcgtcaggtgcggctccgggcatggcgggtagtagtgcgctgccatggtagccagccccccaccgaggccgccgaggtactccggcgggagccccagcgcctccgacagcagctccaacagcgccccgcccagcctctgcaccgcctccacgtactcccccaccacgcccctgcacgccggtgggatctcctccgctgccggccccggccgtggcgtcagctccagcaacagcgtgtcacgccagttggcggccggcgactggaacaggtcgaaattggagttgaacttcaccctccgcccgctgtccctgctgtaccaggctttcttgccctccgccggctgctcgttgaaccgccgcaccgccgccagcatctcctccaggagctcgccggggatgccgtggttcaccacctggaagaaccccacacactgggcggccgccctcacctgaccaaccagatggcctcggtcaacgtccgcctgcagatcgatcaccgggataacatccgcatcctcctccgcatcgtccagtagcagcgggtggtggtggaagatggcggggatggttgtgacgccggcatcgacgaggcccttcacgccggcctttgtgtcgtcgaaggcctggaggtcgcgtagccggtcggagccggagctgctgcccatcgatcgatgacctgatctatccattccagagaggcagggacacactaatccaatccaatccaatcgattcgatgcgataccgattatacagtttactacttgtagttgtagaaaggaagggagggactgccggctatgccagaaatgggccgggtttcgtccaaatgttgtttcctattaggaataagtttaacttatgtccctcaattatcgccaagacttatactcgtccctaaaccgcaatatcagatatggcgtgtccctcaactcctaaaaccgtgcaaataaggtccaagaaggtttggagtgtgatttcgactaatgtggtacctacacggtattaacatggcacttaaagttagaaaaaaccatatatatgacccacatatcagctactgttcagttaaaaactagaaaaattatagtgagacccatgtctcctccccaagctcccagtctcctccgttcgtcagcaattgcatctccgacggcagcgaaggagtcttcctcccttacccacaatgcgagcttgtggtggtgatggattcctagccgcaacccccctccccctggctctctggcgttgccatgacgacggtgtagccgagaatgcttgacacccggtagcagttcgatcatgacaagacgtcggccgacatgatgtcatggctcaagatgttcttgccatagcatagcaggaggccgtactagtaccggaggaggatccagcgacttggaggcgggacccatgcaacaacggaggagacggggacagggagattgggttggaagaggagacctgggtctcgctgatttatttttttaattttaaccatacagttgtcgacgtttggtgtcgcaattcaggtatttgcatagtatggggatcgtcgatgctaggatatacgcgagactgaggtaaaagagacggagacagagatttttatataggttcgggcccctgagttgtcaagtaataaccctacatcctgttggccgaagccggtattgctcttattcaccataatcacaccagtacaatatgtgggtagcctatctaactgttgtcgacatgtcggtctgaaggtctgtaacgctccgctttttgtgaggcgttaaaaactaattcggcaaaatcctaatttcaaaaattccgttccttgtgtgcgaatctaagtcgtgccgtggatctcagtttaaatctatcgttgttccctctcgtcgccatcaaaatcctccacctctaaaatgtcaaccccaattcatcttccaaagtcaaacatcgaaattcaatcgcatccttcgaattcccgccaaatacctgtccccatttccgaaaatatcaaattcccatctcgaatcctttccttgattcctccctaaaccctcgactttgaatatcgaatttgaatccaaatccaaacttcaaatctcaataaaccagcctcctctgtgaaagtctaaatcgcctccctcaagttttgtgggccgattttgtccccctcggcccatctctctctcagccgtcccctccctcctccgcacgtgcgccgcacgcgcgtgtgctgagccgacgccgagctgagttctctctctctcgttctctcgatctctctccccgtttcactccctcccggcgacgatctcccgcccgcgagtttgaaatcggcgccgttgcttcacgcgcgcgcgcccgcgcggtcaccgccgtggtcagccgcctgcgccacgctgccgctcggccccgctgcctgccgcgagctctgcagcgcgtgcccaagccgctccacccacgtccgtccaaaactgagaagcagagccctctctctcccgcttctctccctcccgaaatcggcatggagcaaagccccctttccaccaccctatctccctttttccctcttcggttcgacctctctctctcccgcccctgttcgcttgcgcttggaggcagagacgctgacaccggtgcgccagttcgccgcccccaccttgactgcgccgagctgcccctcccccgctcgcgaatcaatttccaccgcccgatccaccgccttcgccgctctttgcatcctcgtcgtccgccgctcttgcgtcgcccgtgaccgccgccgagcgctcaaccgccaagtcggtttccacctccccaaaccgacctcgccttcgctataaaaacccgagcccctcccatcgaatccttctctcgtttcacttccatcaccgccgcgccattgttgttgctcgccccgctctcgccctcgccgtccgccaccgagcaccggaggagccagtgcgtgcgtggacgcgtgacgaggagctccaggctgcccattgccacctctccctcccttcttccccggccgtgcaccctcggtgccgcgccgccccgccgtcgcgtccacctcgccgcgactccatccgcgccgccaacgccgtttatctcgttggtgagctccccaccgaaccacttccccttgtcgcacgccgcgccatgcccgccgccgttcgccacagctcgccctcgcacctccttggctcgcgtggtagctcggctagcctctcgaatgcgcgtagacgccgtcccaggtctcgccgccgcctggcatggcctcgccgccattgtcgcccgctcccggagaccgccgtcgacgctggccctcctcggtgctcctccaccctatccggagccggaaacgggatccccgactcccagagatactcccaccaccttgaattgaatccttgtcgcccctccgccgtttccctcttttttctcaccgccagcgcgcgccgccgcaatccgccgctgtcggcctttctctcgccgattccttgcgccgcgaccctccccgtgtccccttgaaccttcccaggctgccgccccagtcgccggcctccccacccactcccgcgccatgtcgccccttcagccgccgcatagcgccgccgcgagtttgaatgcggtgaccatcgggtcccgcgtcactgcgtgcgcgtcgcaacaccataccggttcggctaagcccgagcccgcgcgcccttcgctcttctcgcgcgcggccacgtcggcgtgccggcgagattggccgccgccgccggccgtcgtcgcgcgacgtcttcccgatccgagccgtggaatgagttccccttctcctcctcctgccgccggtgcctgccgcccactccggttcaccgccgttcgtcggcgcctctcggccgccgtgagccgtccgatccgggcgagctcggcctccctctctcgcgcttgcgtggcagccacctcagccgtcggccccacttgacctggtcaagccggcgcccagtcagccgccccactcctcctccctctctctctctctctctccgcgcgcctcttgggctgcctccttgtgcccgcgccggcccaatggctcggccgagcctccttcaaccctttgggccgcaccaatgccacccgaaacaagtctaatatacatccctccttgattttcctttccaaaaaggatttaatacatcctttttcctttgttccataaatcaattccttattccaaaattccatgtcccgcttgtcagttgtcacgccccgaactagtcctgaccggaactagcccgtgacgctccaaattaacctattaatcgataccagtcccaggaaacagtgctggtatcacagggagacagaatatcacagcaacagaggtctctttattatagagtagagatacagtcatgttgggctgcggacagatcccgagctcacaactgcattacaaaagggaaacggaagccaggacttggaccaaacaacacaggcgcggcttgggaactaggccgaaaccctaaaactcatcgtagccagcttgctcctggaagaactcctcatcagcaggatccgcttcatcttctttagcaactgggggagattatttatatagagcaagggtgagtacgggggtactcagcaagccatgggaaataagtgtttaatgcatgcttcaaggaaaggctgttgtttttgcaattgattttatttgaactcctttctgaaaacaactaagtgagtgcttctcaaacgacacggatgagacagtgcgtctcgtccggtcggagtatgtgcaatgtatcagtctttagaattgaatcaaggttggcacccggccaacagcttttcaaacagccacccgggccaacaactttcaaatggccacccgggcctagctgatcccatcagctgcagatctttcaaacatcgaacccctttccacaacagcaatttcacaagcagtagtcaaacaaaactacgctaggaatcacctcacatccgcccatgaccgtgggcatggctgttcgaacagtttgttaacctctgcagagggggtacactttacccacacgacattactaacccggatcacccagcccgtggggatcagccacgtcgggagacctccaagctttcatgacaaggcattttcaaagccgacacaggtttaccatatgccgacgagaggggtcccagaccaacaacaggttaggtcccaaaccatactgtgccaggaagcccaggggtcctccccgacaccaccccggcggatccacatgtctctcggcatcaaggctcccctgataagctagttactcagctaggggtgtcccattccacccatgtggtcgtacttgtcttatgtttggatgaaattccaaggaaacggtccttaagtgcaagagcgggaaaccgtacacccggtacattccccggtccgcggttttggaaattcatttagttcgcaagcaccaacccaggtgtcgggttttccaagtcttttgtaaaaccaaagttttacccaagttgttaatcagattttaagttttgaaggcgtccgtcgatactcgcacagggtgcacgaatatcgagacgcaactagatggttacaaggggacatgatataacaattaacaaaggaaggatcaaatgcaacaaattaggtaggtccgccaatctgccttgcagacgggacaacagattaagtgcgatcctatcaatgcataatatttttcaagcaacataattaaatttcaaatataggctcaagatgttcaaaggtggcttgccttgctcgagatctggagcttgatcctcgaaatcctcgcactgcgggtctttgggctccgaaactacacgcgaaacgggacaactcaacaaacggcgaaaataaagccctattaatgacctctaagcgtgccattagatagatctcgagatttgaggaattttggaagttggacggagtcaaacggatttacggttgggaagatattgaatttctaagattattggatttttggtctaaaggaaaaggatttaattaaatcctttttggaaaagaaaagaaaagaaaagaaaagagggagggaatatagacttctcctcggtggctagggcgcggcccgagagaattggggcggtccggccgagctaaatgggccggccggcccaaggcgcgcgcgcgggagggaggagagagagccggtggaccgggctcaccgcgcgcggtcccgggtgggacccgcttgtcggtgactcggttcaccgtgcggagcgagcacgcggcgcacgcgcgcgggcggggctgcgacgcagtgcacgcgcgtggttcgcggaggaacggatgcggcgggcccacgcgcagcctcacggctcgcggtggaacgcgcgcacgggaggggctgaccggggtcggcccgacccgatctcggccgagttggcgccgacgtggcgcctacgtggctgccacgtgggctggcgagaggaagacgaaggcgccggccgcgaatggacggcgggcggcggcggtttctccggggcgccttgcgacgatgaggggcgacggggcgtacaccgggatgacgagggagaatgagagggagcgagccaacggcttggattcgccggagggagtccggcggcggcggatttcggtggcggcaaccggcggagtgcaaagggggaaacggcgacgaggtcacgaggagccaattcccggcggtgagagcatctacgcggctacgggaatccgttgctagcgtcggattgggcggagctacgccgagcgaggccggcgacgagcgggtgctacggagctcgggcagcgacggcggcgagcacacggcgagcgacggcaacggtcggggcggcgccggctagctacggggaggctactcatgctaccaccgaaaactaagggggagagatggagcgaggaggaagaacggagggaggcactaccgtgcgggcggggcgcagtgacgagaggccgacggcgcgggagtaatctctccggcctcgggccggggaagaggaaggagagggtgcgctcggagtccccttccgcgtccacgaatgaaccggctctcccggcgcttggcgatgaacggcggaggcgagacagagctcggaaggcggcggcaacaatggcgatgggaggagaagagagggagggcgcctgggctttaagggcggcaatgtcggtttggaaccgacttgggcggtcaaggcgcgagctggcgcttggcgctcgcgtccaatcggcgacagggcggagggaggatgacgccggcgggaggaaaagggaaaaggagggagagaaagggggctcgcccctttcttctttggg

SEQ ID NO: 9206 - DNA, 6016 bp, Oryza sativa
tttaaactacattacaggcttccaagagtcgtttcgttgtgggatctcatgtctgggtcgaggacccagatgaggcttggatggatggcctggtagaggagatcaatgaaaatgatctcgtagtaaactgcacttctggcaagaaggtcaccattaatgtgggaagtgcctatcctaaggatacagaatctccccgaggtggtgtggaggatatgacaaggctagcttatttgcatgagccaggagtactccaaaatctaaagtccagatatgcactcaatgaaatatatgtaagttgagctcccaacatatcatctttagctttattattattgtatccaatgaaaacactttcgcttatttttataacttcttccatgaacattgtttgtctcgacattgctttaaaaaaagaaaaagaaaaaaggacctatactaagctggtgtttgaatctcctgaagatgaagatgaagataaagattaagtgttttacgcaaaacgaggtggtaataacgtgtgattaattgagttttaattattacaaacttggaattggattaatctgatattttagaacaactttcatatagaaagttttcgcacaaaacacaccgtttagcagtttgaaaagcgtgccagtttacccaacttttgttgtagattcgaacagggccttgatacaaattctacactaccatattttggtgttagcaccactaaaataatcagctcaatcgaaactaacccatatcaaatattatcattgacttaataaaaaaatccaataagataaaaaaaaactttacttgagttatctatttattttgccctaatatataagtagctttgtttcgtattatgaagtggttatatatactttagaaaaaaactctttacccttgtgagtgctgggatgtccttatagaaaattgtttatgcatgttgtgtgctaatcatcttggatgtgctggtttggttagttctccttatggttccataattcttgatgttttggacagctgcatggtctccaaaacttctctttgattatgattttcaattataatatattttataaaaataagtaaatgtttcattgcactaaagtacttttagggactaatctatacatcgtgttctagtgtctccaaattaaatgttttaaaaaattattgatagttgaagtactaattgtttgacctcaatctttgtccaaaacatcaagaattatttgaccagatggagtagaagcagattagccaaattatgttggaattctcccccccccccatattttcattcctccatcacctgcctcccttccttggtggcactgttggccaccgcctctccatgggcagcccattattccttttcctcttgacactgtcgatgattggttcatcaatgtgctgcatggttgagcaattttttttctcaggatctgcattcccagctcccattcctctctcacaaatgcgactgcgccgacggggagcacgttgtgacggcagcgaactagaaatgcatgtgatggcttgcttttccaaactaccccaccctcatcgcccaagtgtcgtcatcatctgcgggcgggaggtctccagatcttcgagttcatggcggattcaaatcagaaatggtagataaggcaggacaaaaccaaccatgcatccatgcccccccccctgtcccatgcctccactgccatctctgcctcatccatcccgtacccacgtcgaggaccaatgctgccaatgctctgagtggaagaagaagaagctattttttaggtagggggctaatcttgtctaaactcacactgttaggcccaacaatgacgaattcggttttttttttttggagtgggggagggggggggtctgctacttggtgtttacctatgcttgctaccaatataattttctcaaatgatattcattttcttgtagcttccctaatgcatttaagctcttctttcagacttatactgggaatattttaatagctgtcaatccatttcaaaggcttcctcacctctacaacaatcacatgatgggaatttacaaaggagctgaatttggtgagctgggtccccatccatttgctatcgcagatcgttcgtataggtgggttttcctcctctctcacattatggtgccttattatatgtcacatatatatggatcatactcaagtgcccctcttgtttcctgtctagacttatgatcaataatcgtatcagccaagcaattttagtaagtggagagagtggagctggcaagacagaaagcactaaaatgcttatgcagtatcttgcatttatgggtggcaaagctcaggctgaagggaggtcagtgcagcaacaaattctggaggtacgtttcgtgccactccactttttttggtgtgggtggggaggtgggggtgctgacagtagaaacaccatacaaaagtcatcccttaattaatttcattttaacattcactctcattagtggttagacacttcacattagtaacatttatatgcctaccatcaaagatattctcctttcagggctaagaaacagtagtgtaccattcatatatgtttctaacatatctatttgggtgacacagtccaaccctgttcttgaggcatttggcaatgcaaaaacagtcaggaacaacaattcaaggtaaacacacaaaatacaacacaataatagtccttcacttttctaaggtggttattaatttatctttgaacctttccatatctctctctaacaatttggttttcacatgttcgtggttttgcagtcgttttggcaaatttgttgagattcaatttgatgacaatgggaagatttcaggagctgccataaggacttatcttctagaaaggtcacgtgtttgtcaaatatctgacccagaaagaaactatcactgcttttacatgctatgtgctgcaccttcagaggtaaaagcctcgtcaatacaaccttttattcctaaatttttgttgcacccacaattttggaactaccagattttatagttagatttttactgtgggtttgtaatgaaaacatgtcatgtgggtcctatttctcatggtaaatataaaaagaagcttgtgagcatctcaaaggtttgaaacgtatagtggctaactactacgaggtaaaatatgtacactatttcttccctgaataaaaatttcaccttcaaattttcatcttctaattctatcaagcttacaaaatggctaattttgattttaccttgcacaatttgatcattgttttgtttttagtccttttgacttataacttgtttacctatagctttgatatgtgaatgttgatcaggattgcaagaaatataaattgggagaagccaaaacatttcactatcttaatcaatctaattgtattgaacttgatgggttggatgactccaaagaatacacggataccagaagggctatgagtattgtgggtattagttctgatgaacaggtatgaccaaggttttaccagcaatcaatttagtacatcgggagtagaggggcaacattacattcaacatatatttccatgtcttaggatgcgatattcagagttgtagctgctattcttcatttgggaaatgtggagtttgcagaaggaagcgaagcagattcttctatgcctaaggatgagaaatcccaattccatcttaggacagcagctgaacttttcatgtatttatttcttcactgttttagtttagaggtttacccaaaatttcctacttccatcccttacttggacatggattggctacattttacaggtgtgatgaaaagggtctcgaggaatcattgtgtaagcgtgttatggcaacacgtggggagagtatcacaaaaaatttagatccacgagctgcagctcttagtagagatgcattatctaggattgtttattcacgtttgtttgattggtaagtttacaagcaatcattttgggaaatatttttctgctgccttgtataatacatggtacagacagtaataagttataattattgttaactattgtattttcactactacaggcttgtaaataaaatcaatagttcaattggtcaagatcccgattcaaagattttgattggtgtactggacatttatggttttgaaagtttcaagacaaacaggtgcttaactggtatgcttttgcatttaatctactatttatgtccaaaatacatttagaccttacatatagaggactcttggtagatgggctttaccatttgcatatgtacccaatatgaagtatgcctgagtatgggttgggtggaactaatcaaagtttatgtatcgaattttcaaatattgtgggtcggacacttgtacagctagtaacaaaatttctggggcctacaaatatgtgtttgcgcgcgcacgcacacaaataaaaacatgagtacaaagtgacctaagtattgattgcttaaatggttagatcactgtatacttggtacaagttggtgaagttgcgatgggagacaatgtgcactctacatgaagtgttgttgtagatattgtcatatttttcttttgaaaaaggcaaacagccaaacattcccttatgtcgaatgaaaaatgcttcaaggtgttccttctgttagtgaaacatcaccttgtttgttgacagtagaacataatgctaagtgctacggtctagataagaatgtaaacagttcactttgtagtgatacgtagtggttggaatcatgagggttgtttaacttgtagcaacctagatgatttgctaagcaaatatatgctagtaaagtagacacaagtagccatatgggactaatccctgcattaggccttcgtgagacaaactagactagggtatcgcagttgtcatcataatgaagcattgtcagaaacaagagggaaacaaatttgctacctgaataaaaaatagctctaatttggcatattttacttatgggcttagtgtagatgccctaactggttgaaggtgagttttagcaacttgtgaatgaataatcatctgcttatgtgtcaaatttgaaagaagatacctcttgtaagctgacatttttttaatattatgcagctttgagcaattctgtatcaatctaaccaatgagaagcttcaacaacattttaaccaggttataaactggaaatactccactgaaagttctacattttgtttgatttaggttattcaaccactttaactttgagttctctaatcaacacatctttcattaacagcatgtgtttaagatggaacaagaagaatatacaaaagaagaaattgattggagttacatccaatttgtagataaccaagaaattcttgatctcattgagaaggtaaataaatttagagtcttatttaataccatttttatgatcaattttggtgcctatcatcaaaattgtggtaaccattaagcaagacattacagttgtaatctaatgaaagcattgagtactttgaatttattatatctctttcactataactaggaagatgacaagttacatgtcgttaatgatggttagtaattaaacttttatagcagcttgctttgtggattctaataattatgttctataacttcttgcatgccatatttgcatttcacttaatagcgtaccttcgacccacgaacctacttatgtgtcaaataagtggtaacccgctagtttccacatcgtggctcagcttgcgcacctagagatgcaagtggatagacccataaattcatttatatgtcaaattagtagataacccgcaagtcaatccgcgggttacgtactaattttgcctataagcgggtacgctggttggcccgcctgtatccctatttctattgctttttattttattttctcaagcaatacatttttatagcctacttgattttggttcatgcacacttataggtcttgtatgttgtttagatattgaaaaaattgcaattgttgatcca

SEQ ID NO: 9207 - DNA, 8919 bp, Oryza sativa
gtgcacgtttctgtgcatctgttagccgggtttttgacgatggcaatctcctggccgaagcatccttctttttatccaaacattcctgtaatctaagcttcttatctttctctagcttctttacttcaccctcaacccccagtgatacatcatccgcatttgcatcttcaaccatgatggcaggttgaatctgcatctggctatcatagtccattgctggatcatatccatatgtgacatcttcatattcacgctctggcatcaactcatcgggctcatagaaaagttggtctccagcctttgcatctgttgtcttcttaacagttccaggaagctcaacatctatatcaatggcggtacagctttctggtccaagattatcctgtgagttagacctaacaggtatcataaaggactcatcagccacactatgcatgttcttttccatcagggttggactcttgtactgtccctctgcaagaggatccaaataactcccactgtccattggcttttcctgaccataaacgatgaagtcttcacttgctcctctcctgtatcctccacctccagcttctatctccttaatatcgccatccacaaaactcctaccttcagccgagatcacaagttcgtcaccagacagcattttcctggacctaatcctcccatgggctgaattgaaaccaattgtcttcccttcattgaaatcggtagaatctcgctccactaaaagaagaggatcatcagtggttctgctttctttccttcttgctggcggtggtcctctctcagtagcaaataggtctgcgtcattatcttttgtcttctcttcagttcttagcaagaaactctggaagacattccagtttccttggtctccatcttgcctgtgagctacttcatccctgctatactcatctccaggctcaagaatgatttttctgctctcctttttctttgaactagatctcttattctttcgcttgctgtattcagtgtgtgaatcatcactgtcctcagatgctacatcagaactcgtttgtgactcgctctctgatgagccatgcttttttgacgtcacattgatgttccttatgacaactacactgggtttcttcttgcctgatcgcttgccctttttatgcaacttgtggccatgagagctctctatctctgaaccactctggccactttcatcatccaatgtttctgagtccttgctatctgacgagtgcttccttgatactctcctctctgagtggtggtacctaggatcatccattggggggtagggtggagggtagtatgggttcaccccagggtagtaaggcatgccttgcatgggatatggtggatgaattgcccatggtggatatgctgattgatatggaccatggaggtattcgctgggagctcctgagtgctgagctgtcctctgatctgtcaagcacccaagtgatttctcagatacaagaaccttatctttgcaaaaatggttatgtagaaaccatttgtgctgtacaggttgacttaaaagcatatatgaattcgacatgtttgcacaatgataagtgaaagtaagcagaaaatatttgcaccacaattctgacttctgagtaacattggttagtgaaatcaataatcatgcacataacaatagaacatcaggaaactgttttatcaaccaggcagtaaatacaagataagagtgatttttagagctttctgaaagaaagtttagttatcacaccaagcataccagctttagcagcatcttcaccatttgcatctccattcgaaatagaaagcgtttccaggttttgcttcatgttgtctcccataaacataattccagaagcattaaagggaggaaattcagaccgtgcagacattgcctccggttcaacttcaatccattggccagtttcatgctttcttctccacaactcagtgaactgtgtgcatgccttcctattgattgacaaaacaccaaaggtgtgagaataaaggaccaatacagtactcaccaactgttccagtggtaattttgttttgctctttaatggaacatatccacacctctattctggtgtaatattccagcacagactacattatatcaataatgtatgaatcaagacaggtcagctgctgctatattgatatacccaattttatggtcgaagatatttgtatgttgcaacaactatcagcattataacatgttaatagcatatgttaatagcaccagaatagtataaaagaaaattgtagtgtagtaacatatagtgatatagattaggctcctgataaattagcagccatgtgaaaaaatgtacggggtattcaaaatgggaaatccaattcagcaagcaagacactaccttgggcatatcaaggtagtaacacttacatcaagcgtgaagcaccaaaacggtctgcgaatgtgatcaaaaatcccaggttgtcaatattaaacccagccgctacagcacgcgcaaaggccatagcctgctccttacgtaagacaattttgcgagtctccagaactctaagtaattgaactctgcaaattatgaaacatgtaaagaaatggttccatttgcgtctgagacacagactttgtccaaaacaaaatacagataaagaccttaaatgttacatgtgacatgtcacttcactatatgattattcaacctgcataaggaccttacatgctccacatactgttacttcattacatggacatgcaatgaacaggtgtgtttcttcattaagtaggagcatgtattgctacacgaaaattgtctaatttaagaattaagacattaaatgttccatgtaaaccggttttgttgccagatattagacaagtttaggcaacgtgcacggaaaaggggggatattaagcatagaaatactttgaattctcctcctgagttgcattatcattctgcacaggtggaggtggttgaatgcccggctgccatgacacagaatatcagaattatatggcacaattagaaaagaagaaagttttatccatgcaactttaccttgtacagaataagtgatttatccccatcaagatcgtaatttgtcttgctacctgtaaggtgcattcggcagcagagcaaaagataaaaaatattactccaaattatttgcagttcagatcaacccatcatgagaaaattcacacattatttcttgtaagttgtaacaaagaataaagctcttgtgcacatttaagtacaaaaaaaaacttagaaccaccttaaaaataaataggttacattatgcttggtaaaaggtgaaccaattagttttactagtgataattgcacaaacaatataaattgccatttcccctgtacattctattgcattttaatagttctattatgcacctaactcaacagttgtgtctgatgttacattacaccaactcctatagtgaatagtttagattctaaaacagcatggcctgcatcctacatgcatgttttgtggtcctagcaagtagcgatatacgcttaattttcggttctcaataagtagtgctgaataattaggtaaccaagagaaagcttcatagatgtgcagtctgttcgatgcatgacgatgaaaagaaagaatagcaagtgctatacctccaatgcattccgccaatttttcattataatcttctacctaacgaagcacaaagaagagcatgtcattaatcatatcatatttctaatattaagcagtagtacactacatgctatagcataaaattctatacttacagatctcaatccaagattgtcaccgccctggccagtgatggcatcctcgatctgcaatatctcagactctatagtcgttactcgttccaggacctctggtgtactgacgaaacggacaaacctgccagaaaccaaccatgcaaatgaccaccacctgacaatggcatgagctatcagcaaatacgatccaaccgaagcacagcaccaacctctccacggtgccccttgtaaaccatggtgcatcaatctctgggtctacctcaagtgtgatggagtaccctccctttgcaatctgttgttgggcaaccttgagatgtgcaacgaacgggttcagcaaaccagaggctatcttctccttccgtccatttgctatcacaactaaatcacacctacaaaggaggaggcgaaacaaaaaaaaattgactatgaagtgatgcggtcactgctggagctacagccacgaaggcagaagagtcactgtgcatagcagcaagcaagcagtaacagtagaggttgagtattaataagaatgatactgctccaaattaattagatctacaacagcagttgttttggcccaggtttgtcactcgggcatttgacatcagacgctatcttcccaggtggaaggaagatgtcaactttaccatgtccggcaatcaatattcccaatggaaggaccgaacttgtaatcgcgcaaagatgaaacctggattggatcagaccacggcaccaccaccagaagaagaagaagaagatccggactgctcaccttgtgcgggtgggggtgagctggaacaccgctgaatcaagccgcgtctccggcctcattgcagagcgattcttcccaatccctccttctcttcagatcttggagtatgattggatcatcagatgctatggaccagcggaggaaagaacaaagaaaggagagaattttggaacagagcaaatgcaggttgagacagactccctccctcccagtactgggattgattggattccttgttaccagtagaagaagggaacaacgacaatagaaacagagataataaataatatcaagggcaggaaagaaaaataaatactgctagtaaattagatagataaacggcgaggcatggaaccaagagagaggagagtggtgcagacagagagacacaaggattggcttttattatcggagatggtggttgttggattagaaatgaagaaactttctctataataatgagatgagaaatgaagaaaatgtttttaagaataacgagaaacgaagaaacttcttttttttagaataacgaaaaaaattatagaaaaaaaatgagaaatggagaaactacgctatctccaacatatgtgtattggcatgaagtatccgattcagttatggatgacttaatgatgtggtaatgatcttgattataatgatgatgatgaggtggttgcgtagttagttgcattgcatgtggtagatgagagagagagagagagagagaggagaggcggtaggcggttgttgtttcttcttcaggcaggtgagggtgagcctccgggtccgggcagggggatcatacatacatacatacatacatacatactggagtgagtactgtctactagtagtattagaaccataataatactgccttccatagtttccattccatatgagctgtcgagatgtgcatctaatttcgctcgctggaatgggtgaggtgatacgtctcatcatcatcgaccagtgggcatcaattacctaacgaactgacgctacaacactctcaatcggcatataattagtagtaggagttgctatttattagttagcgaataaatcacgccttgtaattctaattctaataattctaattagggagggagtcgcctagaatagatcacaagagctccgccgtcgattgatgcgtccatcccaaaattagctgctgcgccttcatatataaacgacgaatgaattgattgattgattgattggtgctctcttttatcgatctggaaactggaatatattatatatatagagagagagagagaggggcaaacaagaagaaaagaagaagaagatggtggtgatggtgaggcagcggcagcaaaggcagccggtgatggtggtggtgatggtgtgctgggcgctgctggcgacggcggcgcgcggaaactgccgcgacgagtgcctcgccgggtgccaaggttgggccatcatctgccacctctcctgcaacagcgcctgcctcggcgaagtcggcatctccgccatgagcaccgccacaccacagtccatcacggatcaggatcagcagcatccatcacagcagcagcaacaagcacaacaatcggtctccgtgctcaagggtctcgaccctgacaaaatctgaaacgaattgttttcttgctaccattcattttcaaatcccatatacatacactgcactacacacacacacacatggaataattcatgttttctcttcaaattccattgctctttctattaattattaatttacacagcacgttccacatagattagtattgtcaacatttttgccccaaccatgtacacctcacccctaaagtaaaaaaagtcattcatttgtctaaactagtataataacaaattacgggctaccttctgtaacgaagccaacgaatcaaaaataaacaacacaaactctatacgtacgcacgtctgggaagctatgcaagttaagattctggcagccgtcgcgctgaggccccttctcctcttcatctccaatccttcttcatttccacagtttcacggatctgtcatggctcgcagaagctatcatcccagtgaactgagagtgcgccaaagcagctataaggccttcatgtgcctggaccgtgtttctgtgattatctgacaagctccatagctccatcgtctgcacaaatgacaccaaagaccatcaatcagttgccattccgacggttaaaagtcttttggacacacaagacatattatcgaggaggagcaatttgtctaagaaattaatataggtagcactttcttaagacatgtaatatgtgctcggctatttacattgataccaccagggcggtcaatgctttgtgacttaatagcaagaggaaaatagtgtacttgtctttaggataagtgaagccatataatactcgtcagtgtactagaatatcacgttctctctctctctctctctcactcacccttccccttaatacccccactctcgctccaacacacagcctcctcccccccccccctccatgttatgataggagagaaaagaatgtgagaaaataaacaagtctctaggctcttatgaccatggcaaaaggtgttcctatctagcatgttggcaatcgcagaatgtcaaaaggcagttatatgtgtaaaggatttacctggtaaccaccaactatcagaacattcggatatcttggatgaaatatgcaagactggtattggtttccatgagatcttaactcatggatgcatgcgcctgatgctaccgaccaaaccttcacagtatcctgacttacagatgccacacgttcacccttttcatcccaacagatgcagtttacctcattggtatgaacctaactcaagcaaacaaaacaatgattgattaccttgcgttgcaaaagctgcataagatcaagcatcccatatgtattaccttaggcagtgagtgcaaacttgcctccttttcaacatcaacaatattcacaatgcttccagttgccacagctaggagctgtccaatttgaggctgaaacctgaccctaccagtaccaccctgtttcatctgtaatgacatcaagtaaatatcattgaattggcccaagtgtgaacggtttacaaatttcaaaggataaggaaccaaggaccaaccctggagatacgtgaaactttactttgaccaattttccagaaacaaatttctccattgtcgtcacaagagcatagaacctctgtagatttcgggtgaaaatctacagaggttacatgggaactatgcccatgaaaagtctgtacagcaccagttcgctggaaaaatcgagaacatgtttgacttaggttaccagcaaaacagtaaagtgtgatttgactgcctcatagtcaaccactagcatcatgaaatgaaacaaattaaaatcaaggcatttgttcacagtacatggattggcacagaactacagtgacgtcacatgcgcatttactatgcgtgagcgatagcttatggaatccatgacatgataagaaattccacgggaagtatcaaatgacagcttacagcagtactgtttcagattcttgcatatagttttgcatttagcaactagagatttctgcttcaatatcaactttcaaaactaacagtatccctgtaacaaatgaggcacgatttacatcatcaagttgggttatgcacaagagaaggtgttcatgtgcagcatgaaagatacgatagtactctgacagacctcaagtgcttcacaatgttgtataaatatctagataaaatcacctacagcaaatcttgggtcataacaactactacgtaactcccatgtgggccatcggttaagattcagatagatcaatatagagagatgtggcagtaactaaaagagcctgttcttttttaaaaatctgatttggcagcttatgcgatgagtgccacaatagcacccatagaaaggtttgtgatagaaaattccccaaaaaattccttgtttgcaagagcgagcttaaaaacagtaatatacatagtaggtgatataggtttgcggtgctctcttgccacagccagaaaataaaagtttacgatgcaatgtcaatagtcagctctgaaatgaaccaaaaaggaaagtataacttacctaagtaagaaaattactatagaggagaaaaatagatagataaaagactaaaaagaaattacttcgattgcattccatagtcgaacagttccatcagaagatgatgtagctaactgagttgaattcggtttgaatcttatatctgtaataaagttcgtatgttcttctattttagtatccatgttaagattgtccatattccagaggaaga

SEQ ID NO: 9208 - DNA, 26709 bp, Oryza sativa
  unsure (1)..(26709): unsure at all n locations
aaatctccacgagctccctctatatctgtgaaaaataagacaattgctagagaaataagggatggggatcctggaggtaaatcacctcccactttagaagttacagatggaaagaaagctgtgtagaagtctccaggataagcaacagtgatgataatgtggtggttgagaagactgttgtgattcttgaaaatgaggtggtttcaacacctcctctcattctacctcctggaagaacatcagagaatgaaacttctagcaatgacagaacacagaagcccagtatggaattggagtacactgccatcagggctccaccttctccagctgttcttcctgaagctgagaaccccaccatccatagacacaatgaccagggtaattacgaggtatgatgcttatcttcttctcagttgtttacttaaggcttccgcttatcttcttctcagttgtttacttaaggcttccgcttatcttctcagttgtttacttaaggcttccctaaaaggttatctgttttttttctgtttctttgcacaaataaggtgtttatgaagacttcaactagaatgcaacagttacttttgttctattaaattccacaagttgaagtgataaaagaatgcttgtgatgactaggtgatgacggagcatctgaaggatgagactgaggaattgaccttgtctgctgtggagaaaccctaccaggccccttttgctagggtgacatcgttggagaatgattcagccaccattcatgcttacccccatgcactaccagttgaatctgaaacacctgtgcatgccgagagcattagggctcgagtactagacccagtatcgacagtttcagtggaggagacccctgaagcaaatgaaaaacctcgtaataaggaatcaaaaggcttcaggaaacttttgaagtttggtaggaagagccacacatcaggtacaatggattctgatgcatcatctgttgacggagccttagccggagacggtatgatactcgccccttaacaatccattacttatgagtaaatttcataataccagattttaagccatatatggtacacaaaacaccaggttttattaacaaggacaccaggttttattaattttcacataacactagctacatgcgcgcaagtaacataagtatataacacaaaacaccgggttttaacttttttcacataatgctggtacatttgcacatacaagtatataacacaatacaccacatatttttagcctacaactctcagcagataaggtggagccacataggctggaccatcaatcaggctagcaatcctgatttgtgctcctctggtgccccaccactttgacaaaatgctgcaccgctcaccatcttgcgctgtcttccatctccaaatcatcagtggacctccctcaacctctgctgcctcctctctgttcactgcactgcctcagcagccgcggcacggtgccccatcgtccacccccagctgccacgctgggcaagatgggcttagtgacacactatctaccctctaaccatgctcacaactgctactaaaaatgcttctgcatcgtgtgacatccaggcatgtgtgcctgcacgatggcacaacactgtgtcttcacattcagcaattgcctagctaaggagaagaattggagatctcctagttacagcaagcaaccgtcaatggaattgctctttgctgatagactgaaatccctactagtcttcaatggagttatgtgattactgatgcaagtataccacctactgtatatccggaaaattaaagtatccatcaattagccacgaccgggtacatgaaagcgaagaagctagcacaattaattcctcctatgttcccttgaataatattttccctcttcttaatgaaatgaaacgcattgcgttttcaaaaaaagcacacgcaagtaaagaagctgctagtctttaatggagttgtagcacctaataatgcaagttgcacatcggtcttatctcgtgccatttttgcttgcctttctggccgtctccaatggctgtaactgatcggtcatgggcaaacctccccgacagcctcatctaggacatcatccgctgcttcctgtgcaaggttgaatgcctccacgtgggtggcatctgccactcttggtggcgtgtggcgcacacaaacactgccccgtccccacccctgctcccgtggctcgtcctcctgaaaaccgatgagcacgggcttaccttatcatttgtccccagcgactgccgtacccattcttcctcccgcagactgcgctccccatgctactttggttcgtaagatggcgcttggctcttcctcgacttgaaaagccgagacaaagcttaaggtaactctgttgcacccgtcaactgaactaggatgcatcgttgctggtgtcattgatctcctccccccccccctaattgttttgtagtgcatgggtgatcgggtggtcccacagtcagagcaatttgagggggtgtggccagaaacggaggacatcctatatgaggatggattatttaagagaacatgaggggaattaatcatgctggaaaagagcagcttcttcgcttgtgtgtatgagtatcctatcgtggttaattgacggatactttaatttcctagatatataataggtggtatacttacatcagtaatcatacacatgcatggttgcctattttataggctttacaactccattgaagactatcagtctatcggtgaagagcaactccattgatggtatagggttacatggacctctaaatctagacttttgtgaaatttactaattatttaagttagtttgtttacggaaggtcatcatgtaagtagtaatggcatcctattaaaatcgagataaagatagaaaaatttaggacctatctattggtagtcacgtttgtttccaaaaaagaggaaattgcaattcactcaatgtttgtgggtttaacacttgttgctggtgcttaatgtttcagggtcaatgctgaaaaccctcatttcgcgagatgactctggttcttcatctaaaggttagaagttagaaacgcgctctcaattaatattggttgccttcaacctatttggtcaaatgcatttatgcatcggttgaataatttagtggcaggatttgttatgtgaaactagaaacctagctagtatctatattctatctggttttcacttttgtccttctttttagccccttagcgagagattttggcaagaacagcagtgcattctatgagttggttccaaaagttttcgtttggtaaaaatggatgctaattgtgttttgctataatgtggcctgcagcttctcggtcgttctccctactgtcaccgttccgcaggcagaaggtgattgtactgtgaccgtgagttggctgatcctgatctgtcatgttaatgcagcttgtgcattaactaatttgtttcttagtagtacatacacatacagacatgttagtagtacatacatactattgcctacatctgtgtacgttgcttgtaagctgtgtattttgagtgcgcgtttatgtgactttctgtatatgtagtacttggtatgcatatgtatattatgttacacacaagcacaaaacacattcgtttgatcgatcgattccatttgcatatatattgatgatgtctcgatcccgcaatgaagctgcgaattagccatgctaataccgttatatctgtcaattgtggaacatcgaatttgcagtgcacgacgagagcgagacttactgctaattaattttggatgtttcagaacaataataaagcgggtttgacgggagaaattgaaagaaattaagaaaggaaaggaaggaagaaagagcagatcgattacctctgtaaagaaattgtagtttagtacatgatataacaatactgatgaatgcatgaatcaactttgtaaaatggaaatggtgctttatgcccaccggtatcaaagcaatcgatcgatccgagcaaatctgaaattaattaaattaaagagaaggcaaaactgccgaagatccaagatcccaccaacagatactgtatgtgcataactaattataaattcagtgtatatgtattccttcacgaataagcaaagaggatttgattcttctcagcttcttcccaataacttttgaaacggaaaccataaagaaaatggacatgtgaaatggatggagcgttttgcatccagctagcagtatgatcatatatagtgtcgtactatggtaataggaataatatataggggcaattaattgctcctatccaacaggcaccttactgtccggtaccaaatctgagccatccaatcagctcaatcagatggtgaaaaatctgtggtacctccagatacaaatttgctcccatccagcgggtaccatcggtactagaatatttggagtggtggaagggtaattttgtcttttcgcgtagaagtgtccaggggagggaaatagggttttctaccaaatctttgccattcgatccgtgagaggagtaggcggcgagcaaatctccccttcccatccgatccgatccgtgagaggagtaggcggcgtcggcgacttgcttcgtcggcctggacttgatccgcgggaggcggcgggatccgtgggaggcagcggcaacttgcttcgtgggaggaagcggcggcgtcggcgagttgcttccgtcggccggagcgtggatgcggggcgggcagatttggggcgagcctgcgtgtggctcaggtgggcttcgcacgggcggggctgcgctcgccgaggggaggaaaaaaaagagattagatgagaaagcggtgccgcacggagggaggaaacgagaaagagcgaaaaggagaagagggggcgcgactactttctctgtttttcaatcgtacccttctaacatggacggatggatttatctctgtaccttccggtactagtacctaccggtacaagttgctggatgggagcaacgctcttgataatataatatctattgaagtactagtaatttctaactttttcggtaaaaagaactacagatcaaaatttgaggataaacggttcgaatgtcaattattaaatacaaaattactaaacctcgaaaggaaaatagagacaaaatcttgtaaatttctaatcttcagatctactttgcgattcgtactccaatgggcctctcctccaactctgatgactttgatgaacttcggcgactgatggtgacaacctcgaccaattagggccccggatggtggcggtgggagatgggagacagtgagatgccaaagccataggaataggggagactggtgggctagcattgacggtaggggcaaagcgaggcctctgattaggagtcgacggccaatggtgaaaaatctgacagcggagagctgccgaagatgtggaatacggtgggacaggggcacctcgctgtcgctagcttgaggaggagaagaggggtggaagggagagggagagaatcggaggaggggatggttctcaccggtgccgctcgtgcctttgggctttggcagctagcgagcgaggccgggcggtgtaggatgctggtggagcgagtgaggagaattttataatttgtaaaagatttttgaaattgtttttgtctatcaaatgccagtccctagagaaggtatcctatatatatatacatcatcaatcgatcattcaattggactcagctgcatcatatatatcgttctagctagctaggttagctaggttcattccatttccatttcaatattgttagcaacaatggctgcaggcagcggcagcggcagcaatcctaaggactaccaggatcctcctcccgcgccgctagtggacaccggcgagctaggtaagtggtcactgtatcgcgccgccattgcggagttcacagccacgctgctgttggtgtgcatcagtgtgagcaccgtgatcggtgagaagcggcagtcgggcgagggcggcgccggcgtgcttggcattgcctgggcctttggtggcctcatcttcgtgctggtgtactgcaccgctggcatctccggggggcacatgaacccagccgtgaccttcgccatggtgctcgcgcgaagggtgtcgctgccgcgagcggcgctgtacacgatggcgcagtgcgtgggcgccgtgtgcggcgcagggctcgccagggcgatgcacggtggcgggcagtacgcgcggcacggcggaggtgccaacgagctggcggcgggctactcggcgggggcaggggtcgtggcggagatggtgggcacgttcgtgctggtgtacacggtgttctcggcgacggacccgaagcggaaggccagggactctcacgtgccggtgctggcgccgcttcccatcgggttggcggtgctggttgtgcaccttgccaccatccccatcaccggcactggcatcaaccccgcccgcagccttggccccgccctcgtcctcggcctcggcaccaccaaggcctggtcccacctctggatcttctgggtgggccccttcgccggcgccgccgccgcaatgatctaccatcactacatcctcaggggcgctgccgccaaggccttcgcctcctcctcctaccgatcaccccatttttaatcccatgcacccttgcaatatattttattattcttcgatctactgttttaatttgttttttataattatatccgtaattcatctgtactgtctgtacgtaatctagctacatacatatatgtatggttgatttttcatatttgcaattcaattattctatattttcctacttcatcttcaaaaattgttgtactgtctccattgtagccacatgcatgtatactcttatatacaggaatgcgctaaagcgcatctgggttattatgccataattaaaacgcactcttcacggatgcacccccacccccatcccctgacaccacccacctcacttttcaaaatgcagtacaataaaatgatcactaagatcttgcttctggcatagtacattaattataagtaaattatctacagtactatacatagaaattggacgatgtatccatctacaccttttaagtagggagtaaattatttgcttgaagtgtaatcctaccatgcccctgtagtcctgcactgcaggtttcactcaacattaattaaaatcattttccgtttgttagatttttactacatgtagtattagaaaacctcacgtacgtataggattaaaacccatgatcttcacaagtgggcctatagctttcagtattttttttttacaattacttgaagacatgtgtattggaatcatccgatcatgaagggagtaaaataaaatattgacgtgtactggagtcatccgatcatagagggattaaaaaaaatagtgatcaagtccataggccgcaaatatttgaaaaaaatgaaattatactgttgaagttttttttaggagaatgacgacagaagatctgccggaatttaattaaggggtcaaaaaccacccaggaagacctagggaagagttacagcaaaaggagaaattaaggtggcctgaaagccactttgcgcaaatctatatcttgttttacccgatatgctactgacaattctgagctagctaaattttggaaaattctactatttctctctagctaaatgtttcaccaagttgtcaggagagcaccgcgagcgagcgttttttgaccttctctttctgcacctttaagctcatcccaccaggttgagatgcgggacggaagggaattgagagctaggggcaaattttgccacatacatactgtagtccatacttgtttaacaaacggacaatccgcgaacagatgattggtgtcttcgaaggcggaggtacacaaacagtaaatccaattacaagaccaatatcttctgagcaaattttgagccattaaagttctttggtggaggacaagccaaccaaaacatttcatttttggctcagcctgggctttacagagcgtggtaaaatcaattgcagtgtatgaaccagcaaactgatatatatatataagcactcttggttgtatatgttccagattcagtccagttccaaactatgtcatcaacattctgagtgagttgagcaaacctcccaattgcactagctcatgtatctcctcaactgaggtaatttgtctgaaagatgataaccaattgttgttcatcaactcgaattgaacccttctattctttcttctattctttctttttgctaaagagaaacagaggggagctaaatctttttttttctcagaaatatatgagatacgaacggttctacacaaataggcctgatcgtcacgcaggagagaagcgacgactatacttaggcggtattacagtggagtaaagcgaccgttgtcgcgcaggagagcagcgacgattttgacggtaacatggtggagtaaagcaaagtggtggacatcgcagttcggcagcgcgaacttgtgacgaaatcgtaagaccaagtgacgactgggacgttttcaaaaatgctcacacttagatgaccggcggggtggagaaaaatcggacgatgtctgccactgcagcatgttgcatgcaaagaatcttttcttttcttctttcttcaaaagatttttttatcgtaaactatttatctaatctacgatctgattgcaccactgaattcgttacaattaaatctttacaacaagaccacacatgattatatttcaacaaaaaaatattttaatttttttattgatttttttaatgttgcatgtggtctcttttgatgtttcaaccagtagttttacaatgtttcagctagtgtactcatgatgtttcactgtgtacggatcaaatgtgtacggatcaaatgttgcagtggaacgcgccgttgcaataaatcacccacatattttggaaaccctctattaagagaatttggtttgtttttttgttccacaaaaaatgtttcacctagtgcactcacaatgttccactatgtatagatctaatgttgcagtgaactgaaatatttcattacaacaaaaaacccacatattttggaaacctcctattaagaaaatttgtttcattttttgtttcaccgaaaaatgttccacctagtgtacttataatgtttcactatgtatacatctaatgttgcagtaaactgaaacattctttcgctatttgctgaaacattgtttttatataaagtgaaacaacaccagatttaaacgagtgaaacattttcgatctacttagtgaaacaattccgatatacctggtgaaacaccgtgcaacatttaaaaataattcaataataagctttttttttcatcggaatatatccatgttttgaagatttaattgcaacgaatttaatggtgtaatcggatcatgatttggataagtaatttaagataaaaatcagtttaaaagtagttttgcacgtaaatcggcgctgacgtcagcgtccgattttttcctaaagcatcggacgtccgacgggtagccctctccggacgttttcgaatgacaagagagcaatacgtatgtcggtggccgtagtgccacatcgcgggccctgccgcagtctcgtagcttaataccatgagaaacttaattaattaattgattagtgctcttaattgtcgctcgattgtctgtccacaaggccgtcgatgggcatgtgccaaataggcacccgcacagggccctcgttttttgggggccccatataaacatgaaggaccacttcagctatagtaatgcaacacaatatcagctaataggcaatagcccaatgggtagatcaataatggtaggcctgacccaaattcaagagaatgttgtgcgatcgttgatttcgccttctgttggttgctgagcgatctaattccgtgtggcgccgatttcagagatcgagacgacgagacgtcgatcccaattccattcacggcgattgaggcggcggcggcgatacaacttgctccttgcgattccaacgctccaagcggcagcggcgatggctttgccttgctaccttgtctcgtctcctagctcctgcctttctcctcctcgtccgctcatcatcgtcgactcgaccctcaacagctcgacctcggaggcttagacgggtaagattagatagtgattgagtagattatagatcgtaaattcgtaatattagaacacatattgcatctatataattaagtgaaaatatattttatttatattagatatgattttttaaattataggtcccactctgcatttcaccccgaggccccaaattcctatagacggccctgtctgtccagcaattaacatggatggctgagggagaatgattaccaccgaggggctcagatccagtggagctagcaacggcctccagaggcaccctcactgctctggcgtcgcccttgccttcgcctaggctagctgcgtacaagggacagggtgacgacgagctaggaataggatggcaacgcgggaacgccggtgaaaacggattcaggacgtcgcatcctccatacagctcgacaccgcttccgcttccgcttcctgacgtttctcaactcaattatctcaagagcaatcaaatccaatttaatctcatgaaaaaaaataccaaacagattggataagaagaagtagaggatacaagcttctagattccggaagcttcgcagtgtagaggaacaagagagagtgtggaaggaatagagattgacgaggttcagccgaaccaagcccgccgatgcctgttcttctgagttcttccccctccaggctccagccagtgcagcggcagctggttttgttacccccaattgggcttgatttgggcctctccttgaagagtagttgtcctgcgaaataagttcagtttgactcccttattaagttgccgaagctgattcgtatcctgaacaataatacggaatatatatctcgacccctcaaccattaaaatcggagcaatttgactccctctcgatggttttggatgatgattttactgacgtggtgcctacgtggcaatattggcttgatctttattcgacgtggcgttaacgtggcacttaggtgacattagaattagaaagtatgtgtgggacccatttatcattcacgtaaaaataaaatttgtgggacccactgtggggccttctctctttctcccgcggcgggcggcgaggggcaggagcggcggcgggcaagcggatacatcgataggagatggatgtcaagtaaaactaataggcgtgagactacatacgaataggagagagtacgtatcgtatacatcgaaatcctgggttcattaaatcgcagcagctggtacgtagccaaggccaatgtctcgtttcatagggaaattaaggtgctatgagatgacgcacgcgtttgggttctcgtcgctgaagagctgcggcggcggcggtggcggtcggtccagcatgacgtagctgctgtagtacacaggaggaggaggtggtggtggtggtggtggtggaggcacccacgagtgaagatttgcacaggggtgagcatgaccgccctggtggtggtggtggtggtggtagtaactcgtgtaaccgtgcccgtacgtcgnccagtacaagtgcatccncttcatcatctcctccgncnnnaacccntccaccaccaccgaaccatcctcctgctgctgcttattattcgcaatcgctgctgccttctcctcctcgggcgcctcctcctctgctgctgctgctgcttccttgttggcgttgccctctgcttcattctgcagcttgctgctgccgtcttccgccgccggcttattttcctcatctttcttgtcagcttcggctgcaggaggaggaggaggcttgtcgtcgttggtcttctcctcctcctcctccttgggctttgggggcgggggcacgacgaccgtggcgagcttgcctgtgcggcggtggatgtactcggcgagcttgtcgcctgagacggtaccggtcaccgtcagcttgccggtgctcaagttggtgtcagcggtttggacccctgcgcaggacacgagtacacgagcagctaattattaagttgctagtcaattactataatatatcgatcgatccatctcaaggctcaagcagacggtacctcacctctcatcttgagaatctttttgtgcagttgctgggcgcaggcctcgcagtgcatgttcaccaggagctccaccgtcgtcacatcgctcacctgcgaatggacgagcggcggccgcggggatggctggtgctggtcttggtcctcggtactagttgggggcggcggcggggagatgacggtggcgttgcgcaaggtcttgtggcggaggcgagcgcagagggcttgagggtctacgatgcccgtgacggtgagctggttgccgcccatgtccacctccacgccctgcacgcccttgctccgcaggatgcaccgcctcatcctcctggcgcaaccggtgcaatgaagctccacgcccaggatcaccggtgccggtggcggcggcacctgctcttcttccttgctccctgcatctgctgctgctgcagcttcctccttcttctctgccgccggtgctacttcttccacctgcttcgaattcttctccttgccgccctcctcctgcataattcactccaccgctcaatactcaatataattatctgcagactactggctgcatatatataataaatgtacacatgcttcgatcgctagcctagctaccttgtcgtcgttgagcttaacttgctcgcccatggcgatcgaattagaaggagtagctcagatcttcttcttcttctcagacgagctagctagctagcttcgaacgtacagaccagtccagatgactgatcgatactcagctagctagccatgtgatattgtgatatgtagtactgcacaatgcggcgacttatatatatgccccacctcagctagctagctagctcaaaatgctgcattgatttttctttttcccggagaatctctactgcctcatgccaaagcttctaataagccgcagccaaatatctatgtcaagcatatgcttagagctccatcgttttgtgttttgcttatctgtcaaaccaaaatctaaattttagaaatcaactttagcgttgattttgattttccttttaagtttatttttccagtattgacttttaatttactatcaatacatatataaaatgtttatcgataaattattttcatttctaataagtgttatggcttataatcaactatatatagacaatacaatgaagcaactaatctagggtaaatttgatccatccatttactacaaatttactatattagaaaaatctttattatccgcgatattggttgggtgccattagaattttttaaaattagaaccatgccatcaccatcacgtcttctgtcatcatatagaccaaaatacccatacacgtgagacccacatatctatttcttcttctctctccactcctttcgtttcccttctttgtcttcccctcaatctttctctctctcgcgcgcgcttgctcaagcaacaatgctcggcacagggccacaggtggcctagcggagcgggactggatagcaatagctggaggctggtgtgcggcaaggttgggcgcaagccattggatgtgtgaccatcacaatacagccatttgtggcctgtttttttctctctcttatccaacttagcataaatctgatacccatctgcaattttgtaatatacctcatctccggcaaaacatatatcggcgtaaatactctacctatatcattatttttctaattttacatgtgtaaaattaattacgaaattcttagcagtatgtaggcattttcatgccaatctatatgtcaattcctgccaatttcacacattatattaaatcttaaaataataatttggcatataatagagagttaaggacgatgttgaaggctagctaattagtaaggctgcgtataggtgttacatattattataaggccaatcaatataacggaacgacgactaaccttctcgatcatatcagtcattgatcatctaagacacattagataacgacacagaaagacataatttttattaacgaagtttattcgaagcctacatctctagggatgggatgggcatttggtctgaccgaaattttcggtctcggtcttcggtctttcaggcatttcggtctttgaaaagtgaagatcgaatttcaacgcagaaatgtcaggaccgacaaattcggtcttggtctcgatcctgactgaaattcagcaacattttcatatgtgcaaagaaataatggaaatttccaacacaaaaatcacaaaaaaaatcataagcacgtatgagtaaaaactcttattaggttgcatgcctagaagaagtagggatgtgaaaattagagtttgatcctattgaacttagtggattgtagattgcatttagacatttttttgttaatttagtctatttggttaaccgaggagactaaccgaattgaccgaacaaaattcggtctttcactacttaggaacgaaatgatgaccaaatttctcggtctcggtctcggtctttttctgcacacccctatccaggtatctgattatgggcgctcctccccaatcagtatagtacctagccattacaagttcatggccaccctgtcatcatctccttacgtgtctatgctacattgtagtcgtcatagttacattgtggtgcccctctctttatttaagagagtttctaagttacagatgttagggttatggataccacatacctaatagtagtcgactacatcttggcaggacccaccatataccatgtcctatacggaaacaacctagagttccgcataaggaaagataaccagagttctacatggaaatgacaaggactacccggattgtatccatattggtttccctagttctacttggacaaggggacacctatggatataaatacaagcccccctaggaggacagggggacacccaccatgagacaatcaacacccaacacaatcgacatagaagccacaacatagaagcctacatacgccaagacacgccgccgaatatcgacttcagggataagcacagctagtaccctacggtgtctccggataggagagacgaaagcgctatctctgatctcaccgggcacggattcgaggaggaaggctaccctgttgtcgactacgagtcagatcgtcagaccgacatgtcgacaatagttagataggctaccccaacattgtactggtgtggttatcatgaataagagcaataccggcttcggccaacaggatgtagggttattacctgaccgttcaggggcccgaacgtgtataaaaatccctgtctccgtctcttttacctcagtctcgcgtataccctagcaccgacgatccccatactgtccaaataccgtagtcgcgacatcaaatgtcgacaacagagtctgactctaacttcaccccttatcacatattacaactccaagtccaactcctaatagaactagtatattcgacacctattccaactccaaatccaaactgtaaccaaatagaaatagtatattcgacacctattctaaaaaacttcaccttgagaaatatacgtcactcaaaagtagtagaatcaccatgtctatccattggtcctccaaacctgggttgtcttctttgcagcttcactgtaagctgcccgatgagtctacatcaaacccgctgccttagaaagactccgctagccatataacttcttcctctagactccacttgcaacagtctagctccaccttctctcctatcatcacttgtcttgtcaagcaaaattggactcctacttagcggtcacatcatagactccagtttgttaaagagaacattttcttccttgtcttatgacccgagctaaaaaattcaatatacacgctttccaaaatccatgcgtgtttatgctatattgtagtcgtcatagttatattatagtgtcccctctttatttaagagagttgttgggttactagattcgactttaacttcacccccaaccactggcctattacaatttcaagtccaactcttaatagaactagcatattcgatacctattataactctaaattcatagaacttgtttatttgttatttgacacctattctaaccgttatccctcgaaaaagagtggagtagatcagtaattagcttaatagttgccttaattagcttgcaatgaggagaaggaatggtatagtactatgccgagatcgagggcacctcgatcgatcgccggggccggatcggaatagtgtggcaacttaattaattaattggtgttcgcgcgtcatctcttgtgattataaagctactccctccatatcataatataagagattttagataaatataacacatcttagtatatctagatttattatactagaatatatatatatatatatatatatatatatcatatctaccttatattatgaaacagacgagtagctaactggagacatggagtatataggtcgccgggcatttatgtacgatcacttaatatattaactaattattatagtggagtagagatatagcaaaggtacctcgataactgtaacgtcccgtcccgccttcccccaggaagggcccgcttaggtcacagactgccctcacagatagtggagtagagatatagcaaaggtacctcgataactgtaacgtcccgccttcccccaggaaaggcccgcttacatctgatagctttcataggtcacagactgccctcacaaaccaacacatgtcttttctgcacactttgtcctcactcgtgtgcacccgggaagaatttccgggtcggtcacccatcccaaattgctccaggccaagcacgcttaaccctggagttctttggagattggcttccggaaaagaagttgcaacttgttgatatgagtattctattaatcctattaagccctaggccgggatgttacaccctcacccccttaagagtgatcgacgcccccgtcgatcaaccccaggccaggaacgtcctctcttggccacgtccatgtgtccagtgccagcgtatgtgccatgctgtgtaaccactcccggtctacatcagccatgcgcactatgcctgcgcaactgtgacacacgcgcccgtgaaaccgcgagagtcggctctaataccattttgtaacgtcccgccttcccccagcgcatgtgccatgctgtgtaaccactcccggtttacaccagccatgcgcaccatgtctgcgcaactgcgacacacgcgcccgtgaaagcgcgagagtcggctctgataccattttgtaacgtcccgccttcccccaggccgagcccgccttcccccaggccgagcccgcttacatctgatagctttcataggtcatagactcacacgcgcccatgaaagcgcgagagtcggctctgatactattttgtaacgtcccgccttcccctaggccgagcccgcttacatctgatagctttcataggtcataagactgccctcacagaccaatctacaccagccatgcgcaccatgcctgcgcaactgcgacacacgcgcccgtgaaaccgcgagagtcggctctgataccattttgtaacgtcccgccttctcccaggccgggcccgcttacatctgatagctttcataggtcatagactcctcacagggcaacacatgtcccgccttcccccaggccgggcccgcttacatctgatagttttcataggtcatagactcctcacagggcaacacatgtcttttctgcacactttgtcctcactcgtgtgcacccgggaagaatttcccggtcggtcacccatcccaaattgctccaggccaagcacgcttaaccctcccaaattgctccaggccaagcacgcttaaccctggagttctttggagattgacttctggaaaagaagttgcaacttgttgatatgagtattctattaatcctattaaactctaggccgggatgttacaataacaggccagccagctgcgttcatgtatcctcgatcatgcatgttcaagggtatgtataacagctgattagttcgattttacctcaccccaagccatgccacaaagagatcactgctttaaaaaaattgaaacggtaattaactttaacaattaatccccctatatttttataggattagttaaatcccattcgaataaatatcaaggacaaaattaatgttgcgaattctcttatatttcaacccccagaacccattatgtttatttgtagacaaatgcaagcatcaggcgcaaatgtatagagctaacgcagccgacaatttaatttgcctcattagactcttgttttccatatataaaattattcagcgtaattagagtttgaagaaacaaagtatctatgtattatatataatatattaagagaggtcgtgaaaaataacgagctagccagtttgtttgcattgcagttatagaaattaccatattaattagagaaaaacatatttacacgcattaggctagctctggtgcaaagttcaattttacgcgtatgtgctagagttaattttgaacatacataataatcttataacaagcagaacgatagctagggttgtatacaaataaattcaatttctacttttaaaatctgttatatataaaactttgaatctatttaagcataagttaaaatctgtatatcgagtcctattccgtctaaaaaaatctagctacataagccatcacgtttgagaaaaagagagattaatttgttgtactattagattattattatgggtccaaataatatagaactttggtatagatttttataaatatatacttgtatatgaaatgcaatgtatttatggaaacttgtataacaaattcaattatacttttgaaatatactatatatatgtaaattataattaaatttaagaaaataaaaggtaagagttatgtataaaagcaacctgtaaatttaaaaacgcactgcacaaatttgggcgataaattttctagtaaattattgtaataaagaagttttgatcggagaaaattgaaatggaaggctaggccggtagctatacactgtttggcacatctccataaatctatatctgatctgcgattacgtttataaaaaatgatagattattttgttatcattttaaagaaaatataaaattttaaattactataacttaacaaataaattttaaattcaacgtggatgaaagatttaaagctgtgtcaaacatgatttaattaactagaggagatcatgcatgatggatgatgagagagagacgctgcacatgggttgtgtgggtgttggtcggctttaattcttttcttccatctgaagtgttgggaatcctgaatccgccacttcatgatgagtcatcaccgtcacaccgtccgtcctcatgcatatgtattttggacagcactggaactggaatatagtcccaatgcagagtgatcgatctagatacttttctgttttccacgtaacttcataaactaattcaggccaatcatgtactccgatcgtcctacgcacttataatttacaattctagaatatacatgaaaatatttggattctcgtgcattatattggtgtccagaaatacttatgtcacgtaaaagtttgaatattcaagatgcttatatttaagagtatatattttctattattagacatatagtagctcaatactaattaattgtatataaaccgtaggtgtatgaaccagatcgaccgactcataatcctcccacttactaaggacaatgctaatgtagatctatcagttttcatacttatcatgccatatggatatcatgtatagaaactatatattttatataatagatgatttatccaatcacctatcttctctttatttaactacataatttttaaacttggttttgcctagaactaatatcttgcatgagaatggtctatcatctttttcatctccttttcccctcttctcattaactctcttgtcattttttttcttacgtgacaatatatttaatactatagagactagctgaagcgaaggatttggtctgccgtaaattatgatgcaactagatgaatagattgtattgattggctttaacacacccaaaaaaaaatcgatcagtagcctaggattagttgggtagatagcttgcgatcgtgtgtgcatgattagtagtagttagttagttgttgccaccatgcttgatggatcaaattaatacacgcagctaggtagcttatttgacacctgtgctagattgctcaatcgatttgcttaatttatgtggtagggatctcctctgattagggagaacaaactaacacaacaatggaataaagctagatcacctaccctattaaacaacaaagatcattatagtaattaattattggagcactactccagtttgtaaaggaagaagaaagtgtgccttttcagctcagggacaaaggaatatggattcagaaaagttagcctttttcccattcatgcatggatcctgctccctgcttgcttccacagctgcacgcatgcatcccactcttgggaggtataaattgtttgagcagtttgcctattattatccatcctgtctaactattacctccgttaatttattaagtcctactaatatgatctttcgatatttatagcactggaatatatgtcattcgataataggttattacattttagaataaagatagtattaagtaatcggcatgttgagaatttagaaaaatcggatttagttcactctactaagttcaatttagatgcatggtttatagttttatgatgtaaattaatttcaccaccagcaacacatttttttgctttcttggtatactccattattactagctagtagtacaatcttgttgcaaaattaaattaaattggtgcacatgagcgagcagaagcaaagcaatggtgagcgcatcatgcataggtattgtttgaggagcttatggcagctgcaacatcttctataaactttagtttctcaaactatatattttaagggtcaagcaatctagatttcaagagtaaaatccaaaatcttcagtatttccaaacagtccagatttcgaagagtcaagcaatctacattctaagcttgtcataattttgctaatcattttgttactaatttggacaatcgaacacatcacctaattaaaggtaaaatctatcccatgcgcgtgcaatgtttagtgttatccagcgaacctttcataaaccatctcatcagctaatgatggttgagatacgaacacgcaaaatttccatactgttttcataccttatttccaatggtatcgctagtcggggtacatccatgcaaagtgcttcttttgctatttttagaagctgaaaaggagggtttacacttgggatgaagtggtcgccgtgtagacgtgtccctaatcaaaatatacataatcaataaagggactatacataggaatccaccgaaagtaaagaggaggctggccaagaggaaaattaagagaaggtcgtcgtggaggtgagtcagctttggtaccaactgaagctgaaagaaggcacgcagatttgagacttggggcatgacagatgagactacacgcacagttaagcgtgcaggaaacaacaggaaaatccaatccaatccatccaaatgcatggcagcatggagtactatactagtaagctaggatggagatgatggtgcccccaggtccaaatggcggtagagatgccacttgtggtatctctggtgtgatggcagcagcggtcgcaggcgaggcgcggcggtgcagccctcaccgcagcatcctctcagctcctccacgcatcgcccgcagcacctaattaataggataatcacttcacttcagttcatcactcgttcgttcgttttatacacattactgctaatatctactgtaagaatgaaagaaagaaagaaagaaaaaattgctggcattagcagagacgacgaacgaacatacaggtaaagccggttgcagtcgatgtttgcgcagttccggtgcctcaactcaaccacctctgacccacatgcatagcatctccccagctctgaactgcttctgtttctcccctcctcctcctcctcatcatcatcatcacctgctccaggcttgtacgttgccggtggcagggagagccgtccatcaaacacgaacaaattccccacccatcctgcagacccctcctccttcagataattggacactcctcccttcaatgtatacaggttccggaagcccttcttcctgggaacatagtgtacgggaatgaaacagactcgaaagaaagtcttattagaacgccagatgcatactatttccattccacaaagtgagaatgtcgatatctgcttacctaagaattgttgaatacacatcacatcttatgccaccagtgcagtacattaatatatctgtattttctttgtctataccatttagaggatctgaagaatccatctgcatacacacacagttacacactcagtaccaagtaggagtgtccagccgaaactagtccaataactaacaaactctactgtggcatacatcacagtagctagtcttacctcctgctctgactctgagagcccaaaggatgtgctcctgaagcagtccacattaggtcgctgagctccttgaaaatgtccaatatcccattcataatctgacaagaaatttttttaaaaaaagggaagtagaaaaacataaattccagtccaaaatcaaaagagtgacccgatagaacaggcagatccatcgagcttgtgatatatgaaaaacaaacctacattatgtttgtagttgaaaataggaaaaaaattacgaatatacttatttttacaataatttatatttatatacctgtatgtggagaatttgcgtaaatatacccgtccaaaacgcgggatcggcagtcccgcgggacggttggatgcatgcagatgcatgcagctgatccgtgaccgatccatgcagcggtcacgcgcggctggctggcggtaccgctggcgcggtaccttgcgtcagcccgcatgccacacgataccgctctttcgggctgcgagagcgagacggtgccgcatggctgggctacgggaccgccggtcccgcggaatggtagtgcgggaccgtctcggtcccgcgaaaccacactgtgaaagatgtatatttgtgcagattttcgccacataggtatataaacgcaaaataatgaaaaaagaggtatatttttaaatttaattcgttgaaaatatagttatattttctgtacagctcctatatttattcttaaaatacagttttttcttataaatttgtataagaaaacacacccttttctctaaaagggaattatatcaactctacatatatacggtcaatctacactataatctagacatacttccgacattggaaatttttctctcaatagtctccgactctctctagccatggtaaatatacaccacagatcataacagcaccactctaccaattacaaggatttatggttttgcctcctgttatgcaaacccttttttttctattaacacaacagcactaatagctattttcagccgtaaaaatatgcttatctctattcatcacttgttgatttggcagtacttaggaaacagctgctaaactatacaagtttgtattaaataaaaatatactttaccattcctgacatcgaggagcaaaagcctccttccagagctatctccagctgcttcactcgatgacacatcaaggcattttctagcttcaagtctttccctccactctgatggagtcaatggtgtagcacgcatgctagggtccaccaaaggaagatgtgaacaacctccttccaactgggagtttttatttgaaataagatgtctagagacttcatatagtaaattggattattttctaacaaactgtaatgtcctagtacagtatagataaaaagttcagatcttttcagttcgcacctccaccaaacagaccgagataaatacaaactgaagagacttaaatgatggaacaactacatgaatggaccttgcgctgtcaccaaaaagaaaacttgaaacactgcatttgaaaaacatgtattggtgtatactgcactttcgaaatgttgaaaagagctagggtaattgctctagaatatgctaagacatcaacttgtaaaagctccaaatttccaggcagtggacaattgattaataatatttacaccgcagatcagagtttagttgaaggggtgcacaaaggcaagtctcatgggcagcagaatgtgaggggtctcctgatcttcatggaagatgcagtcgtggagttgggaagatttactttggactcctgcctagtaatggaactggaacagaagttggggtagctactcactccgttactgaggaaagacaggatgccatttccataaatagactcttcttaccaaatccttatcctgcgctccactcaaaatccaaaagaattgtttccagctttgttataccaagagaattattgtttttagataatggaaatgaattacattcccaggttctgccgttaggcacccagccagcccaaagaatataagaaacccagttaaggttcacagcaaaataaacatctcttccagagcaggaatcagtacgatagacaagttattttttcattcaaatgtaacagcagcaaaaggagctcggaggcataaggttgccaccatatagcatcaggagaaggtctaggccattttaaaatatatcaatgtatatccaggagaagctctagaaactcgcacgtctgattatttgctcagtatctagacccttgaaagaaacagtttcattattttttttatacacattgtatttccaatcatgtaaaaaaaatcatctacattcagttagatttagaagtttagcaggttagtagaagaatattttttcctgtatgacaatcttcagttcattgagacacttgagaaattcaatatagaaagcagatcagcgtatccaggtaagctattagcttctgtttcccctgtgcagtagaatgaaagcatggcttacctgaacaagcgatggtttgtaccgcagtttcaagcgaggaaaagcatggccacataacgatggtgaagtttggacaagtagatcacgaaatcgatggtcttttctaagccagtctgcatatgctaccgcatctttatgtggaccactgtactgtgacaagaggaagaaattagagtagaaattgatataaaaacaatcatattatgtaataatttgtacatgtaatgcagggctcagcacattcatattatggctagccatgctaaaaaataaacattttaaagattttcaggttttcttcttcatacatgttaatttattcattgctgcttaaaagagaaaatgcaaggtaaaaggcagtgatattattgtagaaacatatgtacatcttcacagttgtggttgactttgttgttaatctactttttagcttattcacctggttattgaaacatattatttgctccacgcttctaaaaatctaaaagtaatgtttattaaaaaatttcttctacggcattgcttataccagttattttaaggtattagttaagtttattttataaaatatttaatttatcactatactcgagtagagagtccacggcaataatctaaatcaagccggaccttaagcaacacatgtgcttgttactaaacacaatcatcattcattcatgttaccatgtcaccagtctcagtcaagttgtcatataatgataaaagacatggtaaataccgtagtactccatgttggtggaagcactagagcgatataagaaaagaaagaaagaaatgaaacagaagcttgttttacctgggcattgattccctgctcgttcatgtaaatgcggccatgtatgtcgcggccctgagagagagagagacgagtacatataaattcttggtacaatcaaatcgagccttgttagctgcaacaatttcacatagaggagaagagggaagaggaagagggagagaaggaataggaacctggaggaagtggaggtgcctggacacctcggcgcgggggtcgtcgatggagacgaacttatagaaggtgacgacgacgaactcttggggttgtgcaactgcaactgtggcggcgcatacgggggacgaggaacaacatcggacgagggaaggaggaatgtgatgggggcgaggcgatagttgtcgaggcggaggcgtgggcgtcgacggggcgggaaatacgccaaggaagcggtggacggcggccgccatggccatggccacaaccactcctctcgtctctcctcctccccttctattctatcctcttcttcttcttcttcttcttttctttttatatcaaatcaacaagcaatctgtacatcaaaaaatggtaggtgggccgg

SEQ ID NO: 9209 - DNA, 12535 bp, Oryza sativa
ctgattaaggataacttgatggaactaatcacagatttcatgaaaagaaaaattagagttgagagattaaattatggtgttataactttgatccctaaatgcaaagaagcaagaatgatacagaaattcagaccaatatgtcttttaaatgtgagtttcaaaatcataacaaaaattttgatggaaaggctggctgaggtgattgaagtcttgattgctttgaatcaaacagctttcataaaaaatagatatataatggaaggggttgtaactatgcatgaatttttgaactcaattcatcaaaaaaagcaggcaggaattctgttcaaaattgatttcgaaaaggcatatgataacattaagtggtcttttgtgtattaaatggtgaaggccaaaggattccctgacatatggtgtgattggatcttgaaagtggttaaaggggggaaagtggccatcagagtgaatgatcagatagggcactattttacaacacacaaagggttgagacagggggatccactctcacccttgctttttaacattgctgctgatgctttaaccattcttatcaaaagagcagagcaacagggactaatcaagggtttgggaatggatgtcatgagagagggggtggctattttacaatatgcccatgataccatatgcctgatctaggattctctggaatatgcaaaaaacctcaaattctttctgtgtatttttgagcaattgactggcctaaaagtgaactttcataaaagtgaagttttttgcctgggagaggcagctgagagacaggactcatacagccaaatgttcacttgccaaattgagagactgccaatgaaatatttgggtgttcccataaatcaagtaagaatccataacaaagattggaaacctgtagaggaaacaattgaaaagaagttggggtgttggcaggggaaactcctagcaataggagggagggttgctttgattaactctagcattagcagtgtcccactttatatgatgtctttatactctcttccttgtggagttagagaaaaaattgatttttatagaaggagatttctgtggcaagaagatcaaggtaatatgaaatatcatctagtgaaatggccagtgatctgcctccctaaagatcagggagggctggggattttagatttagatgtaatgaataaagctctgttggggaaatggctgtggaatttggagaatacagaaggtttgtgacaagacatgctaagaaacaagtatttgaaaaagaaaactctgactcaaataaaacataagaatggggattctcacttttggtctagtttaatggagatcaaagagctgttcttgagattttgtgacaagaaggtggaaaatggggagagtaccctcttttgggaagatagttggtgggggggggtaaaccaattaaagagtctgctccagatctttataacataaccttgacaaaaaatgtgactgtggcagagatcaaaaggagagggttaggctcaatcaaattcaggagagacctaaatgcagttaaacagagaaaatgggctaatattggtagagccctggacaatgttagtctaactaatgaaaaagacagactgatttggagactgtctagcaaaggtttctctgttaaatctttctacagagctttggtattacaggggatcaattatccctacaaaaaaatgtggaaaatcaaaacaccacccagggtgaaagttttttcctggctggttctaagaaatagtattcttacaaaagataatctgttcaaaaggggttggaggaagggctcgattaaatgccaattctgtgataagagtgaatccatccaacatctgtttttagattgtccgatggctcatttcgtttggagtgttgttgaatgcgctctcaatgtgaagcctggcaggaatgtgggggaaatgtgtagctcctggattttgaaatttggcaaagggaatgggaagttgattatggtgggggttacaacagtcttgtggaccatttggaaagcaagaaacagagcctgctttgatggaattatgcctgttgatcctatagaaatagtttataacatttgctcaaatttaaactcttggagtattttgcagagcaaggagggagacagaggaagaatgcagtggggggcgcagctactaaggcaggtagcaaatgagatctttcactcaaaatttgaatggaggggcggcagacaaagaataggatgggaaacagaggcagtctaaactaatggcaaagagttttgaagacgacgatagaaacctatgttttgatgcttgaaatgccaatgttctagtcctgtaataactgtttgttttcctttttctctcgtcttttctgtaagaacttgatgtctggaactcttgtaatcatctgcgttttctttaatgaaaacgggggagtttccctccctttctcaaaaaaaaaaaaatcatctacgcgaagacgttgaagcctccgtcgtcgtggcgcgcgtaggaagtcgccggtgtgatcgcagccactacgcacccgcacgctgggccaggagtcgctgcgtgcgaatctccccccaaaaaaaggaagggcgccgagcgtgcgtaccggacgtgccgtatcttcggcgcgctccacaggctcgcgtgccgcgggatcactcgattcgatcgtcgcctgggtcgccgtctcgcttggattcttcgcgtcgcgcgagaggccgggagagttcgggcgccgcgcaccacgcgcgcggaggcgggacgggacgtacgccactggccacgtaacgtaacgtgcccgtccgcttccgcgcctcctcgcccgcctgtgtagcaaactagagagaggcggcgcacggatcagatatatggtgcacaactgcacaagtctgcacatgggtggagcccgtgattccggtctcggacgatctggtggatccggagcccacagatatggaagaaacgatatgggtgagaaccagtggattattatttggatttctagaaccatcctatgctgagatttcttcgtcgcccggtggccccggcgggcggcacaccagacaccaaactccaacaccgagggcggaggcgggcgaaatccgtttgcgcgcaaccgacgcgatccatccatccacccaaccagccacgccttgcaaacggccaaaaaaatccagcagacccaccgttttccgccgtctcaaagaaatcgccacggttctcctcacgcaaaaccacatccgcacttcgcgaaacgaccgccttgccaccgcctcgtgccgatgcgacccacgcgcggccgcgccgggacgagggcacggccgtcacttcctacgcgtggggatcaccacaaccaaagccccagtgacgtacgagtactcctgatgtgggtggggccagtgagtcagtgggcggggcacaatgggacccacggtttgggaatcccgggtcgcctttaaagcgagtcccctctccgtcccaagccagtttgccgctctccggctcctccacctttctgcagttctgattccattcttgcaagttctaggtatacacaatcttctctttgttcctgtttttttttcttgcacaagtcaagttgagttgttgataacttggtatggagaaggaaatcaaaggctggttgtaattttaggtcagggttagatttgtttgatctgatgtaagtcctaatcaaaatctttaattctgttaacaccttttatgacaaagagatcttgtaattaattgctcattaaagccatctttaatggtgtgcagaactacagaaagcagggagtaatggcgtccaactacgtggacactgctggggaggaaggcaggttccacggccacggccaccacagcagcggcacgacgccgaccggcgcggcggcgtcgccgaagatgcggaggagctggtcgtccgccgcctcggcgtcgtccggcggcggcggacacgggtccggccccaagtgcgtctgcgcgccggcgacgcacgccggctccttcaagtgccggctccaccgcagcagctcgcacggccacccgtcgtcctctcccaccgccgccgccgcgccggcggcggccgtgcagtcctcgtcctcccgcaccgtcgcggcgcagtgacgcaagaacggtctctcggaccaagaaacgcccaacaagaagagaggagaaggaaaaaagaaggaaagaacataatctaaaccaaagaatatttgtgtcattcataagaaaagggatattatttggttcctcccttgatgtggtgccatttggaaaaaaaaagtcccttttttcccgttctttttcccatctttttgtttgggatctccattgaagaagttgtctgcttttcctctgtcctctcgactattggaaattggaagcattttagtcatattgttaagagtatgtgtggtgctctactatgtaattaacatttcagtaagatccatgcttgttgaaggtgttgattttgttcagacgaatggatatcctggaagagcatttctagtcacaaacagatttgctgataggctgatacaaatgaaccactaaaggataacgtagtagcaaaaaaacggagtagatttgttggagtagaaggtagcaagcacaaatatctggcacaatcaagagagggtctgttggtggttaagctgacttctctgtcaattcctgccatcgtgttttgtgtcagttttttaggttatcatgtgatgcttctgcagcatgctgacaaatgctgcagccacgttatcatgttggtaatgtaaaccactagtagtattcgctgaacaacaacagaacagtttagtagtaacaatgtagtactccctccgtccacgacgtttttcaccttttatttgtaacgtttgaccattcattttatttaaaaaattagtgtaaatataaaaaaaattttatttaaaaaattagtgtaaatataaaaaaagataagttatatgtaaagtacttttgataataaagcaattgacaaataaaataaataataattctaaatttttttaaataatacgaatgattaaatattaacaaacaaaaactcaaaaagacaagtaatatgggacggaggtagtagtaatactagatcagttcttgcgcaaagttaagcaggagattgttgccatgccatgatccgcagttaccctcaattttcctgtagccttggagtatttttttttcttcctgtagactgtaatgccttatatcttatctagaccttgctttaggagcacaaatgcccttcagtgtcatcgactcatcatagtatggcactatacattagatggatgtgatttattggttgggtgctcatcctgtgttatcttggtgtctgatcaactcagccaaccactagttagagcaaggaaaatagtagagctcactttctactattagcacatcttaaagccaatatatatataatagattagctataaggttggctataattttctcctcctctctctatctctcacctatacatttaatgtatttatctaggagcttgtgttaagctagagctaacatccttgattttttgttatctctctcctctatataagtttataatagatttatagctctatgttatacttgctcttatttgtgctggtctggattttgtcttggtggtggtggtggtccagggtaagatgttaggcatagtactaatctagttcatattttcacgagataagctgcagcaagttcgatattttactttactgaaacgtggttaactcattatcgggaagtacttttgcaaaacgagataagcttcagtagaagtgtagaaccagtgaaatgagaggcttgagagcagaccagttcactgtcaacgtgctttctgcatttaggcccatcagcaaaccatgctctttaggcccatttgtaatcagcaaggcgcttttgatttgaaggaaatgcaatactccaattctatagaatattttcctttatgatcggattgaaaattattgaaccctacaaaattcctgaggtttggaggatttttaagatgaggtcaaatcttatggaaagtttcctaatgtatatttctctcattcaatttttatgttttataattttttttttgttttgcacatatattcctgttaaaattttatattttttctcttcttccgttttctaactatgcgtttgaaagaaaccctaaggccccctttgattcaaaggaaattcataagaattttaaaagatttcattcctataggaatttttcctatatagccctttaaatcaaaggaatgaatcctatgtaatcccatgaaattcctatggaatgcctcttgccatgcaagttttggaggaaatttagcatgaggttctacctcatgttaagaattctttgagtctttatctctcctcaaattcctgtgtttttcttgcggctcaatcaaacggttattcctattattttcctgtgttttacaatcctctgttttacacttgtattcatgtcaaaatcctatgtttttcctattcctccgtttttttattcctgtgattcaaagggccctaatcaggagtttcttttcttccgattcacgttgcatgagctgagcgaacccagaggcaaagccttgataagatggtgccacgtgatcgttaggaaatatattcgttatcttattttgtactggtaccatgagctgttcttgtaatcttgttggtgaatcaagtccagagaacaatgatctgggtgcgattatttggaagaaaattcaaattaagcacgagcttctgacaaaataattacacacagctaactatgatcatgcatctccctgaatatctggaacggagtttatctctgtctaactgcagtacagtacttctcttttgagcatgatggcctttgcttacagtcacattactgtctgcaaggtcagtgaacacagtggacagggcacgcctgcgacaccatcacatgactgcataatcgcctgagctgccccgcatgtgtccgtcacagatctaccacgctggtgatttctctgcactgatccattgctcaatgagccgtgaaaagagaacaagttcagaaagagaaaaggcgcaaatgctcatgccagaagcggtgtcatgtgaaagatttgttgatcttctgaacaaactctttagctcgtacttccatgaatgtccagtgacttgccatctgcatcaccgactcgccgtatcaagatctctatcaagtagggtgcatgcctgaaatgaatcattgtggggaaggaaagactgcaccttgcattgccggagcagtaataaatctgtcgatttgatcctcgcgtgctgcagaaatgacaccgggcgtcgtggctgcacagcagaacagcacaggggaacgcgatcttttcctgaaatcggatccaatgccatggttgattggttgttctactgctaatcatgctttttccctggcaaaaaggaaggaactttttcgtgcatcatggagattcgagggaggcatgctgcatctgcagttccaattggagggagcatcatttgcgtactgtgtttgcgtctggtgtatgcgccttcttttgcttctctgtcctggtggcacctgtgatcttcttggaatcttggtggtggagaagaatcatatcattctgtaaccactcctttcagaggaaagtttcagttctttggtggtgacagtcaggcgaatcgggtcttagttaacagaaaagaagggtccctgctatctctgaagatcgtgcgtccatctgtttcagataccgagtgatgctgcaggatacttcttcgattagtgcatgcttgcacagagcacagtgccatgaggccattcacaatgcgtcatgggtttttcctggacctgagatgccacgttggatggaactgctgctaagcaactccatccagaatgcaaagcttgtactccacagtataagctactaatgggtcccaccaccaaacacttttgctctctctctttggttcagattttgcagcaaggaactcggtaccaactttggtcacacggaccaggcaaagccacgatccccactcttctccctcctccacgtaagccaggaacaacattgccacacgccacatcgccgcattgtaaatggcttgaccgaggctcccttggcaggccgatctagtaatccatggcatggaatcttttgaaccacagttttttgagatacattgtgtggttttaacctcacgatctcatgctcaatccctaacatgctcataatttctttaaaaaaaaatatttgaagagatgtctctccctccaaatctccttttttttatccttaaaccctaaacccaataaattattgtatacacatttcagggcataaaaaccagggttttaaatctcctgttatagctgtttgaaaagagttctagctatttgatctcatatacaatttgatcgctatagctccatttagcccactataactgtttgagaaattaatcgctaaatgtcttagcccgctatttaaaacattgataaaaacacagattttcagaaagcacagtacatatatagcacatgttcttaaagtgttttctaatattcagacaagttcaacgcatcgcgaagaagttaggtgccatcgtccagtacatggtccttaccaggatcagctatgaggagtgggtgctgctcatgacagtgaaggtgatctctgtctgatttctagaattcttattaggcacagcacaagggctctaataggccatggagccaaggaggtagattaccaggaggataagctcacgctacacatcgtaaggaccatgccacctgagatgctcagggcactgtccaccaaacagacggcgtagtcagcatgggaggtgatcaagaccataagtgttggcgtctaacacatacgcgaggcgaaagagcagctgctaatgcaagggattcggcgagatcgagttcaagaatggtgaggcaggtcagtgatttctccatccgcatcaccggtctagccaacaacatccgcgtcttcggtagcaacctccctaaagctgatgtactgaagaaatctctgcagtggccctgatcgaacatctatctcgctggatgagtcattgacatcggggagtatatctcagttgcgatcacgacctaggaaaaatgttcgaggagaacttgtaggggttcttcaccacatcagctttgggggatcgtcgtccaacatgcagatgctatcggcgaggacagttcatgcgtatggagaaatcgtcgatcgcctcgccgtctctcattatatgttgccctttcccctcgcatatatgttgagaggctaagatcaacatgtacggtcatgatagcctcacatgccatttgtatctcccatttggtgtacatacctgagcatctcaggtggcacgacccatgggatggcggccagcgcaggactatcctgctagtagttcacctcctcgtcatcgtcaggctcaacggtctgccgtagcccttattgcctacaagttcaccttcatgagcattgtccactcctcgtagttggcctgataaggaccgggtattgacgttggcacctgactccttcacgaccacgggaggaaaaaaagctcgggctcgtgagctcagctttggcttggctcgagttttgtttgtttggctcggctcgtaagccaaacgagccaagtccaagtctcttttttatctcgttgctgaaatgaatcgagtccaagctggctctcgagccgcttgttttggctcgcgagtctaggccatcatgtgtttatattgattattttattttttatagagttattatttgtcaacttaaaatttatcattaagatttgtaagaattgatatataaacttatttaatttttacatattgatgatttgtttttgctttttttaataataacaaaatatatatgaagaggtgtttcaacaggaaggattgcaagccagctcgagctggcttgaaccaggaaacgagccaagccgaactcaagttttagcttgtttttctaactgagccgagccaagccaaacctagtttgttgcgagccacttcaagctgagccgagcctagctcgtttccacccttattcacgacgcgccgccaggatgatctcttgtgtgcgtgcatcatggttgaggctacagagtgggggccaagggagagaggtatgacgacacatgggtggtgtgcaggaaagccggttggctggtgtagattgtgccgacacggcatcaaggtgcaatttggctcttagagcaagtttaatagtatagtccactactggctccaattcatctataccaattgttacaattgagaccagaaatcacaaacacacacgtgttggaagaatgcaagaacacgcaaagggctattggtgagttgcagtgttttctgttgcattataagaacttaagtgcccctttggattgtaggattgaaaaaacgtagaaatagaaaaaacataggattttaataggaatgcaagtgtaaaacagaggattgcaaaatgcagaaaaaaaaacataggaatgaccgtttgattgaactgcggggaaaacgcatgaattggatgagagagatagactcaaaggaaagttatcaagaggttgaaactcttgctaaattttctctaaaatctctatagaattatccattccataggaatttcaaaggattggatatgattcaatcctttatttcaaagggcatcataggaaattttcttataggattgaaattctccaaaatacctttttcctctaattcaaatgagccctaaatagactacatgctaactgtttctctaggcgttccaggccacgcaacctacaattctgatatgcttaccatgccctccaacttgaccgctccatcatatcgccgagggcatgtgatgcacacaatgttgcctaggactcgggactattttgacgtgctccatgaactcgcttgggtaagaggctatcgacacgacacaacgaccaaacctaatcttactttttgattgtttcaatgagaaaattattgaaagggaaaataagaattctagaaatcagacagcgatcgtgctcaacgggaaaaaaaacagagaataagtagtaggattgattcatcacccagtgtttatgagcatcttctattctgaacttttctgaacattgctgggcctaatcaacgcgggccgtgaatttaggtgatctcaccggcaatttagcacgcctatctttaaccttcaccttcatgcatggctttactttcactggttcacaactagatcacatgcaaatcgatctaacagaaaagctaatctttctgttgcctgaatccagatagccttatccatgatctatatatctgtcacttcagagagtgttcgtttcaccacaattctatcgctcccgcgaagcacggtgtgcctcgccgtgcgattgattcagtcattcaggccatgttctagagattttgtaggatctccattgctacatatgcctccaaggtcttgacatgcattgatgcatacctaaaggtcttgacaatgtatgtgcagctcatgattgacaaagcctgcatgcttgatgaagatgacgccatactgtctctgtaaaaaaaaacccaactttttttatacaaatttggatataacataggtctagttgatttttttttagactgagggaatatgtctcttacataacatatcttgaatgctgataattttaatcagcaaaatgttcttttcactaccctctgctagtatattttaagcttgtggttgtgctcacatatactgaactgattgaatctggccctgcaagctacaataactaaaatgtgcatgacaagatttgcgacccttgtatttaggcaattaactgccctttcgactcatcaatggtcaagtgacatactgacatatactagatatttgataaatgaaagcaaatacaataccctcattccattaaaaagtaataaaataaaataaaataaaatcaacaccataccctcacagcccactagtccacagagaacatctcgccagttgcatcattggtcattatcaacatcgtttctatttggttgaaaatttttacactagcttgcattacagcattggtgaatcatctttgatggcagtatcgatcatcatttacagattaacataaagcaacttgcagtaataagtaagatcacaacaaagttgactatttttcgacgcaacttccgtgatgtcatatatgggtgcttaattcaataggaatgtgcaatatatagaagttcataacttgtttagagaaacacacgttaatgctaggagctatatatgcaggactaaccagatctctgaatttttcacattcttttatacagttaaacattaagggtcccattaaaatggagggcttgcaaaagatctttggaggattcaactttcggattttaccctatattc

SEQ ID NO: 9210 - DNA, 18201 bp, Oryza sativa
acagtaaaaaaaaatttagataggttttgtgttacgagtgcccctagatatggtgttctatgatttttttagataggttttgtgttaagtgtgagtgaacttgttaacttatcactcgactgtgccgagtgctcttctgagcaacaagcacaactaaatatacacatgtaattaaatgaaaaatactcaaacaagcaccatgtaacaaatgctgttgattttttttggtcatttcaatgatacaccaatgttacatgttcatgtgatagatcaatttggtcctaaaatgtaaaccgttggaatttgtcctgtgcagcagtcaaggctgcgtaagtagatccactgaattttcaccataaaatccatctttattcacttgcactgttgcacatgtaacatagacataggctagtacggcttgaggcagtcaaagagacggtgacccaccgtctcggcagcttccgccgccgtcgcgctcgccgtcggtgacccgactgtggtcgacggcccgccggtcagtgtcaggcactgcgccggcactctcgggctctcccggggctccggcgccggcggagacacgccggcgagcgcctgctccatctgcagctgcttcctcctctgctccctcctcacctcgttgcgcttgttcacgtagtcctcgtggatgaatacctccatcctctcccagaactctaccaaaactaactactacaaagtacaaactaacctcgaaaccgaaagaaacttcacattagatcgacagtacttgacacaaactcagatgaagaagtgagagttacactgaagaaaactgcatgtttatatgggtgtcaaagagaggaggaggtcgccatcatcggtcgctttaacctttaaccatttttacaaagcgcagcctgctattagtctatgccaacgctgcaaaaaaaaaaaaagcctgtattattatggcatggccgaattgcttcatgcttggtggagaaatggttaaaagagaggacttcacaatgccaattcctatggccattccttggtcttttgtgttatagaatgcttgctgtcctttgtctgttgctcctgtgatggtgtggttttaggtttaattaagacatcgttgtcatgagtgatgtgttaaaactcagggattcgtggtgtacatgggtaggtgaataggacaaacggtgtgttccaggttggaccaacctatagctctcccggtcactatccctgcaaaagaaaacaggtagctgcttgcttgcggcgacatggaattggtggatcaggattcaggaatcacaaaattgataccagagatctgtgaaatttgttatgtgtgatgtgaccaagattcatcatccaccacatgatatcttcttcagattgccacatggccttcttcagatttggtatgctacttgattggtagtacttgcaactttgcaagtcctccatttgttctgggagtggcctttccatggatcatctccacatatctataatatcttcagattaataacaagagaaaacaggcaatcccacaccatggctcatacttggattgctaacagtttttttttttttaaaaaaaacaaggaacaattataacaacatgagctaatgaaagcttcagactattccattctgctcttctgattgtaatgccacagaagagcatcagtgtttaagtcatgtgcaaaattatgacaaacaaatttgccgtccaccttttgatctaacaaaagggctggtcactcccaaaactccagatggatatatacacatcatttcgtttattaactatcacacgagattcctaaaacacattcatatgcgaacatccgcaaaactttttaccagttgataagcttgttgcatgaattctgcatcttcagagtgaagttgacgctgtcattgtcctttgagcatttccaaggatgataacaatgatggtaacatcatcgtggtactttctcctgctcccaacaggtatcctcatcaattcttcagctgttaaagctggcacaacataggaagaacaaaaggtgaagagttagttaagtccctgatatcaacataactccaaaaatggagcaatgatgctaattatgcaaaatataaaaatcatcaaaggtgtaatttctttcaaaagagattattaactgtccctgcatctacaagatactatagagcttaattaattaagtctaagggtgtaataatatggaatatgcatttcagcgcaaaagaatcttaatgctaactatttcatattttaatactaaaattataaaactgataatatatttcggatgatacctgcttccttcgctgctttaagtaaaagttgctcaatgagatactttgcaggatcaccaattggattatcatgcataaattgataaaccaactgaacaacttcgtcattgctgaagaaatcaaataagccatcactaccaagcacaacaaacaaatcatcctctgtgactttatgactaactgtgtgaggatttgtgtacacataaggcgggctgcacaaattacgaactcggagaattcccatgagtgcatcgttcaacttcttctgcaaattgacatgtaaagcatgtgtattagtaaaatcataagaacagagatgcattaatgctctttcttcccaaacaaaattatagtacgttacctgttttagatagccaactccaaaagcacgagtaaccttcagcttcccctttattttgttacccatcacaactgatggctcattaggatgatcagctaaaagtttttggtactccaatggattttcaagtgagtggatctcagtcaattgaacagccttcaatttatccattcctgaagacggcactgaagcaagcacagctctactatccccaagatttaagatgcacaaatctgttccatgtagaagcacaaccagaacacaagacccaactgatactaaatctggtctatcgtccatctcttgttcaaccatgcataaaaagtcattttcagcttgctcaacagcagtagtgaggcacttaagcacaccagctcgaaatgtttcagaaaatttcacatcttcattttctgcaaatctcatggccagtgttaactcacttttaacaccattaagagagccctctggtgaaccatatagaccattttcttgtttaatccggcactctaacaaatataggtaatatactatattatcatataaagttactgccaaaaagtcagctgcatctcgtccattaaatccatcatatattccacaaatcaaccatccattcttctcagagcacacagcttggactctatcctctccagcagctccaccagccatttttatctctgtacttgtcagaaaattggatgagacagtagttggggcactggacctccagatatttttactgatttcaaatatagagctctcagtcgatacagggctgccttgtgaggtggataacaagtccaatcttgacattgatggggatgaaacaatttttctgaaagaattaggagagtctagttctggtaaaatttcttccccgataagacccttgcaaatgtttgtattggccagcgtgaaattggcactaatcgcagcaccagacaaacaagtgaaggatccattttgtgatgtcatcatggtattagtttcaagcctcttgttgggagagatgtcatactcatcagtgtctagagaaaaacactgataagaattacaatggtatccaaagctgacgttgagattgctataactcctgacaagcatgtcttcttcctcagaactgatgctgtgatcattggagctcttatcaaacagttcctcatccaccatctttttcaacagaagtataacaccgattgtagtgtatattgctgtcaaactatgctttgaaggtttaaatgctacttaaagcccatgccaaatacaggtccttttatacttaaatggaaacgcaaaccagacctgcaattttaacacaaagcattatttatataagtacggtctgagcatggttgaactgtagagaataaagacggcaaagcgttgccaaacaaagaaatatttcatcaaaatttatagtttctttagagtaccctataatggatatgagccatccattacttttgatctaatggatcagattcaattatacaggggtaaagttagaattggtcgaatgacttcctccataatgtattctagctttctagtccaacgtgatagagttgtgtacaggaggtgtaattgataggtatgtgaacaagattgcttctcgaatctttgatgaataacatggtttccgtcaactgcccctgagcataatactattagtccttagtttgactatccttccatccaaaatataagcagggaaggaatcgatgagacgccccagtagtttgacatttgcaactggtaatattatcccctaaatttttacatgactgcaacaacaattttagattaattatacaagactgtaccttgttaaatatagacggcatcattttatacatatcagaattttattttcataagctaccaaacatggcaggcacagtttgcaaagttcttgaaaaatgaggacacaacccacataacataaatttcaatgagatctactcttaaaattttcttgtctcccaccaccaaatcaatcaagaacttcatcaggaaacagaaactaaggaaccacatacggcaacagaactcgagcggagggattagagacagattaggccggtagcaacaacctgaagtaagaaggggttgcttctgttcaaggagtgatcccgcatacgacagggccaggcaggtcgatgaacttcaccacagcggctatgaccagtgttcccacagaaactaatcttcttggcgttcacctacacacaacaccccccgaacaacacagataagagaagaaagaagaaacagatagaagagaatcaacaagaaggaacatgcgcacagcgcagacgatacgattactcacagatgcatccatcaagttcagagcgatgggaatcgggccagttgacgcagcccctcctttccccccatccctgaaaaccccaaccccaaccagcgaaggaaaaaaaaacaagactaaatttttacccaaaaagctcccttctttctttagccgcccgccgacctgcgcagcgcacaacacggatcaacaagaagcagcacgcgaaatagggaagatcactagaacaggtcgcgcaccccctgcaacagaacgcaaaaaccagacgaaacctgagcgcgattcgcttacctaaaaaaaaacccggttcgttttttttctcttctcggttgcaaactgcagatatcagctcgcgggccaaagaacaaggaagagcagaagctgagaggcggaggaggaggaggaagtggcgggtagatgcagacgggacgggtgtggagtggagaatgggagaaattgagaggaaggtgtgggcttgcggggaatatatcgaggaggtggtggctcagctcagctggtctggtggaaaagagagagagagaagcaacagattcattctccctttccctcctcttttttctattttcgcggaccggataggcttagaatctaaccgcgtcgctcgctctccacatcggagtggtagttaaccatcgcagcgacacaggaggattggggcgcggcggcggcggatgaggagagatcgcgttctcctttttacttatttttttcactttaaccttggggtgaaaatttacgtgggtactcagttgataggtgggttcgctatattttaacttttaagggtatatatgtactttttttttgttattataggatccataatacaaactccaattgatatcataatataaattaaatatcataagagccgacacgtagattatcagttctgaaatataaaatatactaagaaagtaagaagtggtttttattgtaggtaggtttttgtgtagtattatcctatatggcaggttgagattactagtacgagtgtctctattgtacgtgccctaaagtagcttcctttttcagttttttccagtcataaaaaacacaccacgagttatgataaggaagatacatgactcattgatcaaaaatttgcttgagaagatcaggtcagatgacgagaagttgcaattgtgacacctaagtacctaactagaggtggaggaacgttatgtgttcaagcctcgatgggtgcatgacactaggaatagaacaaacataagctagattgatctatgatagattttctattggttcttatgtgcttttgccccctctggttaaataatactccatccgtactcgtaaaggaagtcgtttaggacagcgacacggtctccaaaacataaatttgacttcttttttctataaaaatatttattgaaaagtgatatatgtatacttttatgaaagtatttttcaagacaaatctattcgtataatttttatattttcaaactcacaactcgagagttattcatgatttatattcccaaggtttgacttaaacattatcctaaacgacttcctttatgagtacggagggagtagtacctaagcaagtgagttaggattcaaaactcaatttgtttggcatatgtgactagtcaccaggattcaccaaacaattttaggtggggttatcgctaccccaccgtaagacggttatcacggtaaccgtgcggttaccgtgagggttaacatggtttcaaaaacttgccccttgcctcttgctacacgtttttgcaaaccctgttagccacttgccccttccagtcgatgggggttgatggtgtcaccacgatcaataaccttaagattaacaaaaatgtattgttcatgttgagcttaaaccatctctaataaatttgtacctaaaaagtggtcgaaaacctaactttttgtagatttatgctaaaggtcaaacgcattaacactgtggatatgcgggggcctctatattgagctgatgtggtactatatgaatctagagcatttagaatagtccacttagtccactatggattattgaccaagcaattattcttattcatgtatgaggagatcgatataatacattcacatctctatctatttagtagaaatatagataaatatatttattattatttcttcatgtttaggatttaacacggtttccgaaatacattgaaatgtttagcgataaatattataataccatttttcacgtaggaaatatcaatatatattttggcatgtattaatatttaatagtactttaaggcctgctcggcccttctaaaaagttgcatccaattttaaattttgctacaatttagggtttatttattctagctttattttcacgattgctaagaaaaagacctataaaacaagactagctattcacgaaaattacatttaaaaaatgttctttttatgaaaaaagcagcaccaagcggtgcctactttcatagtatttgaggggagtagctcgcataaactgataaacatctctgtttcttaagttataccgcatggagtccatgttactgtcatcatgtagctattccacctgttccaatcggcagcaaccaactattgaaatgggactgtcctttctttgtttcgccccatgtaattaactacgagtctgtggccacagccgatcagccaatggcaccagtccgtgtcacaaaccttcgctttcttaaagggaaattataggataagcatcaatgcatggccgctgcagaatttagtatattggtgagatgtggcgagcagcagatgcgatgaactaaccggagtgagctcgaatcacgagaggcatcgaaaacgatccccacgaatatcagacggccatggcgatcgacagccacatatgctgatgttaggtagttctacagtactctcctatgatagttggccattcattattatatttgttttgggttgtttgtatggatcagaatagatgatcgctgacgaaaatgcagattgtttttggtactagtagcgtgctgacctcgtggtctctcatgccgtacgaactggagtagtactgtagaggattagcctgcagacttgcgggtgtcatctgtgatctatctactcaaacagcatgtgagccgtctgatataaaaaaaaaggagggaactgtgatgttagcacgagttcatatacatatagttctcccatgtactccctccgttccataatatagcaaaaaattgggtaggtgcaacaaatcctagtataataaatatgaacagaccatctgtacatattcattgtactaggatatatcacatccacccaaaatcctttatattatgggacggagagagtatatggtccctcggctatagcataagttcagtttttctagtttcaaatgtgaattgttgagactggaataaaatcacatcaacacattaatttttcaaaactggataaagtcaaaccttttgatggtgattcgtggtggttcgagttttttttttcatttcatcttgcttgttgaatcatcttgtaagatcgctgcaaagtaatttttgtaagcattactagctactccctccgtttcaaaatataaaggattttggacggatagaacactttttattactatgaatctggacatggagcacatctaaattcgtagtattataaagtatcatatccatccaaagtctcttatattttttgatggagggagtatgtgacaacactttcaccaaagtactccgaatctgtgataattgaaggggtgtattttgtcaactttttctcagcaaacagaaaacatttgaaatcactgtcctgtacagttatgacaaagctagagcatggtttgtttgtttgtttgtaatttctgcacaacagtcatgtccagaactagaacatggcataatataatgcaaataacgaaaattaggaataaataagtgatgaacgaaatgcataatagttacatccgattatcattcaataacatgatcaagaatatagaattatactactattaaatagtagtagaattcttatttgaccttattaattaagggcatacaattaaagtgctccagttcattttttatatatactaaattgatgatccattaaaagaattgaaaatgatgaatcatatatgtgtgagagggatagttttgtttggcaaagaaaactagcaaggtggtcgtgcagatcgtgtggctaacattttctcatataatggtaagtatgtttttttcacacgtaattgcgaaagaaaaaaaatattgcaagtggtaatatagttttgtgttctgccacaacttgagaaaacttttacatctgttactctgattagcagggtaattcctaatttcctatgcacacaaagtaaacatgatgactctgtttagtattttcttaacattataaaaacatgatggtatatttgcttctctcctttcctccatcttcctctcccattttatttctcaataaaagtaaatcatgtctcgagaaagaaaaatggaagaaaaaaagaaaaaaatgtctaaaattctaaaatgacttatatttagaaaagggtgaatagctaatttagtccctcaagttttaccgaagactcaatttgattcttcaggtttcattttgtccacataggtaatctaagtatttgttttggatcaaaatcatccttgggtccacttaatatgccatatggctatttctagtcaacaattctgttagaaaatatcccttttgcctttaatttgcatgcaacactagaaaaaagaaaaccaaaatgaataaacaacattgcatatatacttccaattatttcaacatgtgcacatgaaacttaagcctaatggctatcatatacacttgcaagtacataatttatttttgtttgacataaattgctatgaattatctataaaaagaattcattgcatgcaattttttctcttatatatgtgaatgagggggtataactgtcatttattttggttacgtgggttcaaggataaatttgaattaaaacaaaaacttgaagtactaatatggatagattgaaacattaagaactaaaccgattcttacatgaaatttagatgaccactttagctattcaccctttagaaaatatctctgaaggctaaatgttttcaaaatggagggagtattgttgagtgtttataggcagtgcatataatgttttatcattaggtgacgtggatagaattaagtactttaagacagctggagatagtcgtatttgtacttgtacatgtcctgagcaattcgtcgtgacacatgcatatacaaattaaatcgtgatcgtcaggttgacctagctgatcattacctacattgtgcatgcaactgtcacaaattattgatcaacaccaagtcataatttgaaagcgatccagggtgtggggcctgtggggggcttgaaggccattatgaattcaatcggccaataattcttggcgtcattagcaaaacaatttagcatttttcaatccttttttattacaagacttacaaatatactagatctgcataatgtctttttcatcgcgcctacgtcattgcaagaaattcaccgggcccaaactttgtagttgtattaaagtttgtttcaaattatactgtcagcttcagcatagctcatacatgtatttagaaaataaaggaaggatgggtggaattggcaacactaccaactcaaggattctatatcaaaagtttaaaaacacaaggattcctagttaatgctgaaggtttgtttggttataggggactgggataagatgtggcttataatatttagagtaaattacactttggtccaccttttattacctaagttttattttgaagtaccacccataaatctatcttttcaatttggaccaggtaaatttaccattgttgtggtttggactaccataaataacttttctcgtcatatctaacttccctttcggcaaacatatgaaccatacatagaggagttcgcccgtacactagcgttgatgtgtttaatgtcgttgattgtaccaaaaaaaatcgttcatggtggtccaaatcgcaacaatggcaaatttatccggttcaaagtgaaaagatatgtttaagggtggtccaaagtgaaacttaggtaataaaatatagctcaaagcataatacactctaatatttaattaaaccttggcataattacacattgcatatcgattagtatcagctagtaaggtgaaaagaaacatctcagtgttctccattaagggctaaaaattaccgagttaattaattggatcaaaagagagagatccgagtgtttaatagagtgtgctgaaattatatggtatagcctaatcgattggaaatgtatcagagttgtacggtaactataatacaacttgcttaattcagttataaatatttggcgcccacgacaaatttgtcaaacttgaaaattttgaccattaattttctgttaaatgagtttataaaatgtaaggtttatgatagcattcatcaaagctaatctatgcatatctcttttttttttcaaaaaagaactaatcatttcagaaatctatagtaaaatttgaagagtttaacaaagatctggttccagtcatcgaatattttaaccggagggagtacttccaaataggcacgcaagtgtggatgttaaaacaaatgagctgaacacagcatgcctatcctcaatgcaaaaccatgtcctgaacagcacccaagaaattttactgctactagattgagaattaatcttgctccccctcaaacaaccgcgcgtgatatatccacaaaacgcacaagagaatcaatatatctcgtcagatacaaaattacccgatatcacgatcacgatgatgtaaagatcactcctatcctaacaaaaagttataaatagcctatcgggaaaatatcttgtgaaaatgattgaagtgttaaaaactctagttttgtgtacatataaaatatattctcaccaaatctcaagtacgcacccaactttatttgagagaagcaaaaatgaaagatttcagatgaacagtgttaggttactattcacccaaaatttatagttgagtttgaacttgagattctattagaatatatttcttatctactcctatctctattaaactttttttatgaatttagagcaaaattattattcctgaatgaacaagttacacgagccgatgtatctacagacagaaacggcactgatctatagtgcagaattatatttgcattgcccgcggccgatacatcggcatcgacctcaccaatgcatcacggcacaaggacagtgcattgcacctgcccggccagttgctagtgcgcgcttgcagaaaaccctttaattttcatcctagattgcagtcgcgtttccttttctgatcgaagaggaatatatatatatatatatcgaataatttggctgcagccatattgacattgacagggacactagcctagctagatataggtttaacgaccgatatatacatatcgccgtcgctttcgcggcctagttagttaataattaattaatctctcgtatacagtatatgcgtacgtaggatgaaccttctcaattcgtgcgtatgcgttggatctgcatcgatcgatcggtgatgcattattgggtgacatatttaatggcatattaattttatatatgtgtacgtttgtatatagatataaaacaaaaatgaacacgaaagagagagggggggagaactggagaaccttgtgcggctgcgccgcggctacccgacttgccaaaggtcaacgaattctattttgcgtcgctcgcgaggaagaagacaaccgcggcggcgacgacgtcacagagagagagagagagagagagagagagagagagagagagagagagagagacggcaatcggagctgcagatttgattaattaaccagccggcgaattgaaatgagaagaatcaaaaattggggcggcacaaacaaaagatatgggacttgtggcccgtagaatccgtgtgaaatttgcaaggatctaagggcccctttgatttgtaggaaaaatgtaggaattttggaggatttcaatcctatggaaaaaaatcctatgaaggcctttgagacaaaggattgaatcctatccaatcctttaaaattcctatggaatgggtaatcctatgcacattttggaggaaagttagcaagaggtctaacctcttggaacatttcctctgagtctatctctctcatctgattcctgcgtttttcctgtggtccaatcaaacggctattcctgtatttttcctatgttttgcaatcctctgttttacaattgtattcatgttagaatcctgtgtttttcctattcctctgttttttcattcctacgattcaaaggggccctaaacggaggaatggtggtggggagctagggatcttgtggatctggacaacatgtgttgcacagcagtacacgttgtctgtacgaacttcacaggaatttcagtattgccgttcttttctttttatttatttttggaagctactctgatcatggtgctggtagggtgtttcttttctttcttttttggaggatggttgtgtttttttttccatgttgaacctaccgtcataatgtgtactgttacatggtactcactccgttctaaattaagtttgaacttatttttgggatagatgtagtatgtgagcttatcatttgaaatgtgtaatagaaaaaaaaacacacacacacaaattaaaggtactcctgtcgacgtttgatgtctcgactacggtatttggacagtatggggatcgttggtgctaggatatacgcgagactgaggtaaaagagatggagacgaagatttttatacaggttcgggcccctgagctgtcaggtaatagccctacatcctgttggccgaagccggtattgctcttattcatgataatcacaccagtacaatatgtggggtagcctatctaactgttgtcgacatggcggtctgacgatctgactcgtagtcgacaacagagtagccttcctcctcgaatccgtgcccggcgagatcagagatagcgctttcgtctctcctaacagtatccggagacaccgtagggtactagccgtgcttatccctgaagtcgacatccggcggcgtgtcttggcgtatgtaggcttctatgtcgattgtgttaggtgttgatcctccatggtgggtcttgtatttatacccataggtgtccccttatccaagtagaactagggaaaccaatatggatacaatccgagtagtccttgtcgtttccatgtagaactctggttgtctttccttatccggaactccctcgaggtcagtttccgtataagacatggtatgtggtggatcctaccgagatttagtcaactactattaggtatgtggtatccataaccctgacagtagcccccgacttcgatgcaaatgaacgaattcatattctcaaccgcagacttcggaggaactgttatcgagctcatgtgaccgttctcggtgagtttagagataacgttagacttcctttattagcctcgtgcgggcaccgaaagggtttgtctaagtcaatctctgatgtcgaccgagaaagtacagaacgtacgactaagtctcccgtcttgttgtaatcgagaatttggattgaagtcaagaaattttatctcggcgggtacaccatttcttcattccatattccttgtcgagatccagcaaccattcttgagcgatcgagaaggcgtagagtctgcgacggagccttgtcaacattggttgtactcgccttagtcgatcttggtgtagaaccatagagacatgtagtcttccacaatgtcgaatagaattttcctgaaatcaatactcagaaaagaatatcaaatataaagagcccccgagcgaatgctcaaagggtaacatgttataatatgtatggtaaattaaaaatgaattaaatttaccgaccaatgttttgtgtatgagcgtcttctctcttaccgacttcgatcagtcagtttgtagagtcatacactctccctagcccccagccttgtcgtcggagaatcgttctcggatgataaggctgttggacccttgacctgccttggttgaacaagcactgatcctagcccccagccatgaagttggaaagttaatttccgattacacggcttggttaatacgcacggcgagaactcttacatgaccagatcttacatggtctttcgtctctacaggatccgacaaggccttattggctctgggcgtccccagccgaagatcccttaggttcctcggaggccttgtcaagacggcgtaaagggacagtaggatatgtttcaacgctaggtgtcgttgtggtaagggatctctgggtaaaacacttgccgatattgtgtacctgctatcaactttgttgaagtagaggtagtaggagaaatcgctacaccgctggtcgaggaccaggcagtagtcgtaactcgaccacttgaagtggaaatagtgggagaaacgctacatcgctggtcgaggaccaggcagtagttgtaactcgaccacttgaagtggaagtagtgggagagacgctacatcgctggtcgaggactaggcagtagtcgtaactcgatcacttaaagtggaagtagtgggagagacgctacatcgctggtcgaggaccagacagtagtcgtaactcgaccacttaaagtggaagtagtgggacatcgctagtcgaggaccaggcagtagtcgtaactcgaccacttaaagtgaggcgagaaagatcactacgttttactggttcgagaaccaggagtaggagtctcttaatcacctataggggcgctaaagttggtttattacatgtgcatatcatgtggccagcatgactcatatacccaacttatagcatatccggatgtccgctcgcaatcatatcgggtgatcaagccgacggcgtttgcgaggaattatccgttaacaaccttttctcgagttgtccagtgatggccggtgctatgagataggtcgtcggtcttccttagtaggttgggtgcgataactccgcatttgtcgagaatgttctcgataatggagtgtactcgaccacaacctactcgagtgctcagttgttcctgaaaattattttctagaaggcaagacatatagcagaggatatcgagtatgtactcaaaaactgcatggatcttctagtatcatcaggatataacgagcaaatgtaaatgtcagggattatgtaaaccgtaagcaagcatgatttatacggaagaaaatagagcgagcccccagcattaaattgtagtcgatttaacatcggggacactcgcgcaacagatattgtataaaaaacatgctctaggtaaacgtaataaattatagatctgacaatattgtatagactggaaaaataggtacggtaaattgcatataaattattgcatacctgtgtagatatatgccggatatatctacggaattagtagatcaatttaaaaaatcaatccactaattacctgtgttaatgttgtgacgacctcgtgtggtcaaagcatatgcaacagcactgtacgtaccaatatatatgcacacgcgtacatgcatgtccgggtagacatgtatgtgtattgtatgcataggtgttaggctctgtacagggacatctgatacgcctcctgacgtcaggacgtcgaccggttggtgacgtggcaacgcacgagtgggcaggaaatttggccatagcttcctgttatctcgtctgtcgtcatggtcggttgcgatctgctgcttctacccaggataaccgagtctgatatgagtcaacaaagaccctgatatcggactcgatgccgtcgtcggcgaatatccactcgaggtagtcgatctggccgaggcttcatgatggataacatcaaaatgccgttctccgcgtcggtgacgtcttcaaagcttggtcgatctcgagagatcgaattattgatgacgatggttccgatctcgtcggaagatgtacttggataggttggatctccccacagccgaagtcgtcgagtagcttgttgtcggagagtccatctcttaaacccaactcgtcgaaatcctgaagcaccaaaatccccctacctggcgcgccactgtcgacgtttgatgtctcgactacagtatttggacagtatggggatcattggtgctaggatatacgcgagactgaggtaaaagagatggagacgaggatttttatacaggttcgggccgctgagctgtcaggtaatagccctacatcctattggccgaagccggtattgctcttattcatgataatcacaccagtacaatatgtggggtagcctatataactgttgtcgacatggcggtctgacgatctgactcgtagtcgacaacagggtagccttcctcctcgaatccgtgcccggcgagatcagagatagcgctttcgtctctcctaacagtatccggagacaccgtagggtactagcgtgcttatccctgaagtcgacatccggcggcgtgtcttggcgtatgtaggcttctatgtcgattgtgttaggtgttgatcctccatggtgggtcttgtatttatacccataggtgtccccttgtccaagtagaactagggaaaccaatatggatacaatccgagtagtccttgtcgttttcatgtagaactctggttatctttccttatccggaactccctcgaggtcagtttccgtataagacatggtatgtggtggatcctgccgagatttagtcaactactattaggtatatgtggtatccataaccctgacaactccctccattcaaaatataccgatcaaaatcacttatattttaagacggagggagtactataatagaccacctaatactacgaattaaaaaatgagagttttgctatgttttgagacggggtagtatggtttttcaatactacatgaattgaaaacaaaaaaaatctgaaagagatgttccttatttacacctcaaggaaaaatgaaccatatatcttatgaaattgatgataagaatgcaatcatgtgaaaattttctaccat

SEQ ID NO: 9211 - DNA, 84239 bp, Oryza sativa
  unsure (1)..(84239): unsure at all n locations
cagttgtttgttgtcttgtagttccgtgcactatcagaccagctatatcgatcacccgattatcacaagcatgttcgaaaggaaatagtgaagcaggtacagcagatcaccttctggaattaccggtctttagtttatattactgtgctcatatgtttaaactgcaatatctttatcagatgccgtaacacaatgaatctgtcattctctgctctagttattgcatttttttttctccaggtgatgaatgaagaaacaaaatttcatcaatatattgtagttatatgctgataaactcctgttagagatacatgcattcttacccatgctgtttttctacttgtctagctcaaggcatgtaactctttgtatgaaggttatgttccaatgaaatataaacattattgcaagaagatgaaaaagtatgtacttctgaggctgacctagcttcctcaattaaaacagttcctgaaccttttgccttctgtaatgatggcactgaaattttgcctattccagatctggtgaatggggcgaccatgtcacattgcaagctgctgctgataaggttagttattttctttgccatcatcctttttctcgtctaaattcttactcagctccctgcagtccaacaaaagttacagtaacatttgtacataattggtactatttgttgcattttactgttgtacagaactgaagatgtccgttcttttgtttataacaggatattcaaatataatgttaatcatttattgactgatcattctatgattatcactctctttgtacagcacttgacattttacatcgtgttcactaaaatttatactttggcaacttcaaactaccgccatagttttatgaacccttaaagaagcctaatgtttttccttcttttggcagtttgctgcaaaaatatgccttctaacatcattcagagacacatgttttgttgaaattgttccacagtatcaggcaccacagagaggtaaggttcaaatccttgtctctactagtaacaaaaactttatgcatatgtacatggagaatactaattacagtcagtgccattttgcataatgcagttttctagcttatatacccctgcatgtggatttgttgcacatatgcttatacacatcccctgattactgcaaacttactcattgcataactggaaacataactaaaaggataaaatcagcttgttgctaacccctgaagcttcgtgtttttcagaaatttggctaagtttctggtcggaagttcactataactcgctatatgatgctcgaggtgagaaaaaataaatatttctcatttcttatagtgcgctatcagatttggtgccttgtactgttatacatccctttccctaataagaggaaaatacccattactttgcagatctccctagcaaatacaagcctaggaagaagcactggttattgttttagtaaccacgcgggagctttgctttggacatggattttattgcttggccttttggcccctcctgatagttggagcttggaaccctgaagagtggaatcctctgtggttctcttccttgaagcgctgaatgggtttgccggatgcactcctcaccacagtacatacagcattagttatactataatactgagagaatttgagattgcttccttgtgaatatatacccatagggaaattactgacatccatgttgattgtaaaccatatttgttcattggtatattctgtatacattttataggctgctaggtctcttatcattttattcattccattttccccggacaattcatctgatttcaatttacatactgaatgtcttttgtcagtatctagtaattcaattcatacgccttgtattatgtgccgagtatatttttgaccgatccttatgcatggatgcaatgcaagattagtagttgaaccaactaaaccaaagcaatgaacagagccccggcattgaagtgagtaaggccctgtttgattcagcttaggattattataatctagattattagaaataagctgaaaaaaatagatagcttattatgatagattattataatctagtaatccactctaaatgtgcttattttagattattgggtggctaacagctaacaaacagcttataatccagagaaacaaatagctcacagcttattttatatcggtttattataattcactttacagtaatttggttcaataatctatattacaataatctcaaagagagcctaaatctctgtgagccttgtgtttagaatttgctttagggggagcttcgcaaatgtctattgaagtaggttgttgaatgatctgaacgatgctaaccgcacaactagactaaactgagatcgtgggctgtctgtagcacatcctaagttccaaacttgcaagtatttcgctctcaccctgttcgttttggtgaggaattattctggactcaaagttggtcgcttttcgtgcaagaaattctcactggtattgttgcttccccgatagcaacttgagatgaatatagccgggtcggaaaggaatcgagcatgggatcctgtttgggacgttttgatcctggtgatggtgtagcttgtgtgaggtaaaaaataataataataataataaactcgaagcacatctgcagttagtaatgctagccttttgtgagtgggaaagctagaaaaacttgcaagcatagcccatgggctatggcctatggcccatatcatatggctgcatgtcagcatccaaatcaagtcacaaatacaagccctcgcaatttgcaaagcatatgcatgcgtagctacccctttatatactacacacttgtaattaatcttgtacgcagtattatcatcccatatatatatatatgaatatatctacatcatacaataacgacataggacaaaacaaaaggaaaatgaaaaacagcgatcctactcatactctggtagtagcaccaaacaattccggtgtcaaagctaaagccaagcgcaccttgtcgtcaagacctcgacgaaaaaccaggcccatcatcccagagtcacgcacgcagatgcgcgcagtcacgtagtcagcaactccggccccggccaacggcagccaaaccactttaatttccattccaccgcacatacaggggatacagcacggtcgccctccccttcccccacgcgttcggctttcgcgcctctatcggcgtcttcggccggccggcacccaccacacgcaccgtcgtcacatgctgttttacatctctgcaggcaggacgaccactgcgcgcactgcgtcgcatggcagcgccatccgcgctccacgcgtggaaggcgaacgcgacagccgaagtggccacacacgcgcacacccctgatgatcacatctcagaccgtgcgtgtgtttctcggtcaaaacacgcggttcatcgtgcggatccgtggactccgggaggcagggagggagggtggccgccggcgagcgatcgatccgcgacttggcgtgccgggcgggtgggcgggtgttggtcaaagcgtaacacggtcatcagtcatcacgaaccaccactggtaaagcttggggtttggggggccaacgcaacctccgtgctgccgcatttgaggaacgacgagaagacgcacgtaatccagaagtagtggtacagtcatccagttgcttggtctcaacatgggcataacaattattggagcacaggatcggtattatttcagctaagagagttggatcttgtggtaattggagacttggagtatatgtactccaaggcaaatccaattgctttggatggtgtccactggaaatccagccggagggccgcgtcagaatcgccgtagtacgtcaattgagtttttaccgatcaggtttacccttccatgtatcacacatttaaacggaccaacacatccacatgttcttttttttttcttaccgtattttttttttaggaaactctagcggaaagaaaacaaaaactaagaaaaggtacagctaccgccgttcaagtgaccacgctgatggcatccccatcctgcaaacttgcaaagattctaattcgaatgtcaaatacaatccaaatcagcgttgccaacttgaacacggaagtgaccaaactatcttctcatctatatcttgttcatcaacccttttacaatctctcagacaagagcttaaagaacgaaacatgatggggtgtactgagtagcacgtgcacacgaaacagtactaaaatgctccacgagaaaattcattcttgactaacgcaatcatgcacggaaagatggacagatcaagacgaaacctaacgcaagtaacgtgaaacccagggatgccacagatgttcaaagctccgagtgtacagcgtgcataaaacgtcaaatagtcacttgatcagataagaatcgtcattctttttaattaaaaagaaacaattcctgctgattgaaggaccgcaggatcacacatcgctacatgaattggaacaaaaactttgaccaattttacaagacaatctttctaattatgcctttgatcaaggcattttcgatgttccatgcgcaaaaaatctcctgctgttcttgtacaggatcctcgcacaactcgacccctaatcgttagtgcgcctctacactccctttctgcactccaaagcaaagcagagttttgacccaaaccaatttatgttcagaataacttcgatggtggccgacacagccgaagcagatttctgaaacgccgcactttcgaccatcatgcgtggagctttgggttgcagcggccatcatcagctgctgtcatttctcatttgtatagcatctcgtctgactgtaactgtaactgtaaccccctttgttgtctctgttcatctcaagaacaacacctccatcacttcacagttcacaccacacctctgaagataattaatctgccagctgaaccgtgtaaccccggacaacggcgacaagtgaaccagtgcatttatacgccggtgccaaactgccaattatggacagggattgtgttcgtagaagtaggtccattttagactgccccccacttgctgccaaatcttttgaagcaacggtacctgcggcagatgagatcgatcggcaatcaaaccattcaatccaccgcaccgaacactgttgcttccaccgacaaaaactcgcgtggcccggagatcaccgatgcactgaaccgtggcatgaattttccatgtaacttgggacaggatgattgttgttagctttgcttgacgccggatggtcggtttcggtctcgccatagctgtggttcgtgtgacttcaggagaggaggacatggacggaggcgttcttggtggcggcgcagacggggcaagcgtcggcggcggcctcgcaggcgccgcacaggcacaggtggcggcacgggagcagcagcacggacgcctccgcgacacggcatgccttgcacgacgtcgccgtggagaccgcgacatcggcggcggcggcgggggtctcgaagcagcacgagtgggcgtcctcggcgtcgccttcccccgcggaggcggcggcggcggcggcggcgcagggggactggaggaggagctggtcgagcgtggcgcggaggccggcggcgacggcctcgtggctcttggcgacgcccatccacgcctgcccctccgcgctcacctggcggagcttctcctccagctccgcgttgcggcagcgcgcgcgctccagctcggcctccgccgcacgcaccctccccgtcgtggcgcgcgccgcggccgccaccagcgcccggacgtgccgccgctgcgcctcctccagccccgcgcgcatccgctcggcctgcacgaacatccaccaaacaccgacgccgatcaaacaccactcaccaaacacaaacaggggagtccacggttaacggagaagccttcttcccatacctcgagccgaacgagcgcgtcgatctccacgccatggtggtagagctgcgaaagaaggccctgcgagattccgcccgcaccgtccatcctcctcccgctggtggacgccgcgccggcgcacgccgccctgcccgccacatccccgaagggcaagatcccctgcagcggcgccgccatcgcgtgcgccaggaccgcgcgctggtcctccaacagacccgccgccacgcgcggccgcttcctctccacgaacccgtactcgccgttgtcgccgccgaacaccaccgcgcccccgatcccttccaccgccgccatgggcggcgcgcactcgccggcgagctcgtccaggaacagggcgccgccgctcgccgccgcgtggaggtcgtaagggaaagcctgggcgaggcgctgcgcctgcacggccatggccagcgacacgatgcgtgagcgcgagctttccttgatgagatgagagggcggagaaggcaaggaatggcgcgcgcgagttgggtgagaagcagtggagtcagtggaagggatgcgtggaaacgaatggcgaacggcggcgagcgttttatatgtacccgctcctacggttggggaagcagtggctcactggcctgtgaagagaggcgttgtgggtaagacacgtattacacgctcctgggaaggacaaagccacaaaaggcgtgacaaaaattcaatatgtgaaaatactagtactacggtaaggactactccctccgtcccacgataaaagggattttaagtttttatttgtactttttgatcgcttgtcttgtttaaaaaaaattaaaattattgtttttttacttgctttattatccaaagtaatttaagcacaacttttcgttttttatatttacacaaatttttttgaataagacgagtggttaagtagtgcaaacaaaaactaaaaatcccttatattatgggacggagggagtaacttggtataaaaccacggtagtacaaactaaaaaaaaacctattttattaaattctaatgaaattattttttactttacctacttccaatatgattattagctgatttcacaatctccaatgcaatgattactaaaagatgaatttattttgagacaaataaaggcatgtaaagactattgtttcaggcttgttttgacacggtttcaaatgcaaattttttttgaaagggatatttctaactttacaaatttgtaaatctagatatgtgattacattaatagtatctgaatgatttttttttattttgaaagaaatataaaattttcgagcactttaatttaatttacaaagtatttatccgatttaggatatgtgtgttggaagagtgtgtactggtggttatatacttatgtacgtgtggcgtttgtcttgtgtaatgaaaacgtctcaggaaaaagaaatagtgtatcctgcctgttatcttggtataatacgccttacctactagcagtatgtgtgttcttttttttcttttgagatccagtacatatgtacgtgttcttgttagccgatcagagtacgctcggtaggaaacaggtgagcggtgaaaatgccgctttctccctggaagtccatggcatagcgcccgccccagacactttctaggcgcgcgaggtcgacgcgatcgaagcgcttcattcaaccggcagcgccgtaagccacggagatgcgcagtttaaggacttgtttgtttggagagctactagctattataacttctctcggaatctgaagctccctaaacagcctatcttttgattcagattttgagaagttatagttttagattttagaaaataacttctctggattctgaaactaaggcctacgctgcgcagcactgtgcagcgtcttcccagcccccacacctcacggctcgcaaattaatcaacggaatcatggccagggaggagtggaccgtggaattcaatggatgggcacgttgcgtttgcattataaccggatctagcgttgtctgatgagcgatctcttaactcgtcgtgaccccggaaatatttagtggttaaccacatctctgtgctgcccgtgccaatacagctttttgattaattacctttggcggattgggtttactactagttcaggcgcgtgcatacctcattacagtagtaccttgccccccttgtctcccacatgtaggtctgacggttgacggatccgtcgaagatctagctagcacatctccagatctagaactacaagaacggtgatcgattaatttccgtaacagagctgaactagcagcatatatagtactcctatacgtaccccgagcaagcagccgtacgtacagttgcagtgcaaaacgatccaaagacaatctgcccaccgtgacagcagcagcagcggcagctatacgtacgtacatcgcacgtacagcgcgcgctgcggcgtacgcagtccgtgcttgtcttggcaccgatgaagcttagcgagatactccgatccaccacgcacgtacactgcaccgcgcgcgcaggctgcagcttgttgttgtacgtcgtcgccacgcgcgccattatattgatggctcgcaccgaccgaccgaccggccggcacggccctgaccgtcgagccggccgccggggaggactggctggtggaccgcgcgcccgcgcgagctgcagctgctgtacccaactagctactacccatgcatgcaattgcatggggacacgcattaagattcgagcagccgtgcacgcgagccgcgtgatcaccctgcctgcaccctgatatactgctgcctctgggcctgcctgcctggccgtgcacacagctgcatgcaaaaacacacagtatatgtcagccgtgctccagtaggcgttagcgttacattacgtacgtaatccatgacattgtcaatatgctaatgcggtaatgccgtattactgtcatctgctaactgcgatgcatcatgcgctgtggcgctaccacgtagtagtacggtgtacgtgcagcgcgagtacgtcagcgcctacgtctccggggggagtcgatcggcgaccgactgatcgatctgatcgcgcgcccgcccgtaatgaattcgatcacacggtcggtggccccgccggcctgggaaagctaccgcaaattaaagcccgcccacatccgatccccctttcgtacatactccctccgtattttaacgtatgacaccattgatttttcgatcaacgtttgatcattcgttttatttaaaatttttgtacaaatatgaaagtatttatatcatgcttaaagaacatttaacatttgatgatgaatcacaataaaataaatgataattgtataattttttttgaataaaacgaacagtcaaacgttagataaaaaattaacggcgtcatacattaaaatatgaaggtagtaatacttatacctgcggctgtccaccagaacacacggactaaccgatcaatataagcatgcacacgcatcatggatggatatatggattggtgtactgcgtgccccgtcgtgcatgcattactgcgtacgcgtacgttcctagtagtcgatcgtagcgcgcaaagcatggccagatctgcgagtctaatggcaacacgcatgcacggccgtcggggtagagagctatagtatagtagctagcttacataagctatagccccatgaccacatcacagtaaacgtaccacatacttccagtgaacagtgtcacatgccgtgtggagtcacgtatatatgcgcccgcgtcgtgcacagctagcttaacagccgcatatatatacatgacacatctatatggcagctgcattgcacagtttcagcctttcaggaccatggctcgtgctgtgttggtccggacggctgtatcatgcatgcgcgcagtaagcagggtccctgaacctgaacgtacgtacggatagcgctgctgccctatcgactgcacgcatcggcgcgcgcgtgtgggcatatgcatccagcgctttctctgtttacgctgctgaattttttatgtttcgaccctttcttaaaacttattttacaaataaaccctttctctaaaaacttattctaaaaatggtccatttctcaatgacaataacccttgacaccaaggtctaaaaccaaaaatattggtgccaacaccattacccccctagcagccgaggacagatttgtaatatatttttttgagaaggaccattatgtaattaccttttcttataaatagatcctcagcatcatggaggctagcattgaggtctatttgtaagaaaatattttagtttttaatcatttttgaaaaagaatataaataggtcctcggtattagtttccttggctcgacccacttcatatgagcgacttaggtaatagggagtgacgagggtgtcgacgccaattaatggctttgatgtcgagaaagattgttaatttctaaaacaagtttttcaggggattatcataaaataagtttttcttataaaaaaaatccaggttttcctgtttggctcgtcgtagccagcgctagatggtccaagctcgccagtcgtgagctctgtttctgtgagctagcgctagggcacggcgccgtgccagtccatgctgtgtacgtacatggaataaccgtacatattgacatatcgatactcctacattgcgtgatgaacggtcgtattcaaaaaatctactgctccctacatttcaaaatgcttaaaaaagttgactttttagtaaatatttgaccgttcgtcttattaaaaaaatttgtgaaatatgtaaaactatatgtgtatatgaaagtatatttaaaaataaatcaaatgatatgaaaaaaaataaataattacttaatttttttaaataagacgaatggtcaaatacgtactaaaaagtcaacggtgttaaatattttgaaacggggagagtgctattattattggatatgctccgagcagtgcctagttaaccaaacaatatacttggtaaaccgagcacacgaattttacattattttttaaactgtagcaatgcatcatagagcaaagtgaatagtagtgcctcagtcattaatagtatttgacgttgggagtataagcttaatgacgggagataatattcggctagttaaacaaaaattgcatccattggctattttttaaaaaattaagatacatagtttatctcatttgtgttatacgcttttcaaactcgtaagtatatataggttgttttaaaatacaagatacattcattttaagtttaaaaaattaaaaacaaatttaattaattatgcgatgtgacatcccttcaaaatctctaatactatgggaccggggagttgcaattttctcattttatgtttccgtatttaatcttcattttaagtgaactcacacaggcctggaacatgatgcaattaacgacaggttttttttttttttttgcctcgttagacttgagcatggactagcaaaagggctcacggatcacggactcaggttgcttgacatcacaaccccaggaggaggttggcagccaggtcctctctcttttctctctcaaccttttcggttgccatcagatcatccgtacttcccccccacaggcacaggcacactgcaaatgcctgcccccctgcagacgacgtaccagtaccactgtggcactgtcccatattattgcaatcgatgccaacgcccaagtcgaaggcatggcatcacattggcatatgcacccccccctactccaccatgcaactctcgtctctcaaggcgcggaatggccgggccaaggaggagagctggcagatcagatccacgcatggtgcatgcacttctgcttcgccctgtcgtttggtgagagtagtaaagagaaagatacgctttcacttttctgtgatgaggagaagggggagggggctcatcagggcccaggtttgtagggggggaggaggaggaacagtctgcgtgatggcagacgaccagatactatcgctgcttgctgctgttgctgccgctgctttgctgttgcccggactgatgatgcgtggtttgtttcagatggcttgttgcgaggagtaaccaacagtggccgtttggggagacgggaaaggtttgtaaaaaaggctgtgcgctacgcctgctgctacaggccgaatttttagccagtaggagcggtgcggcgggcacaggcatgcgatcgatgcgatgcacaggaggagcagcagcgcatggttcgtcctgctctgttccaactgcgacatgcgtagtgcagtgataggactaggagtattacatactgtgtgtactcttctcagtattttttaatactagtacagagaaaaaaaccttgctctagggatctttgcgctggtaaactccaaagaaaagtcacaaaatactccatacggaccgggaatcccaggtacgccgtacgcgcacacgacggtctgcacatttcataaagtggagtgagtgcacatttcataaaaatacagctactagtagctaacagtgcttaattgtttcatgacaaaagctatacacgaagccggtcgcggaccacagcatcacgtcctgacagcgaacctcgtttcctagtaaatcaatacactattaacttatcggcagcgggacatctgcaacctgtggtcctccagtgcttggagtggcatctagctaccgggacctgcgttgcacgtttcctggcgcgccatgaaccatgccggccacaccaaacacgcacggatggatatataaacaactggggccgcacacacacgctctgtctctgtctctctctctgtctctctctctctaatttcttgcacgatagtataaaaacggacggtaacttgtgggggccatgtgagcatgcgacgggctgaatcagcgctgcatcaaagacgacgacgacgacaacaacgtcaagggggggcacggcgagcgacgacagctagcctagcagcactaccggataatggagttggaatctgggcgccggccggcacaggcaggcaggcaggcgtgcgtctccggtcatcacccgtagtgatggatggagtagatgatggtcagggtcaaaagccgcattgagatcgagagacagatgcacgcttgctcatgcacgggcacgataaaatcataagaacccccgctccgctgatgagtgttaggctagctgcacggcctgccgccccccacgcagtgcgcgtccaccagcgcgcgcgtcaggaaagccaccatgtagtagtatgggtttggtggcgtgtgcgccgtgccgtgcgctgcgcggtggggcgtcgagccccgcgcgcgcgcgcgcgctcgcggccacacgccgcgggtgccagccttttcggtggcgcaggcagctaccaccccgtgatcatccacgatcaaaattgttcactcaccctcacccgtgccgttccacaaatagtagtgctccggtatccgtatattcacaattacaccttgttcgattaattctcttgagagaaggattggatgggatttatttcacacatcaatcctctcaatccctccaaaccgaacaagcccttacagtgaaatctgcttcggattttacataatccggactatttagaccggatcaaaacacaaaccccaaatttcaatctaatctagggttcttcagttgtatctgtagcgcctagttaaaaaccactcgaattttcaagttaaatttttaaaaatcaaactaaattttaatttttaacaaaatttatccaaaattcattggttttattggtttacaacagatcccgtggaatccgatgaaaccactcatgagcggattctaatccaacatagggattgtgaatactatgtatagtccagttattcagtattactccaatattggctactctctttatctcaaaataagctaatttttcatgcatctcacacatatctctactgttacaaaaagagatgtgcttctatacttttttaaaaaaagttgcacgaaaatcaaagcacatcagtggctgagattaagagggattaatactctattcctcattagcgaggggtattttcgtccatggaattttgagccccgtccaactctgcagcaataccaagggcctgtttggtacagctcaaactcctaaatataacttcaggagctaagtctggagtggagttgtggagctgcctaaacctagctccacaactctagtacattttgtgagagagctccacctaactccactcctagttctggtggagctgaaactgtttggctgagctccagctccaggaggggtggagctggagctggagctgtgccaaacaggccccgaattaccaatggcgacgccgattcctccacgaccacgaccacgaccatgaccgctagtctgggatgctctctccttgggtagcgccgctcctcagcctcgcaagcaccgcccgcgcttcccttgcctcgccgcctcccctccctcttcctcccctcgcagcccggccggcttcctcttgcaaacagcgccgccgctctgccctcttcttcctctcatcacgcggtgcagcacgacgctccatgcattttgtccatctcacaactagccagtactcataaacaagtacagtatatatctacatgcatgtctcccccgttcattaatttacacagctcaccaccatcacaagtcacatcaaacttgctgttgcagctactttggttcaattgattggagacagaaaaaggattattttgtgttatttcttctgtttaaactttggttcaatcgaattgcgacttggccttaaatgagtggtagatcatggcaccggatcgagaagctgctgcagctgtcgttggggtggcctgactactgccgtcacggtggtgtgctcgatgtggcggtggtggccttcacgttgctatatatatagtccacgtgctcgaggctgatcttgttgagcatggcggcgacgatcttcattgtggcccggggcagcatattattcactggagctcccgctagctcatcgtgttgcgagcgaactgccgactcaaatcaccacgaatcgatcaatccatcgatgggatctaattagggtgttctagcggggtagggaggggaagcgcgcgggtggcgcttacgctgcagaggaaaccagcgggtagcaacgctgcctgacgaggagacaacgatatcgtcgtgggctggaatttctatggacgaagacgaaagtacccctcactaatgaggattagactgttaacccacttttaatctcagccacttatgtgctttgattttcgtgcaatttttttttaagaagtatagaagcacatctcttataaaaattgaagatatttttattaatactttggtacatcattcgtgtatgaatcggtttttaagttcgtttgatttaaaaatacatatttgtatttaagtcgggttttaaattcgtttgcttttggaaatacggaaagagttgtataagatactagtatctctttaaaaatatcgcatgctaacttgattgagatgatcggactcctaattgcagctcatgattttttagaaaaaatatatatccaagcgaatttctacagtgaatatcatcttaactcaacctaccatataacaataataacattaaaataacattcacccgttgtaacgcacgggcatttttttcctagtcaatacaaagctaaaagactaaaacaatcgtactttatcaaatcgcacaataattatttctttcatttatctctgacttttaaaaaatctgattaaatgattgctaaagaaaatagatttatatgaaaaacaaacgggaaacgaaaaaaataatcttattctcaaatggaggaagtatgcagcagcgagctaggtgacaggtaaactgtagacttaatagtggaatactaacacttatcggtatagttaagtaaaagggacataatgaaaagatttggcccgggaggcccgaattgcccataagggccttgaagtggtcattgcaacgatcgacttgattctctctcaatctctgttcatgcgatcaattcgatggttgctgcaaaccgattaggattgactatcatgataacgatgcgatcgcctctctctaatttgaataattcggtggacaacttggatgagacgtcaagtcactaatcctcatctcatcactcgataagatgatttgttgtagtcaatcgatcgtgatgactactatcggctagctactccctccaaactcaaccgtacctctcggtcgacgcaagtgtcggtcgtgtccatgtcacaaagtaattactcccctccgtcccaaaataagtgcagtcttgcacatattcatgtttaacgtttgaccgtccatcttatttgaaaaatttttatgattagtatttttattgctattagatgataaaacatgaataatactttatgtgtgactaaatgtttttaattttttcacaaatttttcaaataaaacggacggtcaaacgttgaacgtgaatagtgcaaaactgcacttattttgggatggagttagtaagcaacttggctgccaggttttttgtatgcactttgtcaggcctatattattgttcagagtcatacgaagtacaaaacaatgagagctcctcccatcgatgtcatctactgatcgacaaagacggatgcgatgccagtgccgtgtctcaacctccgtggtttctttgtcactttcgcgctatacttatgtcctggcctacggattgatgattaagatgtagctttaagtacccacgtccagtgtatagggtgaaactgaccattatttgtgtagtgtatttatttttaaagaaaatgttgtgtaattattagtctaacataacattcagacaacgaaagttacctgagcatacaaacacttgagagtgccccaaatgcatatataatgtctccttttttgcggggaatgtataatgtccttaactatgtgcgtatttatagtgtgctatacagacaaggtgaaaatttgcgtaggactttacattatcatgaccgtcatatgaatacagagtgagcgtgtcacacagattatgctgacaataataaaaaaattgtgcgtgacaagataatgatttaaccatggcttatgtagattgatttgagagaaacgcccatagaaaatattctcctcaattgaattaacctatcctttactagacaggggacttacgtgttgattggatatagagacacctgtggcagatccataagtctctatctgtatggccaaatcaataattcaagtcgcacactcccataatccaccttcttttctttcgtaaaattaattttaactatttgtattatttgtatcacaatagttcggagttgaagagaagtatctaaatgacatatcttattttagaataacccatatttatagcaataaaataccacaacctacctatatgatataacgatacactcagagccgtatagatgcaaactacaactaaactatgttattttcgtcatgtatatctcgatatacctcaagttgggcaactcgtagggattttctaattttataaaattaaagcactcatgctcatgctccggggcctccccctgccacgttgccatcacgttaagcagaaaaaggacggcattaatcaccagtatacagtatcaagacgcgaataatcacagacggaaaagtatacttccacatcaacatggggagatatatatatatatatatatatatatatatatatatatgacaggtactcgatcccctaacgctactaatgaaatcaatgaatatatagctcgtcgttccaccacctttgattgcatatcaaccatgttgacgtgtgatcgacaagctccgacaggcacacgaatggaccaccttttgcacgtccacccgggattggacgcgttccggtttctctgcaccgcacacggtggattttgcgtggttttcgcagctttccatcgtgtgtttaaagactttgggagcacgcaccaagtcattagctggagtactcctctagctcggtcatctcgatcaaaggctgaagggtgacgtgcctagtcaatcacacttaatcaagtcattcacacctacggataaatgcatgcttatgtgtcttattactagtactatagtagctttttggtttggttgataagagaggtttagtaggtgtagctgagttgtagtttgtcagacccgtcaacattagtatgcgggaagggatcgattggtgaaagtgaaaacagtataattgtcgtatcgttttcgggcttaactggctgctagtgcaagtcgctgtatttcgtttttattgtggtagctgtcataattgtagctgaaagggcttgttgatcaataaaaaaaggtgtacataggcatgccacgggtattttttccattgtgcttccttttcttgcggtcatagtgttgcgaattcaacaatgactgtgaaatgtattgccgtatcgtgatattataaggtgtacaaatgcaagaaagagaatgatggtgaaagtaaaaaaaaatcattcttttaggaggacaggaaacatgtaaatcatgtccacatgttttgtagaatagttcacccaatagcggaatatatattttaaaagagcattatttcatttttttttgtctagaaacctatcttgtaaagaaagtgaaacgcgacaaggatttgatcaaatttgaggtgtctcgggatttgttactcatccatataatatatcaaactaaaacatgaagttgcgaatcgtagagcacaagagcaccacaataaggaacgacgaatccttaaattttctatatatattttttaatgaaaatttgagtaattgttataatgaacctttttagtatatttttaactagcatggtggcccgcgcagattgcgcggctagcatcattatattttctctcatataatagtatatatgttttctcattatattattcaaatatattaaaatgacaacataattttaaattttgcaataactttacaaaactactaatgtgtaatattcatattatattttatatatgtgttagttattaattatttttaatattaaattttagttatttgtaaattatatatattcctatatggactctagactcgtcttttaatatttttttaattccgaaatttctgtaaattgtatttctatatagactctatgctcttcttccaatattatttatttttatttctgaatttttattatttctaattgtatttctatgtggactctaaattcatcttttaatattctttaatttttaatttcgaatttcagttacttctaaattgtattctatattgaccttaaactcttcttcacatgtttttcttaatttcgaattttagttatttgtaaattgtatttttatacggactctaaactctacttttaattttattatgtttattctaaattttagttaattttaaattcctgtatggactctatactctacttctaatattccttatttttaattttaaatttatattatttcctaattgtatttctatatggactctatactctacttctaatatttcatatttttaattctaaatttcagttatttcctaattgtatttcaatatggactctatactctatttctaatattcattatttttaatttcgaatttcagttatttcctaattgtatttctatatggactctatactctacttctaatattccttatttttaatttcgattttcagttatttcataattgtatttctatattaactctatactcgacttctaatattccttatttttaattccgaatttcaactatttcctaattgtatttctatatggactctagtcttctcttctaatattccttattttttaattccgaatttcagttatttcttaattgtatttctatatggactctagtctcctcttctaatattccttattttttaattccgaattttaactatttctaaattgtatttctatatggactctagtctcctcttctaatatttcttatttttttaatttcgaatttcagctatttcctaattgtatttctatatggactctgctttttctttttctccgattaatgtgagaatttctagaccatgagagcgaacgtggaggctcctttttctatttctttaataatataatagattgttagattcaaccttgtcctacttttcagttaaagtaaacatcctgaaaaaatttagtttggttaaccatcgtaagatgaaggtattcgaatttaattttaagttttaagacattcacttctcaatcaatcacaatctcttcacatttaattctacctactctaaaacttattttttagatggaggtagtacatttcataaccgaaagcatgaaaacagtctacccaaaatttattcaaccttgaactatcaagacctttttatttaaactttaccttgtacaatattaaacttctggacaacatggttttctttgtaacggtttttacaacctgcacaatatagagcctgtttggaggggtagccagcttctgagaatctggaaaagctgggtttctagcttctgacttctaagtcattttctgtattatacaactacagtttcctagaatttgaatcaaaagatagattgtttggtggagcttctaattctagaaaaagttgcagcagctagaaactcctataaacagacccgtagtactaacgatttggtacacattacatgtggccctaacagttttttctccaaaagaacttttggccaagcccgcatcttgttcgtggcccccacatggctcccatctcccggtactgatcccagaactgaacacggacaccaccaccaccaccaccaccaccacaccggtcgcttggaccacagcaccacaccacacgacacgtcttggcaccacgcatcgccatcacctccctcccctgatccccccccccccctcccccctcttctcatgtgcgtcgcggccgttgcatcatgggataggaatgatacgatcggccgcgcgcgcgcccagcgaacgccgagaaaaaggcgagcggaaacgacgaaagctacacgtacgcgatgctgccagagcttggctgaggcggacagaatcggccacactgtgcgtgtgaacggtatcgtcgggggcgacggacggaagcggcagcggtcgtcgcgtcgcgccgtgccgtgatctgacgcgcgcgagcgagcaccggctgttggggggggggggggggggggcccctttagctttcgcggcgacggggacggacgggggcaaattgaaaaccatttgtggcttttgcgtctcgcgtacgtgtttctgtgaagcgtgggaactactaaccattgtggcatcatgggcgtccacgggccgcagcgcgcggcagcgacgtgagccgatcgatcgaccgcgagcgcgaggctttgtactcttgccactgtggtgtggtccgccactccgccgtatggagaatagtaacatttgatctgttagttttcaatagggtgatgtatttcattttgttttcgcaaaaggaaaaagaaattgtttttcactagcttgtttcttctcgacaagtgtggaaagtatctatgtctcgatgtgcaacccaacattgtgaaaatgtttctttttctagataactattcaaatcgtaaaataggttattattactgctgtttttttattattactactattattattatacttatcgtgccaagatagatatgccaaactttataatttctggccaagattaaaatttatgttgtcacaactctaccggtggaaatatgatacacgagttttatatcactcccggttcaatatttaaaatattacaccgtacaaatcaacgcgggaaaaaaatctacaggttagtttagtttagaaaaacttgaaaagtagcatttcacggttattaaggggtgtttagattcaggggtgtaaagttttgacgtgtcatatcggatattatataggatgccgtatagggtgtttaggcactaataaaaaaataattatagaatctgtcagtaaaccgcgagacaaatttattaagcctaattaatccatcattagcaaatgtttactgtagcatcacattgtcaaatcatggagcaattaggtttaaaagattcgtctcacaaattagtcgtaatctgtgtaattagctatattttagcctatatttaatactttatttaggtgtttaaacgtttgatgtgacagcgtgtaaaatttcaaggcgggatttaaacagaccctaaatttgtatttttggctttttaggctatttgggtcgaagctggcttgcttggtcgggctaggctgctctttaacgggcctagtgcctctactccgtcccaaataagcacagttttacaccgttcatatcaaacgtttgactgatcgtcttatttgaaaattttttacgattgatattttaattgttattagatgataaaatatgaatagtaatttgtgtatgactaattatttttattttttttaaataagatgaacggtcaaacattaaacacgaatatcacagctatacttattttagtacggtggtactgctaaccttcattcattcttcgccgggaaactgttcgttcattaattcacgatcttcagttgcggacgatgttctacagccttgtggctttccatcaccaaggtgaaaatggactgttgttttctctgtataatactgttggtttttgttttgtcagagtgctcaatcaaattgaggtactgtacgtagtactatactccactcctccgtccgtggagtagtcagctgggctcatgcagctgtgcgtactgccacgtactgacgacgctgtcgacgtgtctggcccggtcgttggatcgctggcacggacgcacgcaattatctgccctgcaacgggcaccggtgtagtactactacctgccgtgtggaccagaaattaacaacgatttcgatgccgtctcagctagtatgcggatctggcaccgcagcagccgcagcagcagcaagcggcgccccaacgcgacaaaaacaaacaagctagctgcgcgtcacatgtgccgctgctatctaatccgtgccgacaccatcatggaattaatgccccggcagttccctgctcaatccatggatggatgcgcgtggcccgaatcgctcccgcgaactggaaactgttttaatcattcaatcactcgaatagatgtttatccgagtaattagaatccatttcccctacatctacgtactccctccgtcttactacccgttccaaaatacttgttacttttaagttttttttatcattcatcttattaaaaaatatataattattatttattctatttgtaacttgctttattataaaaacactttatgtatgacttatattttatatttgcactaatttttcaaataaaacgaatggtcaaacgttgcgaaaaaaaaagtcaaagcgacaactaatttgagacaaacgtagttttaaaatataagggattttagatgaataggagtatgaatagggattttaaaataccaaaaatctaaacagactctaaaatactattattaagatatgtcatatcctttaaaatactccatacgtacttacgtagtattaagctattatggaacatggggagtactacgtacgtatgatgttgcatcgccgattccggggaccatatgcacgcgtgtatgcgaagtcactcccgtttacccgtgcgtgcacagggcaattgaatggtactcctatcttttggagaggggaaaagaaagggacgcttgatgaatgcactatgcaaccgtcgacttgaaattgttgcttttgaggccatctcacgcattacgtcgcatctggcctgcaggccgtgatgatggaccgagcgtacgtaccgacgctgcgatcgacgcacgcgtgcacgtacatttcatcaacacagccggaagtcccccgagcgaaatttccggcgaggcacacgtgagcaagctagctagatcccgcaccggccggccgacgggagcgtacgtgcaaaacagtgccgttttatgagatcgcggcacgcagcagcgtcacgggtgtacgtacgacgccttctcacatcgataaataaacttaacctccgtgtcctttcgagctagccgtatatctcatgatgggaattgtcagggtcgatccatttatccactgaacctatccgtaaatttgttctaacggatttatagggtcgctctaaaaatataaatggatcaaacggatcaaaccattagaacctaaggttcaagagattcgatccaaaatgacttcacatgtataaatgttataaaaatttatacaaagttgcttcgctatataataattcattcctacaaaattcaactaaatttaacaagtttttatagtgtgaacgcgagtttaaaaattttggatccgagttttacatgtaactagaatttttgggtcttagcaacgcatcgtgggccccacatgtatgaagggctcaaaatttacacaaagttgcttctctgtgcaataaattattccaccaaaattcgactgaattcgataagtttttatagtgtgaacgcgagtttaaaaattttgggtccgagttttacacacatataactagaatttttgggtcctagtaatgcatcgtgggccccacttgtataaagggctcaaattttatacaaagttgcttctctgtgcaataaattatcccaccaaaattcaactgaattcgataagtttttaaagtgtgaacgcgagtttaaaaattttaggtccgagttttacccaaatgtaataagagtagccgatccatttggatatccatagataacctattgatataatggactcatggtggaccgaccctattaaaccatggatcaacgaactcacttaaaacggtttaggttcaatccatatcctaaccattcccatcctgatgtatatctacataggagtatactgtggtgttcttttcttctaaaaatgaagattaagtttttttagcaaaacgatgtgatattaacgtttgattgattgggttttaattattaaaacttgaaaaatatattaagatgatattttagagcaactttcatataaaatattttcgcacgaaacgtaccgtttagccgtgtgaaggcacaaataatcttaatctacatcttggaaaaaataacgcgacctacgactccacggagcaacgaacgtttgcattcagggatagttcgatttgaccacactttgctagctgttgctgcgcttcgtcgacatcatgcatggacaatacgagcatagtgcacgtacgagagtacgggcatcgtcgcatcatgtgtgtaccagggccgcattgaatgtcacgcaatcacgagatcagatcgatggcccgtactgtacccggtgactgcatgccgccgtgtgataaggtttccaaagttgaagggacatgacggctatgacataaatatagtaattactccctccactccatttcataatataagtcacaacctctttttacatatttcataatataagtcatgcatgcatgtggacaattaactattacccattctccattaaattattactttttttaaatactctactctcatgttctctaattctattggatgcatgtattgtatttattaggatgattcaaattataagatgataataattttttcttagtctttggattaaggtggttataccttatattttggaattgagggagtaattaattgggactgtgttttggagctactcctagccaccattccaggtcaaaagtccaatgatatatggcctacatttcccgcatctatggtgcatataggacggataaatgacgcgcatacgacgagtatgataatcggtgctactactcctaatttatgtggttaaattacgagaaatgctatatgatggtatttcattcggatgtataggatgatactatctggtaggtatgctgatattccgttcgaacgtacgggtaatgcctctgagatatcgtttgatagtcatctaatttattatcccgtccaaacaggatatcgtcgtgtaacattttcctaaattattcatgacaatatagtgtccgggtgtactgttgatggttgaaagcttgaggctaggagtgtctctaccctcttgcgagagggacaactaatctttttatgatttttaaggattgtcgagagatgaatgcagtgcttgaagcaaaagccagaacgaatttatgcttgtttcttaattaatttaaacaagtgatctggatgctgatccaactcagaatttacaattcatctctgtttatgcatccatagttgttctagctagtagtggcatctcgtatatgccaatattgaatatcacacgatagctggtcaaaacatggattggaatttattttataaacatataggagtaatataaacaagcatgccgttggtttgtcatagtactgtccaaatattgtactacacagtacaaatttaagacacctgctaaagggaatcaatcatttcatccattcaacactgtcaccagatctgagatctcttctttcgcatggcacctcaatgcaaatcaaaatcaatatccttgtctccatatggtggcaggagaacaggtatagcttgtgtactcagccttcctcttttgtccaggcttaattcaatcattatatgtacatatctttgtccacactattttccaatgaatgaatgaaacgatccaaacaaattaattgacccaacaattcatgtcagtgtcactgaccatcttagctagcaggaccgtgcgttttgctatgcgcctatgccatgatataaaaataaaactttaaatgattcaatcgacactttttagataaaagagatttcaccaagcaaataaaaatattaggtttctacaacaaagtgtaccactacttaaaaaaaaaggaacgtacatgtcggcactatagatgccagaagtgctaaaaccgacacttataaaccttttcccacctgcacgggttgaaataaccaaaaaccgagagaaaataagtatcagttctaaagaaaaaccacctataatttattataggtgccagtttataaaaccggcacccatcttaagcggagccgagccgagccgagccacacctaccacacttaaatttgccttatctatctactgagcggccgagcccatctctctcgcaacttcatctctctctctctctctctctctctctctcccaatcgaggaggcggatgcaggcggcaaggcgatgccactactctcggaggcgagccacggggtggctggatccggcgtcggcggcaggcggggtggccggatccggcatcagcagcagacgggggtggctggatccggcgtcggcagcaggcggggtggccggatccgacgtcagcatctgttcccgcggcggatccgcgttgacagcgggaatggtacagcggcagcgtaggtgggcgccctcctcagcaagctaccgtggcagcggcgggcgccatccccggtgagctacgatagcagcggggctcgcacgtgcatgggtggatccggtgacgacaggcgccatcctcggtgagctacagtggcgggcatgcaatggcgaagttctcaaatcagtgatttgtattatatgtttgtgattctgttcttgccttgtgatggttgatgttgattcttgtggttctgttgttgatcttcaatctagatgtgttgattgtttggggattattcattgtatttcatgtatgcatgagtttgggggtttggagcttgggatctatcgaggatatgcttgctcgatgcattggctcgattcgatgcatcgagccgttttctttttttttgcttatgtgcgtctcaaaggtaccagttgtggaatcgtcaccaataacctagggtcatcagtgccacctccgtcgtgccggttggtacattcggcacctatgagggtttctgactggcaccaacagtactttctgcagtagtgtactcgctagtaacacaatctcacgggcaaaagatctaactatgccacaagctaaagaatatggtccccacatcgactgtatcatgttcaggcctaatcttaaattaacactaattgcaccactaaattaagttaaggcccaacaaacttagtccactccaccaatgcaatggtttcttatctttaaactatgctgatcacatatggatcagagacgtcgacttattcacggtcagagaaaacaaccacaaattagagaagtacagttggaacattgctccacccagtgccttcaaatcccatattgctaggaatttttcgaggcttatgaaaaacaaaaataaataaagaaacggtttcatattattttgcaaattatgcgtgtataacatgttagagttttgtgcttggtacaaatgaaaattccaaataaagtaccaaatgatctggccggctcacgcatgacaagtgagaggtcgcttgatgttaatacttcctcagtattttaatgtaagacgtcattgattttttaagatacgattgaccattcgtcttacttaaaaaaatgtaattattatttattttattataacttgatttatcatcaaatattctatttaatatttttatatttgcaaaataaactgaataagacgaatggataaacgttgataaaaagtcaatgtcgtcatacattaaaatacagagatagtaccgtactactccgtaaaaagaattaatcctagcaatgaatgaggattggtcttttttaggatggagaggtatcctctcttattataatgttataacccactaactgttccggttgggaataaggatgcccgaacacagccttagcatcttcatccactttattcgtggcaaattatgtgatgagacgaatcaattaagcttatggtatgtgccttttgcgatactagctcgatcgcttcatgcatgccttagcagaatcgcttcatgcaagatgtcttcatgcatgtcttgattcatccgcttcaattctgccattgtcttgattactactcgtctactcccatatgaggaattaaaataatcacataagtgctaacatttccaacataaacaaagcaatattatgtgcattggatttgaaagcacaccatgcatgtgtgcacacatttggacttgaaagcacaccatgcatcgcaacagtgctgtcggcagaaggttccatatcttctatttgggcaaaaatttgtaatgctaacggcactaaataatagtttcagactttcagtcaatccatacggtcatacggcagacttcaatatatatacacgccaattttcagttgttggtcagtcggtcatcttcaagggggttgagctgtatacttgatccgtcctgtatatgcgcccgatgactgaagactcaactagtagttaactaattttaagcatcagatagaaattgaaatagcaacaatcaaacagactgacgcctgcaaccacccaaatggaaatggttaactcgttagcatcatacacgtaatcaccacatgcccacatgatcattccacaagcctgtaccttcccttgcatgatactactataccaaatgaagttttagattctgacatggagagccaactgatgagtatttaaaaaggctaatattcttttcagcttctgacttcttactcattagctcagtctcgattttcagatagtccgatgtaaattatatctgccagaagctctctaagcaggaagctatcatgcacgcttcactgccgctgcttaatcttagacggaagcaagtgccaaaccatatcgatcatcagtaacaacttgttgggggcagaactattctgcaagctactcctggtagcttggctaacttggtttgcaaaccggtcccagctatcaaatagcactcgccatgtgaggctagcctacactttaggagagcccaatcagtcgccagatctatttaattagaaattcgagaccatttctttaagatgagacaacggattgatagtgctacccaagctcacaccactgctctacagcccccttgatctcgacctctccaggggaactgaaaatcttcaagcactctcagtttttatatatctcgaggcggccatcatgcacagggaaattggacgacgacgagacaagatatccagcccactagtggcaccagttctcgtcgacatttcacgttaaaaagatggtatgccggattgctaatggcgatggatcggtgcgtacgtactatccggccggccgggttgctgtcgactgcgtcgggtcgccgtcgtgcccatgcaatgctgctcctcttaggctgtttagttcacgggtgaaaagattttacgtgtcacattaaatatatggacacacatctgaaatattaaacatagtctaataacaaaacaaattacatattccgcttataaatcacaagacaaatttattaagcctaattaatctgtcattagaaattatttattgtagcaccacattgtcaaatcatggcacaattaggattaaaaaattcgtctcgtaatttacacaaaatctgtgtaagtagtttttttttctgtatttaatacttcatgtatgtgtctaaacattcgatgtaacagggtaaaaagtttttgtttgggaactaaacatcaccttagggcttagggcatgtttagatcccctggcaaaattttacaacatgtcatatcgaatgtttggacacatatgagaattaaatataaacgaaaaaaataactaattacacagattgcgtataaattgcaagacgaaacttctaagcctacttgcgctatgatttgacaatgtggtgctacagtagacatttgcaaatgacggattaattatgcttaataaattcatcttgcggtttacaggcggattctgtaatttgttttgttattagactacgtttaatacttcaaatgtgtgtctgtttattcgatgtgacacgccaaaactttacacccctgcatcttaaacacagccttaggccttgtttagtttcttttttttccctaaaaacgtcacatcgaatatttagatatatgtatggaacattaaatatagataaaatgaaaaaactaattgcacggtttgcatggaaatcgtgagacgaatctttttagcgtaattagtcaatgattagccataaatactacggtaacccacatgtgacacctacaaattttcttttcgcgaactaaataaggccatatctttttttttccttggcaatggcgtaacagtacaagtacgtagggagtaccagcctagctagctacctatggcgtggaccttctgccccgggctggcacgttggatcgatgcgtggttcacttaatttgttctggtgcgtgtacacaagtacaggcacaggcgcggcaaaccgtacgagtggtggtggtcggagaagtcgtgattagccacgctgaagtggagccatcggaacagcgggcgcagctagctagctgcaggcctgtagctcagtcgtcgtcgccgccggcgtgcagatgcagcagcgagagaggcactggggtatacgtactgcgcgttactgtgcccatccagtgcgcccgggctgatttgattagcctgaaaatggatcggtgtcctgtgccatcaaatctctatcaaaaattcaaaatccgcttgaaaaaactctcttgattaattagtgtcaaagactcaaagttgatgtgtcgatcatgaaaacaatgttgattgacctctcttctctctgccatcgcgattctcagactgtagctagcatcctgtagcaccgtcaacccgtggtaccatacagggagaggatcgatcgatccgtccctgcgtgtattcgccgggctgtagacttctagggccactctgggccgtacgatcgcgacatatatggatggccacggttcatcgttgatcgctcagcacaaccttactaggcggaaacaaaaatcttgggcaatgtttttcccgtgctgatcttgtacgaatgggtccttcatattagatatttactccctccgtcccataatgggatgagacccatcctaggactacgaatctggatcccatcctaggttgcaacattatgggacggagggagtagatgtctactgcacgtctgttgttccatcgtacaaatgtatgacgttaattaggatatgcatatctagttcagtacggagtagatgcttagatactccagctgtctaatggaaggataagatcatctctgtttatgatccttaactttaaaagaagcaactatatattctagaggggccgttgctcccaaatttttttatatctttttcgtcgctcctatataaaaacgatatttttacagctgtaaaatacatttgcaaaggtggtttggccaacctcctgtaacaaaaaataaatgaaaatggcgcattttcataggcgggcaataaatcatctatgccatgtggaaataactttcatatgcgaccagcttaacatcactatttttagaaacaattttctcgtgcaaccttcttatttaacatgatcatatgtaaaaactatttcacagttgggtgacctaagttaacgtatgaaaaatacctacttctaaagacacccatattttttttaagggaatgccattcagctagctttattgatcattacacattggtacatcgtttgtcaaagtgcatagaatataagcaggaggttcatcaacccaagtacaatactctttcctactaaaagctaccctggccaattcatgagcaactttgttttgcttctctattacaatgttcaatagatatgctatcaaaacctctccatattagattacattctccatattagataacatatctaaagacgtccatctaatactactacatgtggaaatggggttacttccaaatacaaatgttttaaatcatctgcctcttagatatttgtttgtatagacagccagtgtcggtgtgtaaccctaagaatactgcgatggcggatttcattgtgaactgcccatacagtctaaaggggtatcaatgaaaattatttttttgttgtagtatgtacacctggcctagctagggttgtactactacgtaatcaagtgcagtgtgcacgatcataaggccgtgtttagtttctcccctattcccaactttccatcacatcatatcacatcaaaaactttcatacacacataaactttcaactttttttttcacactcccaactttcttcaaactttcaacttttttcaggaattgaacacaccattagtactttgctaatttgggccctccaattttacatttaatccaagacaacgttctaacttctaagtaataaaattaagaacattcttatccttttttttccacaaaaagaaaatctccctccttcaatgagatctagctaaaacatgcttgtttaattttcatggccctgaaaataacacccacctaaaagacccatgaaagttagtaaattataagttagtatcagggtctcaaattattagatattgcctagcccagtccaggatttcccaaaccgccggggccggggttaccacgtcccggcggtaagcacggttaccgcgcggtaaccgtgaaaaactatacgaaaccgtacaaaattcatcaaaaattcaaattactttttaatttatttaaatttaaggaggttaccgcggtttttctattaccgtaccccgcggtaatgtaaaccttcccgtcctatgcttcctcaaacaactacatgcttagataatttccatttatctattgctcgtcgagtcgttgtacatggccttgattagccagcaagtgcatcggccctatatcccggaatcacactctttgaaaaaaaaatgagtaaattgcgcccacggtacacaaacttgttaggtaggtgcaatttagtgtaaaaacttgcaaaactctcgttttggtgcacaaacttgtataggtgcgtgcagactatgactaaatagaatagcaaatctaattttgctgagttggatgatgagtagaccgccaactaagcattcacgtaagaaggacatgtttgcctgctcgtaagcaatggccctattttatcagaaaaccccttctattgtttggtatttcgatcatgtataatttttaagtgaaacgaatctgagaggtgttcatagcggcggggagctgggaaggtcgaatccgcggtggctgtagtgatgggagtcgagcctgacagctacgccgtggggggagtcgagtccgacggtggctacaacgggtaggtcaagtctgacgacagtagctgcaacagtattgccgagactgactatagtgacagatggcgaggaggtcaagtttagtaggagagcttagaagttgatgctgcggtaggcatttgagtgccttgctttaggccaacatcagttatctcagactctgacaattcatatagcaactttgaagcctagctccaatgcttcagtgcagacatggaagcagcaaggaattaagccattgtgccgtcagattaacagcatgaacattaagtccactgaagcagcaaggaatgtaatgcttaattgtacacattgtgacaaaatctgaacacaatgaaacacgtgagtgcatattttgaacagaaactgagatcctgaataaaattcagtgaataacttgaatgaaaactaaatgcataacttggcatgaatttgattgtgcactagtaatgtatctcaaaatcgataacatggaaccaactttatgaatgcatagtataaactactgtttctttttcttgggagagtttttcttcttgggtgctgcacttctcttcctcaatgtggccctcccttgtttggttgatgtggttagtggtggttgaaccccttctctcctattagtagcaatgaaagcagactctggcaccctttcttgatgtttgctagcagcctgtaaaagattatgtactaattttatgatggttgctattagctgacaaaatgctagcttaatgaaggattgttttttctttgagaacttaatgaaggactgtcacctccttaataaaagcttccaccacagatgaactcagatagttagaatttttctggggtatgctgagcaggtgcatttcctgaaacaaatatatgttctgtttaaaattccttgttagtgcagctaaatatatacacaagcaaaatgagcatcaatagtacctgagtgatgacaggttcctgaaacaaatatacaatgagtttaaaattcatagttagtggagataaacaaataaacaagcaaaataagtataaatattacccaagtgatgacaagctcttcttcatcaacaattgatgaagtcgccatttgctgtataggttgcttctgaagttttaagtcagccttcctctttttacaactagttttgttgtgaccaccatttttgcagtagctacaatgcatctctactccatgctttgaaattttagtcccaccctctagttcttggggctgttttctcctagttttctttggcctccccactttcttctcatatactggtggcttcacctctataccctgcatcttctcccagtggatactatctctcagtggcattatgttgtagctataagcttgttcatagcacctggttgaatagcaaaatgacactacatcctctggcttgatcctttcatgtcttagacaggaaatggcatggttacaaggaatcccagtgagctgccacctcctacagtcacatctctttacattaagttcaacaatgtattgagatcctatgtcgctaacctgaaatgctcccatcccagcaggaaaaacatagcatgtattagccatctctgtatttttctcgaccttccgttttatttttgggcagatgccacatggccaattcctttctagttctttttgcttggtgtacaacctgttcatgatctgatttctaatcctctcaagcatagacaaaataggcatctctctggcatcaagaatgtacttgttaaacacttctgagttattgttaagaaggatatcacacttcggaaagtcactgaaaaaggctcgacaccattggtttggaggaatttcttcaaggtacttataagcttcactacttaatgccttcatcttttccatattggcattccactcgggcacagtgctagatcttgcaatagcccaaagttggttctttagtgtctcccctttatgtaacacttgaaaattttgatatagatgcctcacacagaatctttgttcagcatcagaaaactcccttctcacagctggaacaagcccctggaaacgaattataaagaattatagttaggaactaaaatgtgagttatgtatattatgaaaaaaatcagacaaagtcataccttctgcctatcagtcatcactgtccatgcagatgtattctcaatgccaaggtccttttttagagtgtcaagaaaccaactccagcttttcaagctctcaacttcaactactgcaattgcaatgggaaaaatacagtcatttgggtccataccaacagcagttaggatatggccaccaaattttgttttaatatggcatccatcaagacaaatgataggtctacacccaaacataaaccctctcttgcaagcatcgaatgacatatacaaagtatggaagcaaccaaaatgtaggttcaggtagaatgagctccctgggttagaggttctcaattcttgtccatagtcccataattggttgtactgagatatttcatctccatatatggccctcatagccatccttctagctctacctagcttgtgcctagatggtgttaagtggagttccttctgaattttcttagcaaagctcatcagtgtcattttgtcattatctctaaattcttcaatgtacctttttgcaagatacttagctgtgacggccttgatctcccactgtttagagcaggtgtgcttctctatatattcccttaccactaagcatttgactctattatccatanatnagacaacatccatggacaaccttcagcacacttagcttcaattcttgttttggtattccgtgtcttcttaatagcaacttggttctttatagtatattgatctattgctttcctaagctctacaacatctgcaaacattatgctaaccttaaactcaggtgtctccatgtctacattagccctaaaactcttaaaactgaacttgattttttcttcttcttcttcagaaatatctggcatcatcaacctttcatcttcagatgaaacatagtctgaaccctcctctttattatgcgctaactcaattttcccttcaacacaattatcaaacaagtcatcatccccatgatcaatctcataatcactatcaacaaaatttggatcttcagttcttgactcctcttcatcatcaattttagcgtcggtagcacgtttatctacaatcaactccccaccatcactcttagccctaattattttacttggtttcacaacagtacgcaaagaatctgaaccaataattgccacatcatataagtcaatagcgtcaactatgtcttgatgatctgcatacaaaacaaatgatcggaccctaggtacaagagcgaccatactattagtgtctgcatcacacttaacccttctcaacccatcacttaattgtttgccaggaagcaaccaataaattttggtgttatcagatttctcatatcctagttcttcaatgaaatcatcaacccacaacagtgaccaagaatctgactcacaatggtcaaaccagtttactctaccatcaacataagcccggtttacaccatttcccataaaaaagcctccgtggtgcatctcaatgctgaattcttcatcttcgtaatctacatatgttgtgtacagataattattcatcgtcagaacagtttactttaggttcagatgtttaagggtatatccatgtttaagggtatatccaggaagaaagcatagttaacaacagaaactagcagtacattaatgatcaaattgctctccaaaaatacaaatttgtcgtgatcacttctataccataaatgtcaacaaaaattacagcttttgtgtaccatgaactagctcctggcataaattaaaacaactaatagtccttcttgtttgcaatacctaataaatcgacaataagaggaagaaatctctacaaaaattggaattgagaaagacaatctcatttttgacctgataaactaaagtactcactgtatacatgagatcgtgcaccttcacttcgcagccctggcaccatgttgcctcagcgccggcggcaacgtcctgccaccgctgccctaaacgtggccggtgtgttgtctcccagaaaagccctaccgcctggatccaattcgcagccttccaccttgatccaaatatcaatctcctgatttatctccttttgttgctaactcaattggaggtaggctatcgtgaaactgatctctagcatgggcatcatcgtgggctacaacacaaaagaagattcggaggaattgaaagatgtatgaggggttatttgcaaatatgtgtagccagctcgcgcccccataacgtgtgtatgcgctgatgtggcatcctaatctcaagccaactcaataagattggtgatgaagtcatgtcttggccttggttcgcacgcactacgcaagtttgtgtaccgaaatgagagttttttaagtttttacactaaattgcacccaccttacaagtttatgtaccgcgggcgcaatttactttaaaattatcatgttcaggatgtacacaatagacttcaatcccgctatctcagacaggtatctaggctcaccaccagcgagctgcaatattgtgatgacacatgttacccacgctcaatgatacccacaataatctaaagatttatacagcctcattttttcacttatattaattatacttatcagctaaaaattaaattttttatccttaaatttgaagttgattttagagtttttttcatctaaatttattttcagcttttatttttagatcgctaaagttttattatatacagtttggcttattcagccaaatgatgatgccgtatcacttgtcactactcgcattatagacacaattaatccctcaagaactaagctgacatgtcgaggcatcatgggctgcagagagcggcgtaagcatcaacacccgtcaacccgcgctcttgacacaattttttatgagtttacccagaatttcggcaatatattatgaaattaattatacccccaaagataagctaaccaaatctcaatccattccgggccttgtggttttgcccacttgcccttacaattaaaaagattcatcatatcttccgtacattcgtatgcacaactgcacaagcagtcaaccaaagcgtactcttctttaatatcgccggtaaactactagcgtggctactttattcaagtcataaggcatcacaaacatatggaccacacaaattgatctcattacatttgcgtataaacagggtcaacataagcccataaatattttacaaggtttaagagtccatcatttagaaaggtcgtctgtagtcttctattagcaccgctacttttgagggcttgttgagagtgtagtggggcttcgccaccaccttccctctttatagaaacaacattttagtagtagtttttcttttaccttagcagtctttttgtttttctctttgttccttgtcctcaggcaatgaccgtccggccaattgtgttgcgtaacaaaaactttgatttcctctaatataccaacgtgcaatctttttaagcgttcgcgaaaaaaatttaccagtttctaaaaacaaacggttgttactgggagaatcttcgctgtcaagcctaccgaaaattaacgctaccgaaacaaatctgaaaacatgttttaaaccatttaatttagctatttgtggttgttaatccagatgaattgtctagtggtagttgatatatattaccaagtacgccaatagcactacgattaattggagagttacgtttgttagatgacggagcagccacgaattttgtagctagtgcaggtctcgcaaaaccagagagaaattgagaacccatgtgttcccagtcaaatgcatgcacgccaccatggatgctctgctcaatttgccgccatcgcaatttgcatcggggtcacttgttaatcatagtactacagggagaataatatgcggtttattcggtctgaagggaaaaataaaggatttgtattattaagaattaatttctataaatgtcatttgatttgtaggaatgaagtactacctctgtcccataaaaattgaatttctacctttgaacatttatccaataaaatttgtatttctacttaatatgggatccaataaactgattatattttcttgtaatcttcttttctttcatcccatctctaactcattgtcttgacataacttttaatcaagtttatatatggaatatgtgcatgtactgtgcttattaaatagggttattgtagttatttatctatcccactaatatattcttaatttcctaaaaatttattttttatgggacagaggtagtatgtaaaaactaaaggattttttcctttccttataagttgtattgagaaaacacaaaggaaaattttcatccacttaaatcttttgaaaaatatctatgaattaatgtgtacatatctttgtatttcttcacttttttattcctatgagttaaaatttctctaaaccgtacaggccctaaaacatgattaggggcacgtctattttggcctgcttgatccattggcgtaactgcagtcgttgtctccatcagcacgctataagaataaaataagagaatttttacggtacaatatactatcagtatatactggcagtatgtagaagagcatgttaggaattttataggaaataaaataacactttagtaatttttggtttaaattgaatctaattaggagtacctggttctaaatcttatcgtgcactaagggaggagcattctgagagtcatttgatgacaaagcacgtgacgatagcacgatttgataatagaataacgaagaaaagacaaaattaccctttcaaactttacactgcaatctaatttaaaaaaatcaaatcaatgtacactgttagatcatatatactttcagtatatactagcagtatattgtaccgtaaaatactctaaaataaacacataatacaataataccgctactaacacaaatacgattaagcatcagcttagcttgtggcatagggaattgcacgcacatgatcggtgctcccagattaagttattgcggggacaagttgtatcatactttcattcaatctcaacgtcgaaagccgtacggatcttcaaggccggcactagttgatagaatctgtggcacacatgggctggttgttccctgcttactcgatcgcttgcttgcttggttggaccattttgttggtcctggaccattttgattactatgcaaatttgcgagatggagacgcatacacatatgggggcacctaaaaaggcaaggctggactaatcaaatataatggtttggctatttctcctatgcccctgcatagggacaaactctgcatattgaatggagtttggattgatggtggggtggccctgaaatgagaagatgatatatctcagatcttagctggacgtgtcgagagatatgtggatcgctgattgagaagggtgcactcatgcatgcactagacactacttgcaatgtttagtactacagtgtgtggacaatgctggcctgccggggcactttcacatgatgctgaattaactttccttgtacgaagtggtccaaggctaaaaataacgagcactcagcagtggatcatatcatatactccatatgctagtagctactagtactagctggagtagagttgcatgatggatgggctgaaaatgagaaacgtgtggtgatcgagatgagtaatggagctgtccagtggtaccgtccatatcagggatatcatggcacagacagggtgtacaatactacattgacttgtattacaccataagaaaacggtaatggaccaacgaccaaaaaaccctgcccatcacatgacacgtcaggacgtacgcatgcgaagttatcatatccttcaaccgcttccattatcatcagagaactgtacgtgctgcaaacacacactcatggcgagctgcaaatagccaaatactactcctggatacagactgtcgtcatgttagcgaggctcgtgaaatcagagagatggaaacatctggatcgattgatcgataggtattcagtgtcatcagtactcaaagcagcctaattgtcgacgatagacattgtcgcatgactcgcatgcatggatcatcattcatcatgcagtacgtagtggtgcggtacccttttgatttgcagtagcaacacacatgcacgcacaggcgcacagcaagcagcattagtacggcgatcttggcgagagctaagcttttgcatccatcgatcgatcggcacgggcaaaactgtagactgtactacgctagagaaacggacgcgcgctaagcgttcattgctggccaccgactcaattcaatcaacgcaaagggtacgtaagctgctgctcgccagtcgcctatagctagccgctgctagctgctctcctgctttacaggtttgcatgagaagagagaacactgaacagatggagatgcgatcggtcgatcgacgtgaagccaagccgccagtcactgctttgtcgatctctttccctccctcccagcagaaacgtgactccggtcgggactgtgttactgtttactccatcattgttacaggaaggaaaaagaaaaagagagaagcgaaagttgcaggaatcatgcatgcaagcatgcaatgagatcgagagagaagccggcctttggactgtttgcagcacgtggtcggtctttgccttccgaccgatggccaatcacatgcatggacagcaggcagggtctgatgcatgttcggtgcgtaattcgtgatcttgtacagtgttcgctagtacagcattcagagttcagattcctccacaactcggtgttcctgatagctaggagaagcccaaatcatggatattcatgcatggttgattggttgaaaatgtaggtgaagccattcatcgacactgtgttcggcgccagcgcacagtgaaaaaaaaaattctgaagcgcgcgcgattcgatccgtgcacgtcgtggcgtctccgcgcgcgcgtcgtcgtgaggagtcggcgtcggcaccgatcgtacgcgtacgcgcgtgtcgctgtacgttttcaggcccatgtaggcgttggccgcgcgcgtcgcgtgcggcgtggttggcgacccggccacttgggccgcgtacgacaaggctcgatagatccgcgcggcgggcgggcatcggtgtcgtcgatgagtgatctgactcgatcgatcgatcgtggtggccgggctggcatcgtcattgtgcagggatatgtgctgctggtttggctcgatcggacgcaacaaacgtacggttggtgtcacgtactataaggtggcatgcacgattgcaccccgcaagttgccctatcaaacgactagtacaactatcaatcctgccttggcttggcaggcatattgatgggtggatggatcttgtcttcatcgagtatttttcatcagaattgtcacccatgcaaaacctttgtgataccttgactgttactactaccagattttgattactctacgagtgtgtggtggggccggtatgtacgtaggatctacatcacgcatgctaatcaattcgtccactttatcatggcgttgtagtggttctgattagatcctaaccgctccgtgattagcaaacaactcgggaacgacggcatgtgcacatcatgcaaacagcggccactgtccaaggaccagcttacccacgtgatgacgtgcactgcagtgcagtccgcagcaggtcgatcgatcgatctccccatgcccccacccgtacgcttttgtttgccgcgcgcacagtgcatcgtcgtcggctaggccacgatttttttttagaaccagaaatttattgcaactaaaaacagagtacaacatattcgatcatacagctttctgatctctgaagagatttttcagagagagttggcaaagcaacttctgttaggataagcaagacacgattgataattctagtagccgtctacacatatggagacatggagtcgtaggagtagtatcttattagcaacaacggtagctgcgcaggcaacgcttgtgagttgtgcgaccttgcaagttgagcgagccgtgggccggccggggactctcgctcaagaacaaagcagaggagccgcgaatccatgtgtcaccagctaaaggatccggatgcctatgtccgcttctgaacgtacgggatcaggacgcatttaataccatctcgtcgtgctctacggccagcgagatacacacggcaatgtccccttcttacgtgaacgtatacgtgagtaggaaaaacaatagacaaagattttttttttctttttactgcaggggaacaacaagaattactacggagtacaattatttccacccattatcaggttcatttcaaccaggaaatataatattccatccgtcttagaatataagaagttttaaagttagacacggttattaaaaaagtagataaaagtgaatggtggagagttgtgatagattgagtagtggagataggtaggaaaagtgagtggtggagagttgtgattggttgaaaagagaatgttggtggagaagttatattttaggataaatcttgagagttaaaattgttatattttgagacggaaaaaatacacaaaccatggattgcgattttgcatgcaccctacgtgtaaccggaacgaccacatcagaaatgaatcgttacggttttggccttcgtatggggaaatcgggagagagagagagagagataatacagggtgtcgtgtgggcccaacgataatatcctctcgcgcgcgtcgcacggccggatccgggttgggggcccaccggaggggtttgtccacgggggaaagggagagatggcgatgcggcgtgcaggtgcgcgtgtgtggtggctttcaggaatcagtaccgggaaatgggagccaagctgggggcccacggcctgcgcccgcccccacttgtgctttcggacaagcgaaaaggttgttggaaatggctacggccacaccgcaacacgacacgatgaggtgggggttggccaatggccaggccatggctggcttgggatacagtaggggagtaatttttggctgggactttacagggaccaaatttatttcctgcacggtcagaaaattactgcggggtcttggcatacaccaactgcctttgtactactgatcccacagctttacatttttttattttggaagataaagtgtactatgtaatttcacatgcttttgtttgtctcaatcaacaatatcctattccctcattaaaaaagtgtctataacttttagatttatcccacaaatagtgtgttttaatatgtacggtctattaaacttgttaataccattttattttcttttcttttctcaatttagccatccaaccattactatatatcctttccgttttgtttatgcattcataaaggttatgatatttttgtggcctcttattttagagacaaagagtagtagctttctttttttatgttgccttcttgctatttatctattttattaagtaggagaatcgtccatcgacgcgatgtttttcttctttccagtagctctttgaagagtcgctgttgtagctgaaacgcaagattcgggccactagaagcgaaggaagcgaccgatcaacctcggtgtcaaggatagaagccatttttgttgttatctgcaagcttaagcagccaccacctacggggcataaatggcaccggacaagcaaaaacatacagcgaccagcggagagcggcaggtagcgacgcccgccgaaaacgacgtgacgaattttccgcggtcgcacgcgtcacgtacgctttgttcgccgatcactttcgccgcgaggatacatcaccacttatcacatgatcgacacgtccatctgctctcttctgctactagtactggtaataattaactcttcgacccggccgtcccggttggattaattagtcaccttaaactgacatattaagaaaatgattaacacatgttgttgctttaattcactccctctcgccttctagattaaactaggcacgatcttttctttcctttgcttcatctgtgttcagttcaacgtaaagtttagattttggttaaaattaaagataatatgatgaaaaagtacagtttagattttggttaaaattaaagataatatgatgaaaaagtactgaagtttagatacaaactcagtattactccgtggcagtacgagtagccggtaaatgtactggagtagtactgtacaagctagcgataggttccggcacgtacggcgtcggaaaccacgcgtacaacgccgaatactatttggggtccgaaacgtgatatgctccgtgtcgctagcgtacgcttcatgtcgcatcgtcaagctgtgcctgttgcacctgcacgtcaacgtgatagatggagtaatatttggatgtactgctataccatggtcacaaagtcatcgcataagctcgaaatataccgataagacatacccttatattttatacgaaagatatttcagatactttatcgtactatataaaagtattatatatctaatgatatacgagaagttatcttttaattaaagcaacactgtaaatttagaagaaaactgtattctcggaaaaatgcgttagaatcctattagataagatcttcttagtctatattttggcctaattcttcggattctacttggaaaaaaaatgatcatcgctataaatataagacctccctcgtggagaagagcatcgaattacagccataaccagagccacattgagatacaattcggaggaagccgaagtcctagtcgccgattaaatctttctgagtcgttctcggggagtcttagtcaccgattaaatcttgctgagtcgtcctcggtgggttctagtcgatggattagatcaagtcgcttctttgtccttcattgtaatccatgtgaatcctgctagcaatacatataaactgcaagtcatcttgagatttgaatcgatataactttttgtctcttgtctacttgatacaatcttgtgtatatcttgattctaacgttccatatactctataaataccgtgggaaggtataacccgtcgatagtttgttgtaaaggatcggagaaaaaaaaatgcctataggacttaaatactactccagtataaaaattcagaaagcctcattgtcgttccgggccgcccgaaattactgttaccatctcacacgattttttatattttagaccatttaaaaaacttattttatagacagatatagaaaaagttatttgaaaaataatcattttcgccgcgccaacattattaagccatggtctaacatgatgacgccaataactttagcaccgtggacatattttttttaaaaaaataacctatttataacaaattgtatttacaaatagacccttggcaccaataatactcgcactgaggatctaattttaaatatctttttaaataaaagtagatcattttcaaaaaaaattttgcatataagtcttcgatgttaatgatattggcaatgtcccctattacgtaagtgacttagattatacagggatgtggaactgcaatttcgaatgtcagttttgcaactggacccagggcaggggcgacatgggaggcgactcagccgccgccgcagcaccacccctcgctgccctccttctgcctcgccgctgcccgagcgggccgccggaaaccgtgccgcggccgcaaggacggcggtggcggggccttctcccccgaggtcgcggcgttagccctcagccctgacctatcttcggggcgatgacagcggcgttgggcgacggcgagcgcaaacgacatggcgaggcggcgctgccggatccggagtctgctgcgcggatctggcgcgagggctgccccgagccggcggcggcgcgcgcgggggcggcggggtgcccagatccggtccccttctatccggatccagagtaggaggccgagccccgacccccaggcggcgaggcggcggggtgcggctgtgcagagctggcgagggcgaggctgtggcgtggccgtacggaggcaaaggcggcatggcatggccgtgcggagacggtggcgcagctgtgcgaaagcggaggcgcaggcgctgaggtggaggcgcgggaatgagccggctggtacggcgctggcgggaggaggagcgtcggctggctggctggtcggccggcggcggcggaggcagcgcgtgcaggaggtgcgactggcgagagcagaggcaagtgaggctcggccggtggcagcggaggcgaccgtggtgcgtggaggtgcggtcgaggtgccggtgcggcgcgacgaggctgcccgcgcgtggaggcagtggccggtgcggtgggaggagaggccagtggcccggtgaggcgcgactgatggcagcgcgcagagactggccggcggggggtgccggtgcagtggtgcccacgctccggcggaggttttggatggcgatggagcaatggtacatgtgtggtagatcgacaggtggtggatggcaggtgaaaacccagcccggccttggccggacaagcatcgatgacgttcgagcgtcattcccctcctgagggcgttgtcgtgccgtctcgcccctcaaggatggctgccgagcgaaagctcagtttcggctctctttgaaaccttgacagatgacggtggcggtgttccgtcgcttctctcgttggagacgtcgtctaggcgtccccttgccgaaaccccctgagcaattggtgcaagcacactctagattctcatcctcttatggcggcgtcctagtttctacaagttggccacgtcgaagggcctaggggggagaggtgttccatcttctctctcaccctctctccctgaatcctgaagtcttggatagagttggctttgtgttgattgtatgggtcgggttttggatgatctcggcagtgttctgttgttggcctagcgatggtcggtcacgcttagcggcagccggtccggtgctagccttctcctggatctgtgtgttggcgctgtcggtgtgtgggtggtggtataattttcttttttcctggttacgaccttacagggttgtaatcttgtaatttttttctgctctatcaatataacctcgcaccgtctagtgcgagtcgttaaaaaaaaagattatacatggatgaagttggcaggtaccactagcaaatcattaatttccggagaaaaaaatattgtgtttgtcattgccgagtctcaaaaacctgcgtgggttttttttttctctggtccccttttcagattattaatactcttctcttcgtgttccagatgtttaacgtgtactactgcctgccagcgttatctttagccctgacgcgagcagcacagcgtcatacgactatgcgagaaaggtagcgctgggcaggcaacgccgatgaaccccgcggtttttacctcccggggaaatgcaaccatcataaacggatctgtacgtatcatacccatgcttatactgctctggttggttaagcccgtggtgacacaccagcatatgcggtcgctgggcctgggcccgtacgtggcgcgtgccagtgcatgcctccctcggcgagcaatctgcacggctggccggcacggcacaccagtggctgtcactcgccagtcaccaccactccaccagcgagctactagtccactgttgctacggggagcgcggcggccacgctgcggcggaggcacggcgcgcgctataccggccccatgcacgcgcgacgagtgcgtgatgtgtccctctcctatcctatcctatagcccttgtgtgttcgtttgaccctgactacccgatagcgcggcgtgccggcactcgatcggctgctagctcccaccaccaccgctaagatggtgcccgttgctctcttcgatcgcgcgcgacgagtagcgtagcgacgaatctctagctagctcgatccgatcgatcagtaacatccatcgcgcccctgcaatctcatctcatcgatcagatcgatcgggcatcatccacccaccgccacatgatgcgtgcaccggccggggagagcatcggggaacagtagtgtggatgaaacatgtctgtagctgtgcgcgacaggcatggcctggctgaacgaacggtggtgaacgccgtgctcccgtgctccgggaaacggtggcaaaatcgcctgcagaaaggccaacgtacagtgcgcatcttttgttactgcatgcatgggacctactagtaatttgccagaagaagacctttacataattatggttggagccaaacacttatctaagttagttaaatttgctaaatattaggcgtgaaaaattatgacaaaatatgggtggcaaccaaacaatcctttaaaaattaagaaaagactaaaatgtcccttatctatacattttataaagttacagcccattgtaccttaatgcttaaaattcaaatatgcgactcattacacactaaagccccctttgattcaaaggaaattcataggaattttagaggatttcattcctatagtaatttttcctatatagccctttgaatctaaggaatggatcttatggaatcctatgaaattcctatggaatacctaatgcaatgcaagttttgaaggaattctaacatgaggtagaagctcatgaaaactttcctttgagtctttatctcttttctaattcatgtgtttttcctgcggtccaatcaaacggtcattcctgtgtttttcctgtgttttgcaatcctctattttacacttacattcctatcaaaatcctacgtttttactattcctacgttttcttgttcatgcgattcaaagaggccctaattaatcctatattttttcttattccttagtttttttatttctacgattaaaggggaaggtatttttatcttgaggcatagttagtatccagctaacaagatgctagccatacggctcatggcagacactgacccgagcatgattaacgggtcttgccggaatgcgtcgggtccgggcaggcacgatccagatctctacagcatacatactgtagtatataaagccgagtcagctcatgcctggcgcgactacgcaagcaagcccataccgcctctcactgcccctgtggacaggagtggtagtagtactagtaccgtgcttgccgtggaacagcacagcgttagcatgcatgcatatgatgcgtaaggagaagcagtactactactagtagtagagcacgctcgtacagcgcaaaacttgttgcgactagtagctgtgcgcctgtgcctgccccatggagccatcaatcccagcagctgcagcagaaacagcagcatctgatgcatggtctgaccaaggctgactgttcccccacaatcctgggccctgctgcacgctgctgctactcctccctccacctctctatactccctgcaaaaaactgcgagccctcgcctcgcagtcgcaggcaaaagcgagaaagttggcaacctgccactgccaccagcaagagcaacgaggacggaggagaggagagaaggagcagcgctactatcgctacctcgaccaaacgacacgcaacaaagcagcaaacaacgatcgatatacacacacacgtcgtggtacaagttcatgcattgcatggctatctcatcatgctgtggatctcgtctgccaaagtgacagggagagcagtaatgctggttgctggatggatggattgggatatgggggtggtcagtggtggtgtagtacagtgtaacgctgcaataattgcagagatttgcagttgcttgcacagcatgcagcatcctaaaaagtgctgtgccatgtacggacgatcctaccgaaagggctgtgtggggagaccggctaggtgcacttatactgcgttgtacacagtacactcattagggttgttaatgctaaacatcaaagatatgcttaataagttttgcataacgtactattaagcatatgcttaataaataaatggttcaatcggattttccgtctaaattatcataaaagcatgatttgggtgagtttgagagataggggattgagaagatacgtaaaacgaggtgagtcattagcgcatgattaattgagtataaactattttaaatttcaaaaatggattaatatgattttttaagcaactttcctatagaaaattttttacaaaaaacacatcatttagtagtttgggaagcgtgcgcgcgaaaaacgagttgtttcctcaacttatctaacataaacgaacgcagccttacctctcttaactctaagggttcgttcgaaacaggcagtagcagctctgcaggagtcagcaagcgaaattaggctagaagggctgcagcgttgcggctgtgcaaccatagcccagctaaaccgatcagcccctaatactataagatatttgataccactaaacttctaaggccctgtttggttcatagggactaaattttagtccctatcacattagatgtttagatgttaatttagagtattaaacatagattaattataaaactcattccataaccttggactaattgacaagatgaatatattgagtctaattaatttatgattagcatatgtgatgctacagttaacatttgctaattatgtattaattaagcttaaaaaaatcatctcgcggattagcactcatttatgaaattagttagtttttcttagtctatgtttaatactccaaattagtgtcctacacatccgatgtgacagggactaaaaaattttagccccatatccaaacacccctaaaaccgagcgaattgcctccggatgaaacatagtatgtgattttgtcctatgtcatcttaagtcattttagccgtgtgtacatccaatcatcaatattgcataatagattgaaataaatctatttgggcccacatgtcagacatttatcctcctatcttcttctgcctctatctctatctaccgcatggtgtctttgagtgctatccacacctgtatttctcgtctttgtttgcactccttcaatggcgtccctgcgctcattgctaataatgttcttgatatggcggccacagtggccgccacaaatggtgcacaaccccacaaggccatcgtcctcataaagccacctcaagatagtgctcgaggtgtgagagctcgacttcaatctcgagatgatcacactacaccattactagtggaagctcgttaattactgtctcgcaatctggatatctgtgcctgtgacaatacgttatactcgctcttgaaaggagcttaatatcgcatagagaaggatgaataggcgttacttgaaatcattagcatcgaagtcaaatctactgaaattacaagtcgtaagcacgggaacttcaggtccactttcgttgttttcagacagagaaagcagtcttgaacctcagttacttgagaccggaagttttagtcccctgagattgtttctatcttttttcactcaaaatgcccttagggttggatacgctgattttattgtttgaaaaaaatattctagaggtttttattgcatatgcttaaatcttattattgtacctcgaagggcaaaataaaaacgtcaccgttagtaactgtagtggagaagtatcacctagaaaattgatcaaagtgaaaaggcaaataaacggagggagtaatactagtatatgcttatgctgccctcactaattagtactccctccatactcacaaaggaagtcgtttaggacatcgatacggtctacaaaatacaactttgacttattgtttctataaaaatattcattgaaaggtgatatatgtatacttttatgaaagtatttttcaagacaaatctattcatataatttttacatattcaaacttaacaacttgagagttattcatgatttatattcacaaggtttgacttaaacattgtcctaaacgacttcctttgtgagtacggagggagtatagaataattccagttctctattctctcaccaagccaatcgtttgattcttttccctttaaaagtactacatttcgtaatatctttttgtacgaaaaaaatataaattcaggattggctatgttacaaatctatctatgtttgttcactccaaagccacattgtatcgattattcgaaaccttggaaggccagttatacatatatttaaatagacgaggaaaaaaaatttatgctacattgaggtcacggtgtacaggagcccatgacaagaaaattgtagcctgtcctattgtatttttggctggatctaccattttggagttgtgcatgaggtagattttgtatgagacccgattcctttgaatttccttctcttctccttaagggctcagtagattttggggaaaaaacatagaaatttggaggattacaatcctataaaaaaatttccattcaagccttttgaaacaaaaggacttaatcctatcctatcatttgaaattcgtatgtaatggataatcctatagagattttaaaggaaatttagcaaaaacttcaacctcttggaaacttttctttgagtctatccctctcatccgattcccgcgtttttcctacgattcaatcaaacggtcattcatgtgttttttctgcgttttgcaatcctctgtttttcacccgcattcctatttaatccaacattttttctcatttctctgttttttcattcatatgattcaaagagatcctaactttgttatcacatcaggtgtttatagttatttttatttgacaaagcaataattgtcataggctgctcatcttgcatggagtattgtgggctgatctaagggcttgtttagttccaaacttttttttgaaacttttaacttttttatcacatcaaaacttttctacatacataaacttcaaacttttctatcacatcgttccaatttcaactaagctttcaattttatcgtgaactaaacacaccctgattcagcgacttcatctataaacacagtgcgcaactttatcagatcatcagcacactgttgccgtaccgctttgacggtacacagggactttcaatgcgctcctgctagtaggcccgttcgacaccgcacagtgccggactcgtcgcagtcgcaaccgtccagcaccgcaccgtggcatgttattctgtgaactgcacccaccttatttcccacaggcgagccagtggccccggccgtggaccacgcgacacaagcacacaggagagcgcgcagacgccgcgccgtggcgctagtaccgcgcccaccggcgccgcgcaccgtgcagcgcctcccactagctacaccagctcgcgtaccgcgcgtataggctctggcccagacttcagctgctgctggtggcggtggtggtactcatccttggccgtagcaacaactcgtagcatcccatggtggtgatggttgcgtagcgttgcgcgcccggctcgcaaggtccacactatactaccatcgagcgcgcggcggtgtcacgcgccacaacgtaacgaacgtacgcgccccgaaacggagcagggaggtgtattgatgggacgtgtcaatttaacccactgtgtgcagcagtagtgatagcatgagcgagtagacgcactgtaggctggatcgggcgcgtcatgcgtaagtatgcagaggcagggcacgcatgtggatgtgggtgcgtgtgacccgtccgccggctggacaactgtgcccggcatgggagcaggcgataaggaaggaacggggaatcgcactgttcccacggcccgagagatcagtaccgtagcgtagcattaacgtgcgtgcaccagcgctacgtgtctctggcgacgcgggcccttcttctcgcttagctgcacacgaatcttgatcatggcgaccttacgcctcgaacagacgtggttgcagtacggagaccatccaccatgctacgactactactgttcccatttacgcgccccgtacgagccatccatcatatcgtaacatattgattgatactgcgagatccatacggccgggacggatggatgggtggctgggtgtggctcagtgctttccgaggctgcccggcaggtccggcaccagcaatggtactgctgctgctgctatccatactagcgctagtcctaacgcatcagtgctcttattaaggatggtgcggcattatgggcgggatcgcgaccggtcgggggggccctgcgatgcatgcatgcatgcacgcgatgcgatcagccacttatgagtggagaggaggagcgccgatacatgcacattgagttgcgtggactcgatccattttaatcgtccacggctatgtagtgcccgtaggagcagttttacctgacgcgagcagctggcgcgcgcctggcggtggacgcatgttgtgtgcagtgcacggctgtttaatgccgctttctgagctcgtgattgttgcggcggtgtcgcggtagggcagaggaggcccgggccaccggccgcgcgcccgacgcgcccggtggcacgtactgcttctactggtggccagccggcgagcgacagtggccaggaggaggcagtactacgttccccgccctgcggcctgccgctcgtcacgctgttcccgtttggcgacgttaatgcgcgggcgcggtggtggcggtggtgtggagagagagagagagagagacggtcatgtgtacagggtggtggcatccgcgcgcgccgagctgaaccaaccgcatcacgtgcgtgcggtgccacggccgtggtccatgacctgccctgcccgtccgtccggcctgagcgagcgcgatggtgcagcacggtcggtacgagccatcaagcgtgcgaggacaaacgagaccgcaccgtgcgagacggaccaaagagggcgcagccgcgcaggggggccgacgtaaatgacgccgtacgcacgcatcctgcctgtgccggtgaccgaggaagcctatggtgacggtttttattaacctcggtggttgtagtagtaacaatatttaaacgtccgtacgactcgcggatcttaaaaagaaagcctctccagtaaacaaaccgcccggttgaaacggaatcaaaaggcccccttgagggctgtagcgtaaccgtacgacgataaagtagcgtgtaaccgtacattgataaaaggagtatcatttgtgagccaacgccctttgcttcggggagtaatgagttgatgtcacgttggtgcggccaaactagtccagatccgggtccggggggccatcgtgatcacgcacttggcgtttcgggagacgtattcaaacccgggcgccgagcaagcatggacgatgcggcccggcaatcaatggtctgcccacgatggatgagatgggttaggttaggttgtgtgtgcgtggggacgtctgctgtgctgtgcctctcggcatctccttggcttgggccgctgaaactgcatcgaatctggagaaaagagagtaatatacggttcctatgctttagtccactgctcaagtagacaatcttgcattaataattggttcaggtaaacaccaaacaatataaaaatttataaatgcagtggtagactagatctttctgggatggcatgatttcttcctaggacgtctagtttatccccacaatacacgttgaaccggatataaatcgatcggttaggacttgggtggttcataaattacctcccccaacagcctaggcgctgaagatagcgagcataaataaagaaaagcggaaaatagagtagcgtcaacctcccagaggcgagtgggccacctttaatagtactccaccgagagggaccaccaccaccaccacaaggcagcgagcagcagcagccccactctccacatctcacgtcacaccggacgaatcaatcaccacccccgcaccaggcaacaaaaaccgaacagggaaaaagaaagggaaaagagccaaaagatttccaccgtaaacgatgaccattattgaagccgaggaaaaaagagagagagaaagcgataggccagagtgggggccatagccatccatccgttgggttgcttgctgctgcttgcctcccccacgtccaaaataaaacgaggcagacagcttttgtcccctcgcaggccaccccacctcccaacgtgtcttccatccacgcctcaccgccgtataaatataaccctccctccccctaacccatctgcctccacgactccatccgttttccatttccactcctccccccacccaactcaccatcgccattccttccctccttccaccgctccctctctcttccatggccgtgcaggcgcagtacctctcccacgcctccttcccccacgacctctatggcctcaggtaaacgcttcgttcgatcgatcgacacctcggttggttttgatcgatggcgtggtctgatattggtgtggcctgtgcagggctctggagggtgcgacggcggcgggttctttgttcttggacgaccacggcgggtgcgcgccggcgactccggcggcggccgcggctgggatagggcacacggtgctgagcgaccttccccggagcgagcttacctgcaacgacaataacggcgcgggatacggattcgtgccgaggaagagggcgcgcctggatgcggatgagtcggccggggcgttgatggcggcggcggcggcgcagcagcagcgcatggttcttccgccccatggccttgtctttcccggggatgtgcagagcagggcggtgggttgcggcgccgcgtccaccagcgggagggctggcaatgccgccggcctctcgcaggggctcctgtctcagctctatcatcagggtgtcgagatcgacgcgctcgtgcgactcgaggtacggccttgttcgagattttgatcgagcgttcgatcggttcgccgtgatgcgcgggtgtctgactcgatcgacgtctatgttggctatgcagagcgagcggatgcgtgcggggctcgaggaggctcgccggcgtcacgtacgggcggtggtgtccaccgtcgagcgcgccgcggccgggcgtctccgtgccgcggaggccgagctcgagcgcgcgcggtgccgcaacatggagctcgaggagaggctgcgccagatgaccgccgaggggcaggcgtggctcagcgtcgccaagagccacgaggccgtcgccgcggggctccgcgccaccctggatcagctcctccagtcaccctgcgccgcccttgccgttgccggcgcggccggcgccggtggcgccgagggcgacgccgaggacgcgcagtcctgctgctacgagaccccgtgcggtggcgacaacgccggcgcggatgacgcggcgtccaagacccccgccgccgcgctctgcaaggcgtgcggcgccggcgaggcgtccatgctgctgctcccgtgccggcacctctgcctgtgccgcggctgcgaggccgccgtcgacgcctgcccggtgtgcgcggccaccaagaacgcctcgctccatgtcctgctgtcctgagagccagcctggcccgcgtcgcgcgtggccaagctcctcgtcgtcgtcgtcgtcttcccccaacctctcggccgctctggcgcgccacggcggcacggcacgtgcgtcaccccacccatgtgatcttggcggacactgagcttttgttgcacgccagtagaagtcacccacaaagttgcatctagtttaggttaaatcctcttttgttattacctgtaggtttacctgtcaatgtaatcagctaaccctactttgctgtccataacccttcacccccttctacatgattagccccaacttttttgtggtaaagaaaacccccgattgtattctcgatgaaatacatgcatgcaccaggtctagccttaaaagaaaagcagtgtcgacactgtactgtagcactccaatcttgtgtgtacctttttggctggtttgcactattccttttccatgtgaaaagatgctgcaagccgagaatattactgtcgcacaaaaatctactcgtacagcgccccggtgtagaagatatcatactagtagtggtagctgcactgctgcggtgcagcgccaatgttgtcatgccgtgcttgtggttgagccgtgatcttgactagtcttgcgctgtgtgcccccaccccacgtaaatactgggcgcctcggcatcgtgtgatcgcatcggccgaacccgggtgatccgtatatgcgtgagggattacttgggctgtgtttaatccaaagtttgatctaaactttagtcttttttcacatcatcttcaatttcaaccaaaatctaaactttacacactgaaataaacacaacctgttcgttgtactgtgcactgcagctgcatgcacggccactgcttgcccacagcgcataaatggcatgcaggtacatgtggtacaaatctctgtcggtacaaatttgactttgtccggaagctccccatgtgacggactcgacggaaacggtggcaaattttaccgtgtggctaattcgatccgtggtcgcttttacttgtggtaacagggattatggtgagatgtcgagattttgagaaagtttgaggcctagcgatcacgtgtgtgcacgcatgatgcttggtcgcggaactgaaacgagcacaagtgggtgactgcgtcgcgtcgcgtctgatgtgtgcgtggaacgccgaacgcgcctgccgcgctgccagcgagagcgaaagagacgagagctgaaagcagcatatggcatcctttgtgtgtgcgcgcctgggcatgcaactttcgttttgcagttgcaggctgtcgtagtagttgcgcgtgaaacggcagcagatgagggattagattagactagattacgggtagcagttgcctccacatgacgagaagatagacttgtttggagtacttttaagccttatctctgtctacgcctgcctactctcctctgcattactcgatctactaacctttctctgccgtcgcttaagccaagccctggcgttttcggagaaagttacgtgtactgatcgcactagtagatcagtgacaagaggggtttatgtaaataaaacatgtacgattccagaactgacgacggggatgagaggggtagagagatggaaagcgagaccttcaagaacgtctttggaagtcggagctgggctatagctttgcttcgctttgctagcttttccatcctttgcatttgcttttgcatcttgtcccttgtgatgcgtgacgcatcaaggcagcagcggcaagaaacgttcaacgtatgtacaccttggaaacttgggacgggatcgacgctatcggctcgcaagctactctagccgcagcagtcgtacactcctactagtaggagtagcttttcgccctttcggctactgctacgctagtctatgacgtgtatcacgtactcctactggtcatacacgctgctagtactactactactaggaggagtaggagtagctttcttcctatacttatttcaagtccctgttaaatcggatcaagtccctgttaaatcggatgtttgatattaatttgaagtattaaagatacactaagaccctgtttagatgggactaaaacttttaagtccctatcacatcggatgtttggaaattaattataaatattaaacgtagactattaataaaacccatccataatcttggactaattcgcgatacgaatctattgagcctaattaatacatgattagcctatgtgatgctacagtaaacattctctaattatagattaattaggcttaaaaaatttgtcacgcgaattaggtttcatttatgtaattagttttgtaagtagtctatatttaatactctaaattaatgtctaaatagagggactaaagttaagtccctggatccaaacaccacctaattacaaaactcattctataaccttggactaattcgtgagacgaatcttttaagtctaattacgctatgattttgaaaatgtgatgctacaataaacttttgataattatggattaattaggcttaaaaaattcgtctcacggattagctctcatttataaaattagtttttttattagtctatatttaatattctaaattagcgtctaaacatgagcttaaaaaagttttagcttatctctacgccgattttcgcgcacgacgggcattaactgtgcagtacgcacccagctcacaactcgatcgggtacagtcatcgagcaaacgagatcttctggccggcccgctctattgtttttgccttcttttgttcgcctgcactgaactttgtcatcactggccactgcctgtggttctcttttgcgtactgccttttgtcgccgcagttgtcactggtcactgctgttctttcacgtaaactaatggaaactccctttggccccgaatgtgaaaactggagtaaaaatgtggttacaagcctcttgccgaaatttcctttgaaggatcagtgcagttccgcttttctttctcgctgaagttaacggatactcccacattatatcatatattttcaccaattcacatgtttttgattgtaccgaagaattccactaagttcctgcttttccctactttcacgcaggccatctgtgttcaattacgttttaggcagggtagtggatctccaacctgtaagatatggactcactaatgcgtccaagaatccagatataatagtcctatcaaaggagtagtcaattataaacccgagcactttgttgccttgtcacctttgtagttacgctgagcaaacacgtgacaatagattcgatcttaagatatggttccctctagcttaatctaacccaagttgccagctccatctccaatgttattttagttgctactgatactctttctctgaagtggaccgtatgttgttttattggaagaaagcctacagtggacttggaaaaaagaaaaggcatgatgggaatatgttattagtagtacaatcttgtgaagtccacatcattggaatttggatgcacaacacaatttgcatctcccctagctttacctagagatcacacaataaaacaccaaactgtactacagagtactaaactaaagaaggtggagtagaatagaatatagcagctataattagctagtgcccattatgggagactattatcagcagtagcaaccttttgttagacagtgggattaatcagggattaggcactgatgacaacctaaaaagaggtgtaaaaaaacttgtgcggaagcaacgaatagagtactctagttggaggtcgtcctgaagaatcccagaaatgcagtgcctggaaaaagaggttgtgcacgcttttccccgcaaagaaaagaggaggaaaagtgcttggaatgtgggcctcgcacaattccttggttgggattcttgatgggccgttgaaaaattttgcgtgtgctatccatcctatcaaagcatccacctgcgtcgatccgtgctttttttggggggttgctctcgtcgagtcatcgggacatattttctcccgtgaaaaaagaaaagctcgtttgcttcctcgtgaaaaagtcgcctgctattcgctggcgatatggccgaattctaggcaagaacacgatccgcaggagcagaatcgtccgtgcgcttttttccctcttcccctttttcccagtgatagaaaccacatgagattgttctcacgccaacttgtgatgatggcctcgacgattccttgcgtttcaaccatgatcattgcagctaagctcatgaccatgtttggagaactagtcaagaattattttaaaagctattttttagcacaagaaaatagcccttcaataaaatagctcttatttgtttggatcccagagttattttgagatctattcggcctttaatgcagcttcccatgaagaaagaggaagagaaaagacactttttcagctccacccgaaatagctccaattagcacctcttgggtgtaatagtttttttggtgggttatttccaaataactcattcttttagatccttttggactatttggactatttaaggaagggctaaaaaaaaatatccttgtattcaaacagggcctatagcgcgagagaggatcggtcgatcgagcttgtctggtcggccgcgaaaagcagcggcggcgagcgaggcgtgagtggcgtttttttttctttttgttgccccccttcactttcggttttcaccggcagaaatggcgaatccgtctgcgtcctgggcgatgatggctgatggattatccgattggaatcgatcgatcgtgtcgcggcgggaagcgaattggcgtaactttcatggggaggggaatccatgattgtattgctcgatcaggtgggggaaaaaaaggaagagtctgggtaataaatataagtggatccttctctaaaaaaataaatataagtggatggaatcagaatcatgttgagatctccaaaggtggcgatggaaagtggaatacaggcattgggaagaggctttgggaacttctgcatgatcacgagtacgcgcattctctgattctagaagaatccccccgctacagaaatggatgtcccaaacacgaaacgcttcatccctaataagggcagtcccaacccatagtgtccataattagtgtctatggtgccatatcaataagacacacaatagaaactacactctacaacccatggtttcttaaagtggaccattaataaatacatcatctctcttctttaccaatcatatttattcttcatctattatgaagacaccattatctcccaatgcaaaacttgatagtgtctagtgtatagtttcttgtgttgaagctgtgtcttgcatgagacccagtttcttcctctcttcactctctctcttaattaatatagtgccacataagctaaaagtcctacatgacaatatagttaatgccatagacaccatcctaaatggagggttgtgactgccctaagacggtctcaataaaaacgttttgagttttgcctagcatgtgagtttgaaacggtttcgagttccctaattaaacggttgccattgtgaattgtggttaaattctagaaaacaaaactataaacttccgaccctatgcaccaacaaatgatgtataaaaccatatttatgtacattaggatttgaacgttgataaactaagttacgaaatgtggttaatcaacaatattcgaccatttgaatacttcctctatttaattttatgagtcgttttcactttttttcatagttaaacttatttagatttgattaaatttatagaaaaaaaatcaagcaatattttttttacacaaaatgaacatattatcaaaatatatgaaatattagtttggctgaaactaatttcgtgttgtagatggtgctaattttttttttataaacttggccaaacttatagagatttgagtaggaaaaaaaaagtcaaacgacttataaggagtagcaatttttttgaacatgttgacgaccaaatttgatattgagataaattaatttatactataacatgtacaattttgaggaccgtcagtatgggatcggtctgaccaagcagaccaatcagacatgatggccggtttgataaataaactgcatggcggtctgtgagcaagtttaataatatagccaactactagctctaaatcatctataactaatctaatagcccatttatacaatagttaactataaaatatactacaccattaatatttggtcccacctcttatacacatataacgtattggagtccgtgttgtagctggctacaaatctgtagcccactttcttctctctcttcttttttcttcttgatatgtggttatagctagtttatagcctgctattgtacctgctctaactggcatagatcgcgtgatatcagccgcagacttcgtctcatagtataattaaagcaatttctatattttttaacttaggctcttagtcattttttttgtaaaccattggaatgaggtttttttagtcataattgagttctaaaccactagaaggtggagaggctcagtgttgcaagcccaaaccctttataatggcaaccaatcaacccacacataataaatcgatcgaattgttcttttttttcatactagtatattttgctctagttttagcccgagttagtgcatcttcattggtttatgctgtaaatcgtccgtccttcatgaattagaatccgttcattgttttgttttggaaaccttccgttttattcacattttaccccaaattaatctaaatcggtcctgccagccaagttaatatccccttgattaaaagtctctcaagattaatacggttagtgactatgcacgcaccgattatttcattgtcgtcgtgaccagcgcaaaaaaccatcaacaaaactttactgaattttattttgaaccgttacagataaagcctcctaagcatttcctctattttatattataagtcgtttaagtttttttctagtcaaatttctttaagttggactaagtttatagaaaaatatagtagtatttttaacacaaaacaaaatattaccaaaatatattctatgttagatttagtgaaactagattgatatttgagatgttgctaaaatttttctataaacttgatcaaagttaacaagatttgactaaaaaaagatcaaacgtatgaaaagatggagtagtagagatcattactagctactctcgctccaaaataaatgcactcctctaattttaggagtatatactcccttcgtcccaaaatataataacttttgtttggatgagatgtattctagtactcatccaaacaaaacttgatatattttaggatggagaaagtacttattttgggatgaatggagtagtttttttttctacaagtattgaggcattcatatgcaattatgcatcgagctaactcacgacgtccaacgagtccggacagcacgccacgaatcaaatgcacaatgatggtggatgcaacacgagtgggagttttaggaccaaactgtgcgcgccacatactgctactagcaacgctccacttgcttgacaaagcctgaagaaaaaagcgcgtttcctgatgtgatctttatttaggtctctctctcccgcatctttcatgccatgacatgcgatgctatgaatgagatgagatgagaactcgacatgcatccaaagggaaaaaaaaagataaaaaaaagagaggagaaccgagaacctctctgtgtcgtggtggagcacactgcacaccatgactcgactcctctgacccccaaaaaaaaaatggcaacaaatcctgcgtttgaggccaaaagtcgctggctcgctgctgctaaaagcgagagactgtgtgatcgatcgataaatatatatccgtgagtgtgtctgagacggatcgatcgatcgatctcatcccttccatgattccatgcgtctttttccaaccttgtggatgctttcgatcatgcatatgcccccactgaaaagctacagatatctgaattactgaatatatattgatcgatgcgccggagggcggagaggtgcatgccggccacaccggtcaccatccaccaccacagggaaatgaaaccgcatcatatgtatccatggtggtcttctttatctttacacattgcctttggctaacctgtgctgttttgctgctcgaacctttctatctacctacctatactacgcaggcagctactagctagtagtactatcaatcttagtgagggcgatgatggagatgtgtgttgtatctagacagatgagaatatcatatcagtgtcacctttgtgctttgttggcatcagtagtatggatagacggatccattttggatggaaggaactcaattcttctcgctctctccctttttttcaattcctctatttgatgatggagagagttttgcaaggtgaagctaaaggtgtccaccatgtagtgtaaagctatacagctagcaagtggaggaggaggaggcaaaagtgtagagggtcccatggccatggatgggttcaaggatggatgccattgttgccggtggcagtggctgagtggccctagagcgagcagccgggacgccattgctggccagtgggtatagctttggtcagcttccggaaaaaaaggtgcaaaagctgtgcatgcatgcgtgctgccattggtccggccgagatctcctggctccatcttttgctgctactgtgttgactgaacaagttacaagtgaacagtgcctcttgtccaggattgcaatatctttagcttctctcaactcactttccctttctgaaagcttcacggtctcctaaacggataaaacacacacgcatttggagaagtttggcatgaggctgctgtttgctgtccaaattccaatgctgttaaataaaccataaaaatggaaaaagaatagaaacgaaaaagagaagttgtcagtaagaaactactagcgcaagcatgtttgcaactgatggaccatgacaaacctggcacccataggaaggtaaaccaggcccaattcgctgaggttaacgaaggtatatgagtatatccatgcaaggaaaaagctacacgtaccaaaaaaaaagttacaaacttcttattaatgctgatgtggcatattaagattgaatctagcttttctataacttccaactagaatcaaatggttgagagctttgttagtagtaagaattttgtaggagtattgtggatgttgccattggcattcggcaactgcactactatctttctctttactttctgctttattttctccttcacttcacctttccgaaagcttcaaggcttaggttaaaaagcgcacacaaacaatcacaaattcgaagtttagaacacttgaagccatgaaggtcacctgtcgctgtcgaacgccattgatacaaggaagattaacggaaaaccagtaaaggagcaaggaggagaccatgagtgttcctgtggtatacgtttagggtccttttcaattttctgttcattgaaaattatgaattggatttacaagggttgattgggaaattgtgagctggagtagttcgcattgtgtgtttcacacactgaagttcaagcggtctgacttgaaccgatttgtagcacaaaaaaaaaccgaattttgtgatggatgcacaatggaaaaaggcccatataaactactgtgggccggcatctggcccgtattgtcacggcccatttcctctctggtggtctctctcgtcgttcccgagagaacaaattccagaaatctccatgggcgattgcaggagaagaagctgagcaattcgattccttcctcccactcccactccacgcaggctccgcagccaagatcaaggcaacgaccgggaagaacaaattctcgcctgaagaaacgagaggaagcagcaaatcgccgccgattcgctcgtcggaatccccaccatccaatccaccggcggcggggggccctcaccctaggggagggggtgggtagcgcggctggtggccggaaccctatcctatccgatcggcgtgggcgagaccacctcctctttttgccgccacgcgcgcggggcggcggccgtctggttttgcggggcggatgccggtgggcgcgcgcgcccactggtctggcaggcatcggcggcgcctcgctccgcgtgccctcgcgctcccggcggcggcggcggccgttcagctacttatgtagccgcttgctactagggcgctttcgtcgctcgcgtcgtcgcgcgttggctttggttgtgtggttttgaatgggccagatggtgagttcggcggagtgggtttcctgagatcatattgtgtgtgctgttctttactgatgagtttgagctttgttctgatttccctgaaatgacaaacggtgcaggtttcggatgaaaattttgaagagcaggccgctcgtaatggtaaatacgcagggctcacatctttacctaccaattctcagttgcctagttcctcgtttctacttacaaagttacaaagttgcaccctactatttcagtcgattatctgaatatctgatagaaatgtggttttctaatgtggcatttcctcgacaggtggaattatcaagcacggaagggaaatcctgttccaggtgaaaatctgtctaggcacaccttttgctttcatgctatggatcaaatttgccggagctgacaaattagattgtggaatcaccatatatgtgttctgcaagcacagaaggaaaccacatacatactagtagtttgtcaactgacttgtgcaattattgcggagttgttatttatgtattgtcataactcataatccaggtggagtttggtaaggcttgtttatcttctggtcttgttctgtagatcattggactacctgactaatgccttccctaacccaaaaaaggaatgaacaattctgattatgttgttattttcgctcactctgtcaggcttttaactgggaatcccataagcacaactggtggagcaatttggaggaaaaagttgttgacctagcacaatcggggtttacatcagcgtggctgcctccaccaacacagtcattatctccagaaggtaagctagtcaacaatgtattgtgtcactcgtagctagttacagaaacaagtggtctgaatatctggtccctttattctgacaggctatctgccgcagaacctgtactgcctcgactcttgttatggttccctccatgacctacaagcattgcttcggaaaatgaaagaacacaatgtaagagctatggcagatgttgttattaaccatcgagttgggactactcaaggatcgaatgggatgtataatcgttatgatggtatcccagtatcatgggatgaacatgctgttacatcttgttctggtggaaaggtaatcgacttgtttttatgcaatgtaatcctattgttctcagcctcataattgcatcgtatcttaatggccatgttttgttaataaactattatcaatgtctctacaactttattaccagggcaacgaaagtaccggtgataacttcgatggggttcccaacatagaccatacacagccatttgtacggaaggatattattgactggttgatctggcttcgagaaagcattggttttcaagatttccgctttgatttcacgaaagggtaaatagtcaactcgataggttaacatcatctgtgataggggacctccaaattgctttgttaaaacatgctgatcagccacaattttctgtttagtgcagttatgcagcgaagtttgtgaaagaatacattgagcaatcaaagcctctttttgcggtgggggaatactgggatagctgtgaatatagcccccctgattaccgtttgaactacaatcagggtaagagatttgtaatgacattgctactgattgcttatgccatagtgatgctgtatctagcctaagcgtatgttccttgattgacaactgtgaacactagcatgctgattttttttacttctgtaatttacagtactgcccgtgtgaagttttgtgatttttgaattattaaccactgtcatggtttcctcttttgttgctttctactccttgtgctattgtcgagatgaagcaagggacttagatatcttttgtgaatgcatgacagttacattagattgagtctgtgtagttagcatatggtttagaccatatacaaatttcgaaacagttttctcaaccatgaaaaatgctccttgctttactttgatatggacatttggcgtatattttttttccataaactgaacaattattttttagcagataaacacaggcagagaattatcaattggatggatagcactggaggactttgtgctgcatttgatttcacaacaaagggtattcttcaggttagaaatagaaaattgttctattccttttttggggtaaatgtctacaggttagtttgatcagtttactgttgttttcaggaagctgtcaaaggtgagttgtggcgtttgcgtgaccctgaaggaaagccgcctggtgtcatgggctggtggccttcgagatcagtcacatttgttgaaaatcatgacacaggatccactcaggtataacaattactttatcttccttctatgctcaagataagcttaaccgtgctaatatttgcttggaaatggtgaagatgggctagcaaacagaactaattaaattctcatgattgcagggtcattggccattcccatctgatcatatcatggaggtatgttgtaagaattttgattgcttcatttatgacttgtaccctgcgattgaattacaaaactaattaccattacgatgatgactatgttcttataaaggttgatgtacattgtaacggccatggcaacatagaacagcccctataaaaacaacttgatgtcaataggaaaagcttttaactcagttcgttaatcttggagatatgcgcttatattgatactggaatatatatattttatgatcaggcattcttggcctcattcttttgtgttcgaacatgttgataaacatatggtatctcagggatatgcttatatacttactcatcctggcatccccacggtgttctacgatcatttctatggcaaagatgattccttccatggtggaattgcaaaactggtattgtcctgaatccttagtgctcaattgcatatctttggcagctgccagcactaagtttcaaatgttctgtactcagatggagatcaggaaatgccaggacatacatagccgctccgcagtcaaaatcttggaggccagctcagatctgtactctgcaatcgttgacgataagttgtgcatgaagatcggggacggctcctggtgcccgagcggcccagagtggaagctggcggcctctggtgacagatatgctgtttggcacaagtagatataccaacatatagcatttctttctgctgaacatgagatatgctatttcttcagagcccgaactgtatatgctagtaccatggtaatttaatcatcttcaatgcaataccagagagcaaaccacttgcaatttatcacatgctcacagcagatagtgtaaactgtaatgcgaagtgtaaactgtaatgtgaatacgtatactgtaatgcttgtgtgcatataggaataagagagtgtttatttatagaaagcattcttggaggttgaattctctttctttttgaacttcttgcatgtgccttttttatcatctgcatatatttgagtgcctttgcagaatttcatcatctgcaggctgaccgccttcactggacctggaaatcttccatgggaaggaggactccgcttccttccatcagaagacgcagattaaactggcattcttgcacagaaacccctacatttatcacacatttaacccattgttttctaatatttacaatcagatcccttgagtgagtcaatagtcgattctgtttcagaaagagaagaaaacttgaattcttgaagtgctcgtatggaaataaatggcgggaaaaatacataaattcaggacccaattcccgccctcgccgtcatctcctcctcccctcccttcccatggaggcggagccgccgccggagaaccgccacgacgaccaccacccctccacttccggcggaggcctgggctacttccacctccgcctcctctgccccgccgcgccactcctcctcctcctccgctccgaccgcctctactccctctccctctcccgccgccgcggcccccgcctccgcctcctcgcctcccctcgccgccgccacggccggcgacggcgggccctcctcctcagcacatcgggctgcgccctccgcctcacccaccgctcctccagcgccgacgccgtgcgcgtcaacggccggcccctcctccgcggtgggtgcccggccgatctggccgtcggcgacgaggtctcgctactccgccgtggcaccaggtatggattcttggtggagaaattcgtctcctgcgaacggcccaaattggcggcggcggagccctgcggggaggttcttgtgctgcgggccgagtcgctccggaagcggctgagggcgatctcggagagtcatgatcctctctctttcttgagggattcacattgtgtggagaacggcagcgatgatgttagggtgaaaaaggcgagagaagaagatgttttcttgcccctgaacctgaatgctccaattgaccctgttgccgtggagggtttactgcgagaagactgtaatcttggccaggggaaattggagcactgcactgattcagcaattgcaaaaaatgaaactgatgaattgattcaacggagcaaggggtcctgcgatggcaatacagagcagaaggaatacagcaatgagaacacagagcagcagcacaatgagaatgagggttgctattcagatgggagcacattcttcctgaatcgcctcattggtattgggtctgatatgagggtggagcaacggagtggagtgacacttccacagcttctgcatcccatggatagcttggagcgagtatttatcgcaacattcacctccgatgtttcctggtgcgtcttctctctgcttgtatatcttcctttgcttgcaacattgagagatatatgattgaattattgatgggaatacaaatttgtgtatggcctaaggtttctggattactgtaaggttccacagaacctgccggtgacgatagcatgccacaacaaggagaggtgctggagtgcgagtcgcgaaagtagaaccgctgcccctttcggaagttatcctaacctactattagtgtaagtagcaaccttgtgttttgttcagtagttgtctgtatatatatctcatgcttctgcgaaacatgcatgataatgaaacactgatgctaatgttaattttcccctcaagttacccccaattcccagaggagatagcatttggaaaggataggaagaagcaaggagtggcatgccaccatccaaagctcttagtgctacagaggaaagacagcatgcgtgtcattgtcacttcagctaacttagtacctaggcaggtcggtatctttctgtactccatgaatgtgcttgttactagaattcagttcgcacctaggcaggttctgcatttctgatgcactctttaattgtttgttctgtttgtggtgatttctgctgttattctcggtgaaagtaaattatgctttgtgcagtggcatctcataacaaacacggtgtggtggcaagatttcccttgtaggacatccacagattattcagctctttttagtaaagttgaggaatcaaaatcagatttcgctactcaattagtttcattcatagcattccttatcaatgaagttcctagccaatcatattggataaatgagatagccaagtataattttgaaggagctgctggatacctcattgcttccgttccagggatatatgcacgcaatcctcactatctggagtccaattattgcctttcagtaagtcttatttcagatagcatttgttgttccctccttttactgaagccatttcactaagcatcttaacatactaagttactaactataatttgcaaagattatcaggcaaatatactatggctaagtggattatattcctaatctaaactagacactactgctgttctttcttgaaatagttctaatccagccctattatcttactagccactatccattatttatgcagagaaaacagatattacacaccaaatcggcacataggatgtttcttggttctgtccaaacatccgtagttggtctgtcccatcggtttcatataccatctgatgctggttctaaactgaaagccctgtctgtacttcttagtaaatgccatgtgaacatgcatggaactacagaagtgatcttgaagaggaatacaaatatacctgcagatgctaatgctgtgagtgtcctagttgctgatctggataaatttaccgaggaaggtatgtactatgtacacctcaaggtttacatcttttgctaaacaaactcacctccaaaaatattgtgttgcatggttcatgtggcaaacaaatacttgggattttctgttatggtagcaaataaccatgtccaatgccctgaaatagattcagtccatcttggtttcctgcctagagaggttgcaaagtgggtatctcccctcagtgacttggggttcttcacattttctggatttatctaccccagagaagccctggaagctgcatatggagcaactaacacaaaagtgcagttgcttctctatgtatcaaaggtatgtaaaagattcttacggatgccttttcataagtcaagagtactactgtgaaattgtccatgcatatcttacagtcataaaattcagggtccagagttttctcaaatttcaagactgatccaggatgaacattttcctcttctgtgctcattagtagcatccttaaagcggtcccttggactttggcgattagaagaggtttgcaattttatatgggcaatatatgaccttgatttgataaattatgctatgcgtaaactgaattacagttctttgagatgattattctaccatattatttgtttttttttttgactaaatcaccggggggggagagattccccacctgaatttgtcattgcattaagaggaaataagttcattacaataaattgagagattgtaagggggaggagaaaatttgtttccaaacagatattacataacgatcttcatcctttaagttctccgcccaaagagctgcctcgcttatgcaacgttgcaggcaggatcagatggaggggcttttctcgctgaaaacgacgtcatgtcggtggttccaaatagcccacatgcaaagcaggaagaaaacctggcagtgaagcgccggcactcttgaacttgggcccaaacgatggaagtgcctaacgtcttgaacttgcggttgaacgttaatcatcgcccagaaagcttgagcgaacggacatgaaaagcacatatgattagctgtttcttcctcctgattgcagatgtcacattttccgtcctgaacaatggttttcttcagcaaatttccctttgtggacagacgattgcggactagtaaccatgcgaaaagtttaactttgagaggagctctgcaattccaaattagttcccaattaggcgaatgcaaaccagggggcagtcgtgcctcatagaatttttttgttgttaacctccctagctttgtactgagcctgaaaaaaaaagaccactagcagtagtttgaaggtgattgggataatccaaattcatactaattgctagctctattgtgagataatccataccgcctgttctatttacttgcattaatcgagtgtcaactgtattttccattggttcaaacaggtgttgtcacatttcaaatggcctgaaacacttgagactgattttttctacagtgagtaaaacatttttttttcttagctggaatcaattgtcatattcagggattccttacttcagatttaaaatatttgtaggtgcttcatccattgggacttcaattaatccacaattcattgcaagctttgcttcagcagctggtaaacgatgtaatcaggatttggactccgaagagtctgatccagaggtaaattttaactgtttattgaagcatcccctattctaataaacccctgcccttttttgaccaattcttcacgcacataacttttaccaattttcattggttgtcctagtggggttgctggacagcaaaccatgagctaaagaagccatctatcaatttgttgtttccaacaattgacagagtgaaaaatggggcttgtggaattcagttatccaggcatttgctttctcttcctgaggtagatttctcttcttgtaacttactatttgcatattttaccaataagagagatcatattgtatgtgcgttatacttgatgtgcttgtaaggttgtagccaagtcttcttttccattttgtgcctaaagctgcatactatccttgtgtgctttagttcagtgaattaagatgttatgcatatcgggataagcaactatattgatctgtttagagaagcgacgttaagcatattgctaattcaggggatacattcacagctgctgtgttgcagtgggagtaactctttccttttggcagagaacatggcaaagactgagatctactggcatatttcgtgacgcaatcccacatccatacgagaggatagggcatcctatgcatgtcaaggtacgatgttatacatatcttgggggaatatcatggtttatactttgcaacattgtttagtgacatgttaaatcatgagttcatgacaggttgcccagagacgcttcgagtctcgtctaggcagacactcattcggctggacttactgtgggtctcacaatttcagtccagcagcctggggacaacaacttcctccaccaaaagcaaatcctactgaagccagagccgtttcttctggtccgaggctacacatttgcaactatgagctcggcatcatcctcattattccaccatctgccatgtcaaagcagatcagtggaaggaggcacgagatcaatgacattgtcctgccattcgtcgtccctccaccgcaatataagctgggcgataggcctgcgacatcgttagccatgcgagaggccatggctgaagctagaattctgcagagtaacgatttagtactggacttgtcacaggatacagacgaggatatacctgatgaagatgatgagcatgtgattgagctgtctgattgctcccctgaagagaaggaagaggagaagatctacgcagagacgctgtgggagcaagtagactcttcacaaagaccaggctggccagtgaagttgaagtccagatgtttcggatgacaagttcctgtcatcgcatctgatttcaagtgcaggcagccgcacgagatctgacgattctttcttactgaagatatttgattcgattgtgatttgttagaattgtattttacaatgtgtagtatgcattcgttgtcaatctttcttgtaagtatctcaatacatctatacttgaacttcacagcgtatatagttgaagtttatttcaaaaacttttattgagctctaatctgaaattctgaatcagtctgctagtgctagggggtacatgttttacaccacagaagaatcacaaccgtccaaacagttctggacggtgtggatgcttcgcctggaacttgtgttcaccaccccaaaaaaataaaaataaaatccaccgtgtcaatccccacgccacaccagaggccacacgccacagccacaggaaacacacaagcaggcgacgtggcagccagagaggggctaagcctccaaccccacactcacagccgcgcgccgcaggaaaaaggtggaaaaccaccgcccacgcgggacgcgccgccgccgccgctcgccgccgcaccctcacgcgcagaggaggagcccccccgccggagcacctccacctgtttactctgagtgacatgtccccctcgccgctgctcgcccggccgccggcgccgtcgagcccgagcacgtacccgtccctcccgcctcgccggtgcgccccggctgtagcttccgcggcgctccgcgtggctccagccaccgcctcccgagccccattctccaggtaacccccccaccttctccctctgtctccttgttcactggctcactgcgaaatttgggctagagtttacagtgacgcgggtttctctttgatgccgcaggctggtgaccaagcggaatttcgctgcgtctgatattagagaagactactccactccgattgacgtcgttgccgatgtgaaaaccgagaaggcatgaacctgagcagctgaaattctatatcttgcttgttaggtagtgccgttttactccctcccccaacattctgaagcgtttctcgatgtcttgcagattgtggtgttgggagggagtggattcgttggctctgctatctgcaaagctgctgtctctaagggtattgaggttgtgagcctcagcaggtaccacaaccttttctcgtataccttgaaccaatcaccatatgttgtgtaggtcatcactactgagaaatgcaatttttttcatcatgttcctatatgtttccaatagcttccagtctagtcttattacctcacatttcgcaccttagcttgcttattttcgtaatcggatcaaccaacttggtctcgcagtgttaactttctgaaggtctttcttgcatgacttcttgactcttgggtaggctgtccagtgtgagctcctaaagtcttcatactcagcacaaaccatagttttgtatacacattttttattgagggtatgattattggcatcaggggggttagacaaagctttgaaaattggtgtgagtccgagaaaaaaaagagaacatgtatatactatatatctgactaccaaatctgcgttctgtcacatttgcttcacagtgtgtgttcatggcaggtcagggagaccatcttactctgatccttgggttgatcaagttacttggctagcaggtatgctttagttatgtaaatcttctgggttactggatccagcttactaacataagttcactctccaagcctagtagtgttttgttgttgatcgaaactggatatgctacatgtcatgatgctttgacctgcaaataatggctttatcaagtagattatagcgcaacttacaggaagaatgccaatcaccagattttatccagagataatacttttacagaaatatgtacattatgtgtaacagaatctgtggtactttactaactttatgattacgccattctttttacctttcgctttgttggccgatggcatgtctacagtatttctttctgcttgttgctgagttctgatagatgcatatattgtttgtttggaaacaactctgcacctaagtacttatcattgcctctttgttttggccatgattactggatttaacattattctcacagagaccaaacttgatttatggcctcagtaattccaccttaccatcttgttcctgtgacttagtcagatgactatattggatttccaagagtgtgatttatatactgtgtttattttttgctgctctgttcatttaagcatcttactatgttgcaggagatgttttctatgcaagatgggatgaagtgttagttggtgccactgctgttgtgtctacccttggaggattcggtaatgaagaacagatgaaaaggataaacggtgaggcaaatgtaacagcagtagatgctgcaaaagaatttggtaagtaccgcattatgacagtggtgtgccaatttgtttgcatatgcatatgacatcaggtgcatattatgcaattccatgcttaacctaagtttctttgagcagtcacactgaaagatactctttccttcgaattttataaggagaaattttacagtcattgataaagtacctcgaggtacctaaattctactctaatttttttagtaacttgaagtactaagtaattggagataccaaattctacactagaaaatgtagtacctcctggtacgttttcagtgatagtaaaattacccttttttgagggttctttgttttgcaatcatctgcaaattataatctgttcatgtattttgttgctattctcttctactattatttatttcgttctgttctgtaaaaaaataccaggactaaccacataaaagattgtcttatttttcgaaagaacctaatgatacattagtcattctcttctataatcttctcaatctcacaaatttcttaatctatgcatgggtcaaatcagaaaatatgccttgtaaaaattgactgaagggtgtaaaaattgactgaaggggtagtatattgtgctgtatgatgcaaatcaaaccaactggattttttaactcaaaatattcactcaaatgctctgataagtaccacacttgacaactcactgtaatgtgtctacgaggtgtcaacaaatcaaaatgaattactctatgttggtactatcattatgagaatctagagagaaaattgcagcaaatgtacccaccctattataaagtataggctcctacttttacttagttttgcaatttaccaagtttctaattactgtaaagctgacacatgctttgattttattgtagtttaaattatataaatttgtaagcctgaaacttgaaggtagtctggcacgcgttgtgaaataaatgaattttgctaggaaatttgttgtactgattactatgacagattaaatacctcaaacagctggaacttatccctcgtacaactgtgccactgtctcgttaacctactctttccttttttattgaaacggataaaataatgtaacatagcttctttggtgtattcttctgcaggaatccccaaattcattttaatttctgttcatgattacaatcttccatcctttcttcttaactcgggttacttcactggtaagagaaaggctgaatctgaagtcctctccaaatacccaacctcaggttagactatatttatgcctccaaaaaaactcactttacatttttgtcatgtttctaatctatatttttttaatcaggtgttgtactgaggcctggtttcatttatggtaaaaggaaagtagatggttttgagataccactcgatgttgtaggacaaccattagaaaagctactttcctctgttgaaaatttcacaaaaccgctgagttcattgccagcttctgacttactccttgcacccccagtgagtgtggatgatgttgcctatgctgtgatcaatggagttatagatgacagcttctttggtgtcttcacgattgagcaaatcaaggaagccgcggcgaaagtaagagtgtaaactgggagtctttattgccaagatggaagattcaaacatgcggctccttattaagagatatccctgttctgtcttgcactcttgcagtcttagatcatacattcaatggttaaagttaaattcaaaactttgtacagtgtatgaatgtggtgcttgttccctccaagcagagaggaagaatgggctttgatggcaaaggccaatgcgcttcatttcttacgagatgcattgccaaatgaatgttcttctggagtacttgtttaaggtggaagtaatcactgattctctgaacctaaccccgtattcaggttgacaccatatccatatgctcatatgcttaacatggacagtaaaaaaaaatttagataggttttgtgttacgagtgcccctagatatggtgttctatgatttttttagataggttttgtgttaagtgtgagtgaacttgttaacttatcactcgactgtgccgagtgctcttctgagcaacaagcacaactaaatatacacatgtaattaaatgaaaaatactcaaacaagcaccatgtaacaaatgctgttgattttttttggtcatttcaatgatacaccaatgttacatgttcatgtgat

SEQ ID NO: 9212 - DNA, 1337 bp, Oryza sativa
ccccacaacttgcttacctttgccctcatcttcatcttcagatccatcaaaaacttttatgagttcttgaattaaccactgcatgcagtgcttcttcttctccttctccttcatgttcttcttcttgttcacatcatcatctttgactctcccatcatcttccttcttgcctctcccaagcttaggacaatgcgagcgaatatgatcaagtgctctatactcaaaacaatgattcggttctcctgttttcctgttcctaacatttttcatagctcgagaaaatttgttagatagcaaaaccaagtcctcctcctcgaactgttcgagttgatcatcggacatggcattaaataaagcaagaacagaagactttgatgaagaagcaccaagatccaaagaagttgaagacgaaaccaaagcactagacttagaatcacctttacaagaaggaatattcatctcatgagttttcagtttagtgtaaagcgaatccaaagtcaaagtagacatgttaacagactcctgaatagatgtaactttcatctcccaaatagacatgtcaagaccattcaaaaagtgacgagaaatctcagattgtggataattagcatcataagaagaatcaacagatctaagatcactcaaaattttgttaaacctagagagatagtcatctaaagcttctccaggtttcatctcaaatttaatgtactcctttttgaaaagatcacgacgaagttctataatatttgaagttccttgatgaaagtttttcaaagcgttccaaatctcatgagcagtttcaagatgagaaacacgatcataatctgaacgagaaatcccactcaaaagaatattgcgagctttgcaattgtgttcaaattcaagttttaaagcatcaatattaatttgatcaggaatcacataaggatgagaaaattttctccaaatatcataatcctcagccataatgtaagattgcatcctactgcaccaatgagaaaaatctgttccatcgaaaacatgaggcttagttgaaaatctattagtagccatggcaaaaactctagatcggttaaaatccaaagaagaaaacaaggctctgataccacttgtaggatcgaatcacaagaactaagccaaccagaggggggggtgaatggttgatatacccaaaaaccgaaaacttttagcgcaaataaaagttaccctcaaaatcgatgaaatcggtctgaccgaagttgatcggccggtctgaccgcgcctattctgccggtctgaccggtgtagatcgctcggcttgaacgtcccgaagtcgcctctgcctatcgacgccg

SEQ ID NO: 9213 - DNA, 6205 bp, Oryza sativa
  unsure (1)..(6205): unsure at all n locations
ccacgctgccgcctctgtcgccacgccaccgtgccaagcgccggcccgatgccgccacaccgccgttaacaaacacgtgaacgagaacgaacacgtcaacgtacgttgccgcgagaacgtgaacgagaacgagaacgatcgaacgaacgagagtgagaacgaacacgtcaacgtacgttgccgcgagaacgtgaacgagaacgagaacgatcgaacgaacgagagcgagaacgagaacgatcgaacgaattaacgtgaacgagaacgacaacgaacgtgaacgagaacgaacgtgaatgagaacaagcgaacgaacgtgaacgagctagggaacgtgaacgagcgaacgaacgtgaacgaacgtgaacgtgaaatgcaatatatatatatatgctacttcgtatttatcctaatacatattttttgtatcttgcagaaaagacgtgctgtcggagtcgtccctcaagccagagtggaagagctagccctagaaggaattcgtgcaggcaagtgacgtaataatataaatgattgttatatttgtaatgcaattaagaatattagacttgtaattagacttagcatataagattgtgtagtgttctatattatttgagttttaatataagattattttattgcaaattagacttagtatgtaattattgactacggaattggtgcgactcctagcaattgactattgtagtcttaattagacttagcatatacgcacgaaacacttagcatacatgactattttagtcttagcatgtcatattatttgagttttaatgtaagattattttatttgtaattagacttactatataattattgactacggaattggtgcgactcctagcaattgacaattttagtcttaattagacttagcatatacgacagttacacctagcatacatgacttagattgttaaaacataaatgtctcgtgacttagcagatgtttcttgtatcaacagatggctgaccgcgatgaggaacaaatattgtacgatacaatcgcggagggaagcagccagtactggaatgaagaagaggggaacgaggatccaaaccagtacttgaacgaggaagggaacgtggagagggatgcggaggggaaccagcaggggcacgtggaaagggatgtggaggggaaccaggaggaggaggctagtggtagtcaaccctccgttggacagaagagggcacgtgggcaacgaggtgcagcgaagaagcttgagggtcggcacatcataacagaagtggaagaagatggacgtcctagtgccccggccgaagccgccaagaagtatgtacgtcacagcggttgggttgtgcgggataacgtgcctgtcagtacggtgtactggcgaagaacaagggcacgcggagatcatgagacctttgtcccagattcggagaaagagatgctgtggaccacaatgctcgagacattcacccttcctgcgggtacagaggacaaagtgaaaaggtggactctgaagaaaatggcagaacagtttcagagcttcaagggagatctgtaccagaagtatatcctgaaggggcagacaccgaacttcgacacattcccaaagctaagggatcactggtacgagttcgttgcatataaaacaggtgaataagggcaggcgatgatggaaagaaacaaagaaaatgccgccaagaagaagtaccatcaccacttggggtcaggaggctatagcgtcgcgatgccgaagtgggaggagatggaggctaggttgattgagaggggtatcgaaccggcaaccgccaattggccggaacgatcgaagttctagtactatgctcatggtggaatgctcaacccagctgatggctcactggtcttcggtgatcagatacgagaggctgcgcgacgactaacagatgcagtggaagcctcctctcagggcacgttccaaccggacagagatagggacgagctgacactcgccctgcagactccagagcatccaagacgaacacgagggaaatgggtgattccttggaagattggtttcaaggaggacatccacacgtacaggagtcggatgaggagcaagagagataccgaggcgaagattgcagatctagagttccgggtatcgagctacgaactcagcatgcaagaggaggtggcaaggaaggttgatgaacgcatggccgcacatcggtcctatgatccccagccgaccattcctcctgcaatggtgagcccgtcaggaaaccgtagcagctgcgcctcaacggggcaggtaggatcacagagcatggacgccatgcaaacacaggacgaatcgacctatcccattgatgacatcactcagcggacaccatgtgagctgcatattccttacaagaacttatcaataaaggtaagctcgtagtttatatattttagatttagccattccgctagttgctgcttatatatgttgattactaataaataatctctcacaacatgaaggtggtgtcgggcatggccatcccaacggacccttcaggtacataccactgcaggccgattccagcaggatactcgaaggtcaaagttgagttggtcgaaggcgcgtacgaggacctcgagctggattaccctggaggagacggtgagacgcatctacgagacacaagccatgccattattctatggcgcaggcggtacgtcatcctccctgggcgacaagcggcgtcttgtgcaccatctcctccggctccgccatctcctcctcaggatcctgcaccgtctcctcctcatgctccgccagcaccgtctccacctcaggctccagcaccgactcctcctcaggatcctgcaccgactcctcctcgggctcctacacctactcctccgcaagctcctcttccggcaccttcaaagtcaagggcccccccagctccaccgcctgcccacacaagggcaacgaagaaggcgaaagttgacgccgccaagaacaaggacccggggtacgattgcacgcaagaggagcttgacgcttacgttgcatcagaagtcaagagacaattcaagcctcgaagtccagaaaagaagattcctatagaccccagtgtcaggaacttcttcaggggtatgtctgcacctgtcaaggaggccatcaagctatcggactatgagcgaacgctgaagaaagcatcttctggaaagtccaaaccagtccctcagcttggagagcaaccaaaccaggagatcgagccgttggtgaccggggaagacatgacgatagaagaatttattattaataccggtctaactacggatcaattgctaggagttgaaccaatagaaaaggcagaattgaaatacatgtacgaactcggtaaaccgcttgtcaagcctgagctggtgcagtccctacccacacaaatgtacaagttccatcagctgtacatggagatgagcgccaccggtagagagatgatcggagcgaggatcagggacccggacttcttgcaaggagatgatattctctggatcaatttcaagggaatctacgaagtataccagctggatgccctcgacgtctctattatgagttgctggattttgtaagtatatcgttcagttatatttcttaattactacgtctcctttaattaattaggtccttgtatataagtaaactatataaaataaaatactcctttttatcgttgtagaatggagattcaaagggcccgacgacggagggttttcgatactggattcatcgaccctcggagagtaaacgtcgcaatgctcgaccaatatccacaagaaacagaggaaaatctcgtccatctcctgaaggcgcagcattacaagacgttcatactgttgccgtacaacacagagttagtttaattttactgtcttcctacataccaaattttattcccgtacgaacttgctaagtgtttcatatgtaatgcatcccacgcacattgcagattccactgggtgcttttactcttcgacctgtcggcctgcaccgtcaacgtatatgactcaatggataaaaagagtctacgtttgacaaggttttcgaacttatagacaggtactggcataagttcctctgttaattaagaaattattgttatgttaattatttctactacgaatcatatctttaaactccttgtagggcttggtatcggttccgtcatttggtccgcggcaactggagagaaagacttaggcggaggttcaaatttcctgtgagtacacatgctctacatttatatttctccgattcaaattaatacatacaagtgtatattaattagatctcacgccgttaatttgtcatttatttgtagtgcgcaaagcaaaagcagggaactaacttgtgcggctactacgtgtgcgagtattgccactgccttgcagaccaaatcatcaccacaagagagctcgatgtacgtacaaataaattcaaaatttcattacgtaacgatttcttgtttaattactaatcaatttcatacattcatatagtttattcgcatgagggataacctgaccacacacaaggaatttatcgcggcggttcaagaacaactcatgggattcatcaacgaagaaatccttgatcccaagagtgaattctactacgatggaaacacaattcaccggtccttagcttctgagctagcagtgagtactactactacgtcgaaatcgtagctagctaggacatataatggattgtaattaatacatgactacatatgtttctatatgcatgtgtacacattttctataatgtaaatatattttggtcatatatatatatatatatatatatatatatatatatatatatatatatatatatatatatgtatgcatatatatgtattgaaacatatatatgcatggtttatgtatatatataaaccatgcagcaacagggccatgcaaaaaaaaaaggtcagctcaacttttagtcccggttggtgttaccaaccgggtctaaagatcgatctttactcctggttatttcacccgggactaaagatagcgatctttagtcccggattggtactcccggtttggaaaccgggactaaaggggggttacaaaccgggactacaaagagtttctccaccagtgtgtcagcgccatgcatacgtataaaaccactttaaactattttttctcttaaattatttatccaaatcatgatctgattgcaccatttaattcgttgcaattaaatcttgaaaacaagaccacacatggatatattccggcgaaatttttttttagcttattattgaattatttttaaatgttgcacgatgttccaccaagtatatcggaattgtttcactaagtagatcgaaaatgtttcaatcgtttaaattgggcgttgtttcatcttatataaaaacaatgtttcaacaaatagcgaaagaatgtttcagttcactgcaacattagatctatacatagtgaaacattgtgagtacacgaggtgaaacattttgggtggaacaaaaaaatgaaacgaattcccttaatagagggtttccaaaatatgttggtgatttgttgtaaaagaatgtttcgttcactgcaacattagatctatacatagtaaaatattgtgagtatactaggtgaaacatttttggtggaacaaaaaataaaacaaattcccttaacagagggtttccaaaatatgtgggtgatttgttgcaaaagaatatcttaattcactgcaacattagatctatacatagtgaaactttgtgaatacactgagtgaaatatttttttgagacacgtggtgaggctaggggaacgtgcgcatgtggggggtgnagnnccgatcntgctccacccccgtcgatcgcccgggcttgagcattttcctttattatatcataatatgcttggttctaaaagtatattatagtagagatgactagaactcgaaatcatgcgcaaaatttgttggaaagagtccttttttttttttaagtatagcttccaaaattatatttcggacacggtgtgattccataaaggatatgttcatgaatgaatttatggttttttctcattaaacgcgaaccatatagtgcaaaaatgtccatgatacacttgttctggtatttattgcataatgtggctataccttatatattaattaattaattt

SEQ ID NO: 9214 - DNA, 1166 bp, Oryza sativa
ctattgtgcttgatgagaaggatcacactattgagattctaaatgctgaaattgatagattaaaatcttcaatttctgatgatgataattgttaatcttgtgaagttttattttctgaaattaatgctttgcgagatgccaattctgttaattgcaaaaaattggaattttagattgaaaaatctaaaacgttggaatcttcttttgcgattggatttgctttacatgctcgtgttgttgatgagttgattttgacaaagaacgttttgaaaaaatacaaagttgctttttgtgcaagttctttggtcaatgcttcatgtgtgaataaagcaaaacaaaacaatggtgttttgatttctcaagattgttcaaagtgtgttttgaatgagatgaagttgaaagatgcttttgggcgtgttatacacatggaagagattgttaatcaagatgaggtgttttcttgctcaacttgtagaaaacaaaaaggtcttttggatgcttgcaaaaattgtgctgttcttacacaagaggtttcttatttgaaaagttctttggaaagattttctgatggtaaaaagaacctcaacatgattcttgatcaatctaaggttagcacacacaatcgtggtttaggttttgatccttatgctcataattctagacatcctcctactgttttgggtgttgctaggagaggtgaaattttgattgaatctgagcctaagaacactgtgcttaaatctgctggcatcatgtcttctttaaatgcatcttcttcgaaatcaaatgttgtgaatccaaaaccttctgttgttgcaaaaccatcaatttcaaaaccatctacttcacaaacttgtcgtgaaaagtacacttgttctttttgtggaaaagatggacatttggttggtttttgttttagacttgcccataaacaaaaaaaggaaagagaaattgcttttgcaaaacaacgttggcaaaaatcgggttttaattcgaggaccatggttagaccgacactaactagtcggtcagaccggttgccaggcccggtcagaccgcaggcacagcagcggtcaaaccggccttagggtgattttgcgcgaaattcaaatcggacttttgtgaagcaaaacggtaaattttctggtaagtctgattctgatttt

SEQ ID NO: 9215 - DNA, 2297 bp, Oryza sativa
ttcctgcagcccattattaaaacaggcgagaactagtgatgcttgcgatgcatatatctgttagaataataatattccacagttttagatatactaaccttttgcagagaatgacaataaagtagaggagaatcgacatcaacacagacgataaatcaatcggacgatgtcgagaaccagacttgtgtatgatgggccaagaacgcagacttgacacgatgaatcaggccaaaattcacaagtctacgaagtgaagcaacagaggaggccgctagccgaaattgggctggattgggccagccccaggttcggccgaacctccctcgcctccgttggatccaggttttggatggacggtggagatgaagccgcaatgacggttggaggtattaccgactattccaaccgtcatagctgagctataaaaggacttcactctcttcacttcaacacacacctcaagcaagagctctctcattcctctcaagtttagtttagtagtatctagctggtagaatagaattagaataggaatcaggagtccggaagcgttcggaagagttcgggtatggctctagtagctttcctttcctcttttgtaagctttgtacttttattagaatactcttctatatacatttctggtattgaaatactttccgagtatatgagtacctactttacattatgttcatgttatgctgaatatactgctagcttatctgggagatgctttggtgcgggtatagtctttgcttatgcaattactctatgtcatgacgatgatattagagtagtatctgatagtttaggcgtgatgtctagattacgggatatcattatttggggttatatattgcggatgagaggtgggccgctgatggtaacagctcagtacgggtattccttcgcgcctatatataatcctaagttaatttcctggggagggtattcctccgtatttagccccggttgtatggcatgacggactgtcataaggaactcggcattcaggggtggcttctcgaagtatcaggagggcatcggatagagggtattagctagtataccagttaactagatgtatgtatactatgtatattagaagtataggaatagattctctttctcttttctttctacctagcttagattatttattatgaggatgagtagtaatggttgtgtgtcactctacccttggattatcttaacccctacttagaatatgattatcacaagtgatatataaattattagttgagttctctctacatgatcttcccacaggataaaataaatacgatacccttggaatactctcgggtgatatgctacaatagtatatccgtgcgcttgcaaatgaactctgtaaccataatataccagaagtatttatgcgccattgttgggaattatatttctaggaatgtcgttaagaaataccaacaagcgccgaccaccacgccgccagtctcctccaacaagacgcctgcacccaccgctgcgccgaccacccccgccactcggccgtggggcccaacaccccgcgcccgccgttgcacttaccaccaccttacccgctgcagtgccgaccacccccgccacctcggcccccaccacggcgcccaccgcctcagctccggccactgcggcgcctcctctccgccggtcgaggctcctgtcgctggtgccattgtccaccatcttggggatccctgttgcggcgcacggcgagcagccgccgccactggagctcggacagccctcctcgctcgcctgctcgccgtccacccgcctgtccgctccggcgctcaacaggaagaagagagagagaggggagacggaagaagagaggagtgaggatgaggaagaaatgagtgatgaaagggagatggaagggagtgaggggagatggaatggagagggatgaaagggagaggaagaaataagtgatgaaagggagtgaggggagatggaagggagagggatgaaatgagtgaggctgacatgtcgggccacgtgggccccaccattttaaataatttttttgtaactgacatgtgggcccatggtttttattatttttccgcgatagaattgccacataagcgccacgtcaatgccacatggaacgaagacctagtcaaacaagccacgtaggtgttgacggtcattatcgatcagtttcaaccgtcaatattaccaaaatagaggagaactagtgatgcttgcaatgcatatatatcttagaataataaaattccactatattaggtatactaacctcttgcagg

SEQ ID NO: 9216 - DNA, 1766 bp, Oryza sativa
tcctgcaccccgatgagttttaggagcagagaagagtttttgagaaaagcatgtttttggttcaattggaaatttctttcttttaaaaagggggagaagttttcttttggatttttgagcatgatgtgtacgtttgtacgaagtgtgttttttaccgcttttgtttttaattttccaaactccaaaacatttttaatgggtttgccaatgtgttcatcaagggggagattgtaagatcaacgtgtgttttgattcttattctgtgatgaacaattggcatatgtgattatcggttttgatatttggagattatcgtcgaagtggttttggagataatcagttttcaggagatgaaaagagtttactggtttgtcgggaccggtcagactgggcggttgttgccggttagaccggtgctatgtgagcggtcagaccggccggcccgtggtctgatcggccgacgctgtgtcggtttcggtttcggattgtttgtttggatattcgtgattgtttcatggttatggcttctagatggatactatacgtatgtaatactgttgtttgctaacaatgagtgaagttggagatagcttggtctcggaatatggtttctttctttgtttcatgtgtaggtgactcgatgcctcgggagagtatttgcggtgatggaccgggagtcggcttagtggtaagacgatgtccgtggtggtcagatatcatgcgggatactaagggtagagttgatgcacgtggttggtgaagattccatatggcatacgatggaggtattgtgtgcgtatgggggatgcggagtcgaatttggaaggagtccaaatttggtacgattggttatgtaaagtttctttcttgtactagagggttttctaaggtgtttaggactcttagtatgagtttggttcgtggctttaggctgcctacctcatgtataaatagaggggaagcgtgaggcttcccagtatcgcttttgagagcaattgagttaagttttaagttagggtttcgagtttagtcaaaatttttgtaaggagtgctattggtgcactttgtaaacacagagagaagtaataaagtcgtcatccactttaagagttcttcgatttgtgtttcaccaggtttcggcggtctaaccgacgactcatcggaccggcggcaaggcggcggtcagaccggcggaagcgaggcggtcagaccggcggcggcagcaggcacggtaggcgatctcggcggttcgaccggagttcgatctcggtcagaccggcgtgttccaggcggttagaccggtgcaactacttcggtcagaccgcgatccatcgatttcgagggtaacttttatttccgctaaaagtttttggttttagggtatctcaaccattcaccccccctctggttggcttagttcttgtgattcgatcctacaagtggtatcagagccacgtttgctctttttgatctttgccgatcttgagtttttgccatggttacttctaataaatttacaactaagcctcatattttcgatggaacggatttttctcattggtgtagtaggatgcaatcttacattatggctgagaattatgatctttggagaaaagtttctcatccttatgtgattcctgaagctattaatactgctgctgaaaaaattgcttttgaacaaaattgcaccgctcgcaacatcttttgagtggtatttctcattcagattatgatcgtgttgctcatcttcaaactgggctgcagga

SEQ ID NO: 9217 - DNA, 4474 bp, Oryza sativa
cgcgtcgcctcctcacaccccgccgcactgtgcgtgccgatgtcctcgccgctgagtgtgccacggccgcgccgcagtcatagcagccgcctccggcccccgtccgcgtgcgtgcgcgccgcctccgccgcccccgcctgatgtcgtgcgtgtgacagagacaggggaagagagacatagagtgagactgtgagagagagaagagagaggaaaagagaggatatggcaggtgggtcccatatttttttataaatagaatgctaactgaattgctacacgtacgccacgtagaccaaaaccaccgcggattgggtcgagggggggtaattcatccggtttgcatagttggggagggggggggtgaagaatgtcgtttttgtggtttagaggggtaattcggacgactgcgatagttcaggggggtaatttgtactttttcctattgaatattgaacattgaattctgaaactgaactggcattattttgaagaaaaaaataaagataagtataaaaaaatcccaatcatgttatcttattaaagataagtgatcagggttcaagttgatatggaaccatattattaaatgtttaattttgattattttcctagccatgtactgaagtattgtctaattaatgacaccggaatatgcaatttgacctctttgaattacttgacatttgaattttttctaccttagccatgacggttttgtaaggttgccttttatgatacctgtatagttagatgcaatctttaaccaatcgaagtagacgtttttgtgtatttttattttttttttacttttcagaaataaggaagaaacacaaattggaattgcaaaacttgatgctaacaaagcatccgaatagggcattacatttttttttcatgttagcaaatatcaatggtgtaattaatactactcacctgataaatacataaattccttggcaatgctactaccgagtcattttttttgctcgtgtgcatgaacattttattttcctcttctgatctcaagtcccaacccctattaatttatttctttaggtttctgcttcaacgtgttaagaaataaaaaaactactgatcataaacaaggctatttgataaagcagattaccctaatctaaattgggcgcggcaaggccgcgcgtctatgcatagtcagtactatagcctcactaatcctcgtcgaggaatctccttgccgccctagaagtttgagattgtgcctgactgttttggagtctgttcagcagctccttcagcgcctggggattgacgtcggactggagtcggctcaacatgaaatcaagcatggtatgatagtcttcttcacggagctcctctccattcttcagagtaatatcacacaatgtgtccagaatctgggcgtgacaggcgcaggctttttgtagagaactttcctttcaaagagagaggtttctagtgatccttggatccaaacgttttgtcccttgtggctttgcccatctcttgtattctgatcggagtcttgggtagttacgaggatttaaaatccattgctagtgtttccaggaacacaaagtatatgatacttggatctgaacgttttgttctgtttcttggaaaggctttctctgttttcaggaacgcacattcacctcgcgacatcagatcctttcaaagaaaactttacaaagacattggatgagagcatgttagacctgaaaacacaaactttacaaagacattggatgatagctagggtttcccttaccgtaaaccacgcggtaaccattggatgataacttcactcccccgcggtaagacagaaccgcgtggtaaccgtcggaaaccacgtgaaattcgttctcaaatatttgaattaaaaaatcgatggtttcagcgtggttactgtgcagtttcgcgtggtaaccacgaatatcgcgcgattaccgctaattgtgtagcagaacagagaagctgttagaaaaaattgaaaaaacatttaaattcatgtagaaattgggaataattagaagaatatagaggaaacttgcaaacataacttttggggtgtaaaatacaaaaaatcaatatgacctttttctatattatggacttcaacgcaattcaacatttcgtagcataataattcgacaacaataattcaacaacctcacatttgaaagcattatgatgtccacatgaagctgaaataatagagtccacaatagagagagcaatagagagagatgagaggaccaggagatattttctccacttataggccttaatggactggacagtagtacaagataagaccttattatttttttcatttctaatgtactttcggtttttccctcaaaattgaatttatctaattctttttcaaaaaaatttcttcaccatccgccactaaaaatgaagaactatatccacgattttttttcagttttttcagaattttgaatgtgggcaaaattcaccaaaccctaccaccggtaacccctaccgtaccccgcgataaacgcgcagttatcggcattaagagaaaccctgatgagagcatgtttagccttctccgttttgtagaaggaaataatataaaaatagctcctatataaagatattcatttgtttgtaatccaattgtgcaccaccaccgacaaaccctagaataggtgtagaataggtgatatttactggaccggcggcgtctcctcgagtaaaggcttccacccaaattgcatgactaacaggtcttacgtgtaaaggatcatgtacccatgattcaaaatttccttgccaagcgacataaaacagattacccgaaaaggcaaaaatgttataataaagacattcctcactaatatcatcatgacattggaaattaactaatatcatcatgacattggaaattaatctcaaaatcatgtgcggtagcgataccaacccaacaaaataaaaccagtagctagtgggggtccttagctatgccttggcactactagaaaacagcttttcacaggcggcctaaacaggtttttgcaggcggacgagtgcaactgaacgattgtgaaaatagttacttttcacaggcggacaactagtccgcttgcgaaaatagcacctggcattaaaaaaaaaaagggcagccaccgcccactgccgttccagccaatagcagtagctttccattctcctcccattccctcatccagattcaacatcaaaccaaatcaaatacacaaaaacataacagattaacagacatcgtagtggttcacaatcaaatcaaatcacaaattttccatggatgtcgtcatcgccgtcgcacggacgcaccccgccgccatctgccccgtgccgccggccggtccgcccgcccgccggcctcccccctccccccttcggccagatctgggagggagggagggaggggagccgccgccagccgcctcgcgccgtcccgcgccgccggcctccccccacccccctccggccagatctggagggtagggagggagagaagccgccgccggccaccccacgcccgacgccgttcgcccttcacccgacgccgtccgcccctcgcccgacggcatccgtccttcaccgccgtccgccggcctcccccaccccctccggccagatctggaggggagggagggaggggagccaccgccggccgccctgcgcccggccgccggtccgcgctttgcctgacgccgtccgcccttccccaccggcctcccccctcccccctccggccagatctggaggggagggagggaggggagccgccgccgaccgccccttccgccgacggggaggtgaaggggaggggagaggataagaggagaaggggagaggaaagacacttagaaaaatatcagcccacgtgccacatatatataccacgctaattttcgcaagcacactttatgtggtccgcctgcgaaaatagcaggcaccgcttaagtggtccgcagcgcccttcaccccgatttgcatttttgtaggcggctatttggctctaagggtcatgcccgtctgtaaaaataaatacctaatattggcgaaaatgctttttcagtagtgtggctaaacctgggaaacacacaactcatctagttaaataacatgtgcactaaccctcttcctagcttcaaaatgggattaatcggtgctactctagttagctaagcgaggtggtattattgccgctacaggtgttactgctttctaccttgccgagctgctatgcagctgcaactactgttgctcaacactagttggacaaaggcccaaagcctctgttgctgctgaaggcgagctaagcagcccactacctcaacataccctcatccttttttctcttttttttttcatcaattatttttggggcacaccacggttttactttttttcaagtgcaagtggcaaaagttattgccgaatatattagaaagat

SEQ ID NO: 9218 - DNA, 1332 bp, Oryza sativa
tccacagcatctctttctccgaatctgggacaaagctctcatgatctccgcgtgcccttgttctgcgccagtagaccgtactaacaggcacgttatcccgcgcaacccaaccgctgtgacgtacatagttcttggcggcttctgccggggcactaggtcggccgtcttcgtccacttccgttatgatgtgccgaccctcaagcttcttcgtggcacctcgttgcccgcgtcccctcttctgtccaacggagggttgacttccactagcctcctcctcctggttcccctccacatccctttccacgtgcccctcctggttcccctccgcatccctctcaacgctcccttcctcgttcaaatactggtttggatccttgttcccctcttcttcgttccagttctggctgcttccctccgcgattgtatcgtacaatatctgttcctcattgcgatcagccatctgttcatacaggaaacatctgctaagtcatgagacatttatgttttaacaatcttatatgctaacaatcatatgctaagtctaggtgacgtatattataggaccctagctagtcaataaattatatagtaagtctaattacaaatctaataatcttatattaaaactcaaataatcttatactaaaactcaaatagtgataaatgctaagtctaggtgacgtatattataggaccctagctagtcaataattatatactaagtctaattacaaatataataatcttatattaaaactcaaataatcttagactaaaactcaaatagtcatgtgtgctaagtgtaactgtcgtatattagaaccctacacaatcttatatgctaagtctaattacaaatctaataatcttatactaaaactcaaatagtgataaatgctaagtataggtgacgtatattataggaccctagctagtcaataattatatactaagtctaattacatgcatgataatcttatattaaaactcaaataatcttagactaaaactcaaatagtcatgtgtgctaagtgtaactgtcgtatattagaaccctacacaatcttatatgctaagtctaattacaaatctaataatcttatactaaaactcaaatagtgataaatgctaagtctaggtgacgtatattaaatccaatagtcttaattgcattacaaatataacaatcatatatataattacgtcacttgcctgcgcgaattccttcgagggctagctaccactccggcttgagggacgacttcgacaacgtcttttctgcaggatacaaaaagatgtattaggataaacgcgaagtaacatatattgcat

SEQ ID NO: 9219 - DNA, 5406 bp, Oryza sativa
aaattttaaagaaacacaccaaatcaaatcctttgaatgaattaactatgtataggtatttattatattttattaatgagaaaatgaaaacatgtgtatgtgagttttttacggcagtggcatttagttgaatccagatggcatcaggacaatatgattttgcacagattacaatttgacaattcgatcatatgacaatagcaaatatacaaatttctcaaaaatattagcggtgaaataatttgacaatagaggagctatcttataatgagcactatggccaagtcctttttagcttatttactggatatatgaaatgatttatttcttcacgctttaaaaatatgttttcttaaaaagttcctgcttagacatttactttaaattaccttttaagcttattccttaaaatatttaatttttccatctggtcaaatcactgtataatatgtggcaataatgtagctagattatctaaatcaaatggggtagatataccttgtaaacttctccatacccaccactgccaagtttgtgcttttctgagaaattgcctgtaattttttctaatagagcaaatgaaatatcccttggcccttccgacttgtcttccatgctattggcctcagacctacttgacctcttcgctcccacgtccctttcaactaatacaatttttttatgagtacattatacagtatatggttaaaaaaaatgcatggtgcataaacttcatgagcaaaaaatgatgaaaagctaatgaaagaatattttggtcacaaaattttaagagtaaacagccactgagtgtacggaagagttatcccctaccacactagtttgttctttccctagtatgaacggaaactacagtactgattgccttgtaacgttttattaacggaaactattataagcaaaggtatgagattgaccctactattactaataagaatctaaatatatatccaacacgatgcttgtatgatcttaaaatcctagattaattgtatcatcttcgtcttcatgtaattgtttgagatcaataaatctcattttacccaaaacattgatcttatgtattcttataaaatctatcttataatcttatatgttggttcgtctcaagacgttaattgaactaccctaagccgtatgtgaacacaaaacatatgattgtaaaaatacaggaaaaacaaaggaatgaccgtttgattaaaccgcaggaaaaacgcaggaattagatgagagagatagactcaaaggaaagttgtcaagaggttgaagctcttgctaaattttctccaaaatctctataagattgtccattccatagaaatctcaaaggattggatatgattcaatcctttgttttaaagggctccatagaaaatttttctataggattgaaatcttccaaaattcctatgtttttccttcaaatcaaaggggcccttaatatttatagtgtaatttctttcgttgttaagaagagtgggtcctagtcatgtccgctttatttttaacccacggctgatatccacctttttttctttcatctccattacgttttgccacagtcggactcaacagaaagttttgctacaccccaaaagttagcttaagagacaatggatttccccacgatcaaactcatcagcgcacgatcaatatgtcagcccaactagaaagacttaatgcatcccaaaagctaacccattagcgcatgaccgatatgttggtccaatcgggagaaagccttgctgcatcccatcagtgttaaataattattaagtaattattcaaaaacttttgtgaaatatgtaaaactatatgtatatatgtaaaagtatatttaacaatggtagaaaaagaattaataattacttcaattttttaaataagacaaacggtaaaaaaaagttaacgacgtcaaatatttagggacggagagagtacgagaaaattcgaaagtaaggaaacgacataagtgttttaagcagaaagaatatactctgtttcttcctagtacgtatatatctctccgtacgtaatctctagaaagaagaaagaaatctaaatactgaagtagtactatatcagtctatcagtatctagaaacgcattatataaaagaaaaattccagtatgcaacgaaaaaaagcttggtataagaacagatctatgtcaactaatcgatcggaaagtatataatgcgtgtccaattaacctttcttccacaaatggttaatttgaggggaataagtacctaattaggaacggttggatatccttggtctggccggcatgcaactgcaacggctgacggaggagaaagatcgagctatgtcgtcccggccttggttgctcgaatcctataatactatacaagtgatcctatgtagggtgtaattaatatcctaactatatcttgtatatagaagatgcaaggcgggggtgggtgcgcacgcgcgaggagaaggatcgaattaaggtgacttatcaatcctcggttagaaatttgacctgtcgtggtcaagtagacaatgcaagtaccaataattaagcagttgcataattgcatcaacatttcactctcaattataatagataattaatttcttgaccatgatcaagttatttgtcatgttttagcaaataaaaggtaggtgtgagtctttaactgccttttggtcggacgataactgtaattttatcccgcacgttttggatgtggatgagtaatacatcttcctttccccgaaaaaaaaaactacatgcatgcatatgcaggtgcatgtacgtgcgattagccggggtcaaagtccatgcaagaaaccggtgtgggtgctaatctttaattttgtccacgttatctactaaaacatttagaggtagtgtatacaatacgttatctctatatagtaattaactctaatacacagccacagtgttaatttattcgtccatctactcttcctctctctctccttaattttatcttgaagtttatataaaaattgtaggtagaaaaagatgttgtaagtgggttataggagttgccacctcacattttttctaagttaaaagaaagagaaaaggagagcgaaagaaaacgggttacaaatatgtagtcaacagtaacgctctataaggctttgtggagagagttagctgtaggactaattactactcccaccgtcttataaaatagaggattttggaggaagtcgaactcctatgctttcaagtaaaagcttgacgtgacgcctttggtccaaaatagttctagatgtgtcgcatccctctaaaatcttttatattttgggacagaggaagtattgatgtagtatgaatatgtagctaactattatatagatatgctacatagattaaagatgatatggcaatagatagagtaaagcatggtctctctcctctattctactcttatccgtatcatcaagttcttattgtaatttctctaattaatacttcttccatcataaaatataagcattttttgagtttttcactgggatcgagtaagaagagggatgaaattaaatggaaaggactatgattagtcgagattataggaagtaaatagaggaattgaatgagagatggttgtatatagcagaaataattaagaaagcagctggagaagtgggtatatttataataaaatttgaacgttaaagttgcaaaatttcaagacgaagggttcgagtaaataacaatatgaacatcaacaagttgccaaacctaacgatatgatagtattaatttatccagctaacaatttatgatcctagcttgttgcttcgtaagaacaagagaattgctaggaatcaattggaatactcccaaatcattagctcgcttatgtacctggctagtgcaactaggcctgatatctcctttgctgtgagcaagttgagccggtttacctctaacccgggagatgatcactggcgtgcgcttgagcgagtaatgcgctatctgaaaggtactatggaattggggcttcactatactgggtatcctgcagtactggaggaatatagtgattctaactggatctctgatgtggatgagatcaaagccactagtggatatgtcttcacactaggtggtggtgttgtttcatggaggtcttgcaaacagaccattttgacgaggtcaaccatggaagcagagctgacggcactggatactgctactgttgaggcagaatggctgcgtaatctattaatggatctgcctattgttgaaaaactggtgccggctattcttatgaactgcgataatcagacggtaattgtcaaagtgaacagttctaaggataatatgaaatcgtctagacatgtgaaaagacgattgaagtctgtcaggaaattgagaaactccggagttataacattggattacatctaaacagctagaaacctggcaaatcccttcacgaagagactatcacgaaatgtgatagacaatgcatcgaaggagatgggtttgagacccatatgagttatactatggtggtaacccagtctatgtgatcggagatcccgtgaattagaacctgggaagaacaagccattagttaactacagaagagtaccattctataccttctctaagtgaagatgcatgtactcttgtgagctgtaaggcagattggctatgccttaatgagttctgttggctttaattagcgaagatgctcctgcagagcattcttgaaagaagtcacctttgtgagcttgactattggtcacagtctatgaagatgttgggtgaatcttctaggaagcttactaaagaccaaggagtatggcttatacgctccacccgaggggtaatctacagacggtctagtaccagataaggctctgagtgaaacttgcttgcacaagacttacaattcaaggcgtagtccattgttcaagttgtgagtatgtgtagattggagttctaggtggatgttcaaccttaattggtctccatcgaaccgctagtatataaacagtacattggaaaaggcaaatctcagtgggattttgagctttggtgggggattgttggaattaatagatggggcttagcccattcgaagattaattctttagaaaatcacaaaagcctacctcatgggatggcatgcatggggagtttagtaccaccttgcatattctaggagaatgggacctccttaaaagggaggatgccctcctagccacttgaagcatatgtggtggagagaagagggggaacacaggcgcgcgctcgctcgcctggcctggcctgggcagggcagggcaggcggcgcgcgtacacgatgtacgcgtcgaatggtctgcaaaattggctcatcacccttgcgcagatgcagcctccttt

SEQ ID NO: 9220 - DNA, 1136 bp, Oryza sativa
gtacccatgaattcagaaccccagagtccgcacatcctcaaatacaaagcacttccctagttagatgtaggttagacttcccgttcgagaaactctaccttctacctgccctcaatttatgcacgattaatgaatgccacctgggtggaagcgagaggtggaaatggaaggtcttagttcggaggtgggatctctacctgatagttgcattgccattcatgatgatcccctggcattcgtccattcagccattcaccattcacccattcaactggaattttggttgaatgccggaattgtgtccacaaattgtggatggatagttggttggctggctggatggctggctggatggctggctggatggatggtgaatggctggcggcggttcggttgctttgaagcatttgttgctatctaaattccatttaaggtcgtaccttatcgcccagcatcatcttattctctatttggattccctccatctttcagatacggatgtagccttggatgtgcccgtgcccaatgaagaggaagagcgcaacatgaaacgtaagtacaaaagtaccggacacccacccagatcccaatagaatccgccaaatcctgcgggaaattgtaatcccattcaccagctcctacatttaattaacaagagaactattgtatttatctaacacctggattatctccacctttcatttgatccctatttatagattacgctgcgttgctaacgggccgcacctcctatttcctcaagggtgaggaaatgaagtccatgtacaccacctacaatccgcagaatgtggtggccaccgcccgtttcctgttccacaagaagaatctatactactccttctacacctcatcgcgaatcggtcgtccgcgtgccattcaattcgttgatgatgcgggtgtaatcctggaggagcatcaactggagaccaccttggcgggcactctcagtgtctatcagaatgccacgggcaagatctgcggtgtctggcgacgagttccacgtgattacaagcgcatcctgcgcgacgatcgtctccatgttgtcctcctctggggcaacaaacagcaggccgagttggctctggccggaaaggtggccaaatacgcggccctgc

SEQ ID NO: 9221 - DNA, 6812 bp, Oryza sativa
atatggcgtttctaccctcattaacatatattctacttatacttgggacgggtagaaacgccatatcgtgtgcgtggctgggataaagacggacggaaaacgatcgagaattgacggaagtgttgaaaatgggaatggggtgaactttgggtgttattaaagtgaaccggtatctttcggttctataaatttaaaaacgtgaactttcaatgctatataaccaatttttccttttatttaatggttcagcgagaatgatgcaatatttgtgtaaaaaaattacatccgaagtatttctgagataaaacacaaataaatagtatacttttaaatttaattctcactttacgggcagaacgcatggagtacttcaagagaatcttaacacataccaaagtaaagggaggaaacgatcaatgttactgttttttaatcgaagtgcgtgtggagtcaaattgtccttttatgtacattttcgaaccaaattctaatacataaaaaggtatgtttctggaacaatagttacatgcaagcttacaacattatgcggttttcttatcaaccccacatgcccaaattcaggataatgctagctttggatgtgattgatggctcacttgcgttggcctgattcttcgtgcattgcattacataattgatacggcctgctgcacattaggcataatttgacaaaaccaatcagtggtagaggtatgtgcttctccctttccatcattttacctcaattgcaactcggcgtatccatggacaactgtcaatgagcttagggatacagagacccgttgtcatacggtagctccctaatagctcaacaaatgtgcactgcagtgtcaagacacgtgtgtctgttttccaatgtcacccattctcgaaatacagcctaacatctagcatgctgtctgtattttgatattttaacgagggttattatgagaacgctcggctatttagcatgtgaccgacgggatatatatttaagtaagtgagaattattagataccacttggaaatggttataagtggccgatggaccatattagtaaccgagaggtttaatactgtagttgggtcatcagcgaggcagtgtgccagaaaccatagttaatcacctcagctccggccgtgaactgtctgagctttatgaaggtgacaggacacagggctcaggcagtcagtacccttctactgcctgatccagttgatggtgggaagaacttgtaagatcaacatgtgttttgattcttattctgtgatgaataattggcatctgtgattattggttttgatattggagtttattgtcagagtggttttggatgattggatttacaggtgctgttattttatgtggtccggtctgaccgggcgatggttgccggtcagaccggtgctatgcgagcggtcagaccggccggcccgcggtctgaccggccgacgctgtgtcggtttcggtttcgggttgtttctttggatatccgtgattgtttcatggttatggcttctagatggacagtatacgtatgtaatactgttgtttgctaacaatgagtcaatttggtgatagcttggtctcggaatatggtttctttgtttgtttcatgtgtaggtgacttgatgcctcgggagagtatttgcagtgatggaccgggagtcggcttagtggtaagacgatgttcgtggtggtcagatatcatgcgggatactaaggctagaattgatgcacgtggttgatagagattccatatggcatacgatggaggtattgtgtgcgtatgggatgcggagtcgaatttggaaggagtctaaatctggtatgattggttatgtagagtttgttccttgtactagagggtttcctaaggtgtttaggactcttagtatgagtttggttcgtggctttaggctgcttatctcatgtataaatagagggggagcgtgaggcttcccggtatctcttttgtatcgcttttgtatagcttttgagagctagtttagttagggtttcgagtttagtcgagatttttgtaaggagtgctgttggtgcactttgtaaacacatagagaagcaataaagttgtcatctactttgagggttcttcgatttgtgtttcaccggtttcggcggtctaaatggcgacttaccggcggtcagaccggcgcatcagggcggtcagaccggcggcgtacctgcggtcagaccggcggcggcggcgtcgataggcagaggcgacttcgggacgttcaagccgagcgatctacaccggtcagaccggcagaataggcgcggtcagaccggccgatcaacttcggtcagaccgatttcatcgattttgagggtaacttttatttgcgctaaaagttttcggtttttgggtatatcaaccattcacccccccctctggttggcttagttcttgtgattcgatcctacaagtggtatcagagccttgttttcttctttggattttaaccgatctagagtttttgccatggctactaatagattttcaactaagcctcatgttttcgatggaacagatttttctcattggtgcagtaggatgcaatcttacattatggctgaggattatgatatttggagaaaattttctcatccttatgtgattcctgatcaaattaatattgatgctttaaaacttgaatttgaacacaattgcaaagctcgcaatattcttttgagtgggatttctcgttcagattatgatcgtgtttctcatcttgaaactgctcatgagatttggaacgctttgaaaaactttcatcaaggaacttcaaatattatagaacttcgtcgtgatcttttcaaaaaggagtacattaaatttgagatgaaacctggagaagctttagatgactatctctctaggtttaacaaaattttgagtgatcttagatttgctgatttttcttatgatgctaattattcacaatctgaggtttctcgtcactttttgaatggtcttgacatgtctatttgggagatgaaagttacatctattcaggagtctgttgatatgtcttctttgactttggattcactttacacaaaattgaaaacacatcagatgaatattctttctcgtaaaggtgattctaagtccagtgctttggtttcgtcttcaacttctttggatattggtgcttcttcatcaaagttttctattcttgctttggttaataccatgtccgatgagcaactcgaacagttcaaggaggagtacttggttttgttatgtaacaaagtttctcgagctatgaacaatgtcaggaacaagaaaagaggaggtcctaatcaatgctttgagtgtggtgcacttgatcatcttcgctcgcattgtcctaagtttgggagaggcaagaaggaagatgatggtagagtcaaagaggatgacgtgaacaagaagaagaacatgaaggagaaggagaagaagaagcattgcatgcagtggctaatctaagtaatcatagcagcttttcatgaatcggaaggtgaagatgagagcaaaggtaagcaagttattgatctagcttttattgctcgtaatgcaaattctgatgttgatgaatctgatagtgaagaaaagcttagttatgatgaattggaatatgctgcttacaaatttgctaagaaacttcagacatgttctattgtgcttgatgagaaggatcacactattgagattctaaatgctgaaattgatagattaaaatcttcgatttctgatgatgataattgttaatcttgtgaagttttattttctgaaattaatgctttgcgagatgccaattctgttaattgcaaaaaattggaattttagattgaaaaatctaaaacgttggaatcttcttttgcgattggatttgctttacatgctcgtgttgttgatgagttgattttgacaaagaacgttttgaaaaaaatacaaagttgctttttgtgcaagttctttggtcaatgcttcatgtgtgaataaagcaaaacaaaacaatggtgttttgatttctcaagattgttcaaagtgtgttttgaatgagatgaagttgaaagatgcttttgggcgtgttatacacatggaagagattgttaatcaagatgaggtgttttcttgctcaacttgtagaaaacaaaaaggtcttttggatgcttgcaaaaattgtgctgttcttacacaagaggtttcttatttgaaaagttctttggaaagattttctgatggtaaaaagaacctcaacatgattcttgatcaatctaaggttagcacacacaatcgtggtttaggttttgatccttatgctcataattctagacatcctcctactgttttgggtattactaggagaggtgaaattttgattgaatctgagcctaagaacactgtgtttaaatctgctggcatcatgtcttctttaagtgcatcttcttcgaaaacaaatgttgtgaatgcaaaaccttctattgttgcaaaactatcaatttcaaaacaatctacttcacaaacttgtcgtgaaaagtacacttgttctttttgcggaaaagatggacatttagttggtttttgtttgacttgcccataaacagaaaaaggaaagagaaattgcttttgcaaaacgacgttggcaaaaatcgggttttaattcgaggagcacggttagaccgacattgtccaatcggtcagaccggccagcggtcagaccgcaggtgaacgggcggtcagaccggttaccaggcccggtcagaccgcaggcacagcggtggtcagaccggtctcggggcagtttttcgcacaattcaaatcagacttttgtgaagcgtcaaggtaagttttcaggtaagtctgattctgattttgttagtgcttttgtacctactggttctactggtcgtgtgacttagtgttggattccaaaatttcttatttctaaccccaacacggaggtctcgacatcttcacgtttgtaggtattttggtggcatactccccatgtgcgttcaatgttgagatgacgattgcttttcaaggtaacatcaatttacttttggattgacataatattgttctactttcttgattattagcttttcatgtgctagtgtttgagattgtagtttttgttgatactaatgaatgtatgtcaattttgagagtatttgtgatatctttggcaattggatgtcaatttttcaaaatctttgattttttcttgttttttgttcgaggagaattggaggttattttgagggggagttagtgcttattcgtgaatttcttttggcatggtttgagggggagtttgtacctcatggttttatcaagcaataatttgacaatgaaaaaattgataaaagagagctttgtttatgcatatggtatttttttgtgcatgctagcaatactttgaaggtttatttgtctctagcatagcttgtatgcattctagtcttttcatgagatttagattttgcttttaagggagatgatgcatgacacttaaattatacttgaattaagtaaatatgcaatgttgatgctagtatatggtttgatttttaaatgctttatatatatgctttattgacttgttattcctcaaatagctttaattgcttattgtgaaaaagagaataaaaatataaaaaaaatgaataccaaatccttggaaacaatcttgacgacaaggacatattcgatgtgagcaaaataatgggtgccgaatccctggaaacagtcttgacgatagggacgtactcggaataaaaaaagagaaaaatataagcaaaaaggctcaagaaaagaaaaggttaaaaattctctttgttattttgtgctaaaggttatttgagaaagagtgataaaagcaataggtatatgtgtttagtgtttattctttaatctatgtgcttgttaagatgttgcattataaatcgtttgaaatcatgaattttgattgttgaatcaagcttaattgtaaaatctttaattcatggttatactttaatgcatgcttcttatattatagatggattcatcttctttttattgcaacacatgacatgatatgttatatgtatgttaagctcttatacattaatgaacataatttctatgcttgatgaaatcatttttaaaagggggagaaataatgtgaaaatttttggatcttttggagaagagataagttttggagagaagagttgtgttttgggagaagagaagagtttttgagaagagcatgttttttttattcaattgggaatttctttcttttaaaagggggagaagttttcttgtttttggttcaattgggaatttctttcttttaaaaagggggagaagttttcttttggatttttgagcacgatgtgtacatgtgtacgaagtttctttcttttaaaaagggggagaagttttcttttggagttttgagcacgatgtgtacatgtgtacgaagtgtgctttttaccgcatttgtttttaattttccaaactccaaaacattttaatggatttgccaatgtgttcatcaagggggagattgtaagatcaaagtgtgttttgattcttattctgtgatgaacaattggcatctatgattattggttttgatattggagtttattgtcaaagtggttttggatgattggatttacaggtgctattattttatgtggtccagtccgaccgggtggtggttgccggtcagaccggtgctatgcgagcggtcagaccggctggcccgcggtctgaccggtcgaagctgtgtcggtttcg

SEQ ID NO: 9222 - DNA, 10800 bp, Oryza sativa
cgatcgagaattgacggaagtgttaaaaatgggaacggggtgaactttaggtgctattaaagtgaatcggtatctttcggtgctataaatctaaaacgtgaactttcgatactatataaccaattttgccataaataaaaataacgtgggtgctacgatgcggccgatatcgtgcggtgacagaccgcacggttgcgcagttcggaacaacgagaccgaactgtctcgcacatgtaactagcgtgactgaacgtccatgtccaacggctccactttagttagcgattaattacctaattaatgattaactgataatatttagtgaacagacatcctgatttgcaattattaatcattaaaaaagataattaatcaaattgaagcgcccagcctgttgggtctccctcgctggtcatgcgagaccactcgcgtgatatctagcggtctcgcaccgtcgccatgcgagaccatccgcatagtcatgccccagacattttcacacaagagttatgtgagattgatgatatatttctatcaaataaattgcatctgaatattaatgagaaaaaacaactgtataatatattttcaaatttaattccgtgaagtgatcgtcgtgggcccaacatcgatgcaccaaccgatctctacacgtgctgcgcccattccgctgagtccatcactgctacctatagtgccaaacttatcttaattcagtgcatgccgcaacaatagtacatctttaggtttatcgctgatactaagtaagggtgtccgttctaacatggaaattcatagtatttttgaaggaattagaaaaacatctatatttagtccctcaaccatggctactgtattatttttaactataaaactatttacttttggcccctcgatcaactctcaaaaccatccacattgcatccaaagtggggtggtttttgaaaagtgggtaaaaatcagcgtattacagcatctctcgttgcttgtttacttaaattttctggaaatgaccattttgcctgaacatgataacgtggaggtggtcagctacaagtcctttcctagccatgaaaaatataacgtggtgatagcttgcatacaattatctttgatattaactacttccatagcattatacatatttatgatcaaaattacggagaataagttgcctatgattcactaatggtgctagttatttattgggtgttttcaatgtttggttgaactacactcttgtttaattactactctgtaataattggctgcagctctcttgagcaaagaccgggatgttatatttcattatctaaaaaaaagttgttttatcacaaagcacgaaaaaaaatgcggcatgtgtgtacatatttagacaaaaacaacacatcatattcacttaagagcgaaatagtttagtgatgtactattgggcaaataagtaacaaaagtgaatatagtggggcaatagagggagagacaaattctacgatggcaaacacgggaagctatcaacttctacgagtaaataaagggtttacttgataggttttttttattggacctatcatgtactttgtcatcaataattatctactttttttacctccaaattgactctattgcaaccatcaacccaatttggatacttcgccttccttcccctctcatatttgtatccatcagtgaataagggatgcttcctctatctacaaaataactataagtgctaattttatggacttttcagttatgtagcttgtatactacagagagtgtgctagaagctagactgtatttgagaatgggtgacattggaaaacaaacacatcgtgtcttgacactgcaatgcacatttcttgagctatccctaagctcattggcagttgtgcatggacacgccgagttgcaattgaggtaaaatgatggaaagggagaagcacatacctctaccactgtttggtcgatagaattattcctaatgttcagcaggccgtatcaattatgtaagaatcaggccaacgcaagtgagccatcaatcacatccaaagctagcatttgggcctgtggggatgagaagaaaaccgcatactgttgtaagcttgcatgtaacaattattccacaaagatatctttttatgtattagaatttggtttcaaaaatgtacatgaaagcacttccattaaaaaacagttgcattgatcgcttcctccctttcctaatttgcgatgtgttaagattcgcttgaggtactccatgccttctgtcgtgaggtgatcatcacgggcgcagcatcgatacgccagctgatctctacatcatgcaagcttcagctctggacataccgtgcccattccgctgagtccaccactgtgctacctatagtgccaactaccaagcttagcgttgattcagtgcatgaggcaacaatactacatctttagatttatagctgatatttacgcaagggtgtcctttctgtaagatcaacgtgtgttttgattcttattctgtgatgatcatttggcatatgtgattatcggttttgatatttggagattatcgtcgaagtggttttggagataatcagttttcaggagatgaacagagtttactggtttgtcgggaccggtcagaccgggcggtggttgccggttagaccggtgctatgtgagcggtcagaccagccggcgctgtgtcaatttcggtttcgggttgtttgtttggatattcgtgattgtttcatggttatggcttctagatggatagtatacgtatgtaatactgttgtttgctaacaatgagtcaagttggagatagcttggtctcagaatatggtttctttgtttgtttcatgtgtaggtgactcgatgcctcgggagagtatttgcggtgatggaccgggagtcggcttggtggtaagacgatgtccgtggtggtcagatatcatgcgggatactaagggtagagttgatgcacgtggttggtgaagattccatatggcatacgatggaggtattgtgtgcgtatgggggatgcggagtcgaatttggaaggagtccaaatttggtacgattggttatgtaaagtttctttcttgtactagagggttttctaaggtgtttaggactcttagtatgagtttggttcgtggctttaggctgcctacctcatgtataaatagaggggaagcgtgaggcttcccagtatcgcttttgagagcaattgagttaagttttaagttagggtttcgagtttagtcaaaatttttgtaaggagtgctattggtgcactttgtaaacacagagagaagtaataaagtcgtcatccactttaagagttcttcgatttgtgtttcaccaggtttcggcggtctaaccgacgactcatcggaccggcggcaaggcggcggtcagaccggcggaagcgaggcggtcagaccggcggcggcagcaggcacggtaggcgatctcggcggttcgaccggagttcgatctcggtcagaccggcgtgttccaggcggttagaccggtgcaactacttcggtcagaccgcgatccatcgatttcgagggtaacttttatttccgctaaaagtttttggttttagggtatctcaaccattcaccccccctctggttggcttagttcttgtgattcgatcctacaagtggtatcagagccacgtttgctctttttgatctttgccgatcttgagtttttgccatggttacttctaataaatttacaactaagcctcatattttcgatggaacggatttttctcattggtgtagtaggatgcaatcttacattatggctgagaattatgatctttggagaaaagtttctcatccttatgtgattcctgaagctattaatactgctgctgaaaaaattgcttttgaacaaaattgcaaagctcgcaacattcttttgagtggtatttctcattcagattatgatcgtgttgctcatcttcaaactgctcatgagatttggattgctttgagtaattttcatcaaggtacaaataacattaaagaacttcgtcgtgatcttttcaaaaaggaatacattaaatttgagatgaaacctgtagaagctttggatgactatctttctaggtttaataaaattttgagtgatcttagatctgttgattcttcttatgatgctaattatccacaatctgagatttctcgtcactttttgaatggtcttgacatgtctatttgggagatgaaagttacatctattcaggagtctgttaacatgtctactttgactttggattcgctttacactaaactgaaaactcatgagatgaatattccttcttgtaaaggtgattctaagtctagtgctttggtttcgtcttcaacttctttggatcttggtgcttcttcatcaaagtcttctgttcttgctttatttaatgccatgtccgatgatcaactcgaacagttcgaggaggaggacttggttttgctatctaacaaattttctcgagctatgaaaaatgttaggaacaggaaaacaggagaaccgaatcattgttttgagtatagagcacttgatcatattcgctcgcattgtcctaagcttgggagaggcaagaaggaagatgatgggagagtcaaagatgatgatgtgaacaagaagaagaacatgaaggagaaggagaagaagaagcactgcatgcagtggttaattcaagaactcataaaagtttttgatggatctgaagatgaagatgagggcaaaggtaagcaagttgttgatctaggttttatttctcgtaatgctagttcggatgttgatgaatctgatgatgataatgaagaaaagcttagttatgataaattagaacttgctacttaaaaatttgccaaaaaacttcaaacatgttctattgagcttgatgagaaggatcacactattgagattttaaatgatgaaattgctagattaaaatctttgattcctaatgatgatgaatgtaaatcttgtgaagttttgttttctgaaattaatgctttgcaagatgtcaattctgttaattgcaaaaaattggaatttgagattgaaagatctaaaatgttggaatcttcttttgctcttggatttgctttacaagctcgtgttgttgatgagttgattttgaccaagaatgtgttgaaaaaaatacaaagttgcattttgtgcaagttctttggtcaatgcttcatgtgcaaataaggcaaaaacaaaacaatggtgttttgatttctcaagattgttcaaagtgtgttttgaatgagatgaagttgaaagatgctttagggcgtgttaaacacatggaagaagttgttaaacaagatgaggtgttttcttgctcaacttgtagaaagcaaaaaggtcttttggatgcttgcaaaaattgtgctattcttaatcaagaggtttcttatttgaaaagttatttgcaaggattttctgatggtaaaaagaacctcaacatgattcttgatcaatctaaggttagcacacacaatcgtggtttaggttatgatccttatactcataattctagacatcctcctactgttttgggtgttgctaggagaggtgaaattttgattgaatctgagcctaagaacactgtgcttaaatctgctggcatcatgtcttctttgaatgcatcttcttcgaaatcaaatgttgtgaatccaaaaccttctgttgttgcaaaaccatcaatttcaaaaccatctacttcataaactggtcgtgaaaagtacacttgttctttttgtggaaaagatggacatttggttggtttttgttttagacttgcccataaacaaaaaaaggaaagagaaattgcttttgcaaaacaacgttggcaaaaatcgggttttaattcgaggaccatggttagaccgacactaactagtcggtcagaccggttgccaggcccggtcagaccgcaggcacagcagcggtcaaaccggccttagggtgattttgcgcgaaattcaaatcggacttttgtgaagcaaaacggtaaattttctggtaagtctgattctgattttgtaagtgcgtatgtacctattggttctagtggtcgtgtgactcagtgttggattccaaaatttcttatttctaaccccaacacggaggcctcgatatcttctcattcgtaggtattttggcagcatactcccgatgtgtgtttaacgttgagatgacgattgtatagtaaggtaacatcactttacttttggattgacataattttggtctactctcttgtttgttagcttttttatatgctactatttgaggttgtagttttggtttatactattggatatatgtcaattcttgagaattttggtgatatcattggcaattggatgtctttttcaaaatctttgatttcttcttgatttttgttcggggagaattggaggttattttgagggggagctagtgctttttatgactttcttttggcatgatttgagggggagtttgtacctcatggttttatcaagcaaaaatataacaatgaaaaaattgagaaaagagagttttgttctatacatatggtattttcttgtgcatgctagcaatactttgaaggtttatttgtctctagcatagcttgtatgtattctagcattttcatgagatttagattttgcttttaaggtagatgatgcatgacacttaaattctatacttgaattaagaaaatatgcaatgttgaagctagcatatggtttgatttataaatgctctctatatatgctttattgaattgttattcctcaaatagctttaattgctcattgtgaaaaaagaataaaaatatgaaaaaaatgaataccgaatccttggaaacagtcttgacgacaaggacgtattcgatgtgagcaaaataatgggtgccgaatccctgaaaacagtcttgacgacagggacgtacccagaatataaaaaagagaaaaatatgagcaaaaaggctcaaggaaagaaaaagtaaaattctcttggttgttttgtgcagaaggctaatttgagaaataatgataaatgcaataggtatatgtgtttagtgtttattcttcaacctatgtgcttgttaagatgttgcattataaattgtatgaaatcatgaattttgattgttgattcaagcttaattgtaaaatctttggttcatggttgtactttaatgcatgcttgttatattatagatgggttcatcttctttttattgcaacacataacatgataggctatatgtatgttaagctcttatacattaatgaacataattcctatgcttgatgaaatcattgtcaaaagtgggagaagagataagttttgggggaagagatgagttttaggagcagagaagagtttttgagaaaagcatgtttttggttcaattggaaatttctttcttttaaaaagggggagaagttttcttttggatttttgagcatgatgtgtacgtttgtacgaagtgtgttttttaccgcttttgtttttaattttccaaactccaaaacatttttaatgggtttgccaatgtgttcatcaagggggagattgtaagatcaacgtgtgttttgattcttattctgtgatgaacaattggcatatgtgattatcggttttgatatttggagattatcgtcgaagtggttttggagataatcagttttcaggagatgaaaagagtttactggtttgtcgggaccggtcagactgggcggttgttgccggttagaccggtgctatgtgagcggtcagaccggccggcccgtggtctgatcggccgacgctgtgtcggtttcggtttcggattgtttgtttggatattcgtgattgtttcatggttatggcttctagatggatactatacgtatgtaatactgttgtttgctaacaatgagtgaagttggagatagcttggtctcggaatatggtttctttctttgtttcatgtgtaggtgactcgatgcctcgggagagtatttgcggtgatggaccgggagtcggcttagtggtaagacgatgtccgtggtggtcagatatcatgcgggatactaaggctacagttgatgcacgcggttggtgaagattccatatggcatacgatggaggtattgtgtgcgtatggatgcggagtcgaatttggaaggagtgcaaatttggtacgattggttatgtaaagtttctttcttgtactagagggtttcctaaggtgtttaagactcttcgtatgagtttggttcatggctttaggctgcctacctcatgtataaatagagggggagcgtgaggcttcccggtatcgcttttgtatcacttttgagagcaattgagttaagttttaagttagggtttcgagtttagtcgaaatttttataaggagtgttgttggtgcactttgtaaacacagagagaagttataatgtcgtcatccactttaagagttcttcgatttgtgttttactgggtttcggcggtctaaccgacgactcattgacggtcggaccggcggcaaggcggcggttagaccggcggaagtgaggcggtcagaccggcggtggcagcaggcacggcaggcgatctcggcggttcgaccggagttcgatctcggtcagaccagcgtgttccaggcgttagaccggtgcaactacttcggtcagaccgcgatccatcgatttcgagggtaacttttatttccgctaaaagttttcggtttttgggtatatcaaccattcacccccctctggttggcttagttcttatgattcgatcctacagaactgaaagaagaatagaccaaattccctcggcgttaattggacagatggtgataggacatttggcagaactggaagaactggcatgtccgttaggatcccccatcatctgatgaattgaggcagcaacttacatttagtatagttagagcatcttcaacagcatatccaaatcagattctccaaatacacatataaccaactctccaactgatttggatagtcaaactaggtgctcactctaacagtctccctattttaccatctccaaaataacaaatggcccgcatatatatcagtctctcttccttttctttctttccatcttcctcttcacctgctagggaaatggacgagctgacgacgggagtctacggtagggatgattggcggcggcgataggggcagcatcggagggtggtgacagatgcgaggcatacagtggcgaatggtgacggcggtagtggctggcgggatagatggtgtcggcagcgcggatgttggcccagacctcagcgaggatagcagccgcaacgcctagtgagctgcacggcggcgaaggtcacgtcacccctcgaatccggtagtagcgtaggccgcacggggatggtggttgcgatgagtaaatatttgtagctagaaagctagttgagacttaaagaggcaagtattcaccaatataatgccagagaaagttgactaaaattggagagtaaacaagcgattaattaatatttatatttctcgatgcccatgtggccaatcttgtgtggaagaatggagagtcacgcattaaatccgagaaagtcattaagaggataggttgttagattgaaatatacctatcaaaaataatttttttagatttgaaaatatgactttcaaaaatagatggagtaaaacccaagagatcctgcaacctcttgcctaccagttaaaatatactgacgactagtactctactactaactagctagctacctcacaaaacactaattaagccactggctttgcccataaaagtataaattagttggacatggtgtcatgaaacatttgatgaatgccatataccgaagatcagagccatcccttcgtggtggactggatcctatttacataccccatgcatatattctccactgtatttcactcagcatgaatttctttattaggaaccgaaagttggagatcattctttgtcaattaaactacaaacaattggaatgcgcagttgggcattataaacaatacctaaaatttgtattcaaataaatccgtggggactgtaattcagtaattgtaagcactgcgtgaaactagggtgtttttgtccaatatataggctactttgcattgcagaaggttgtagcagattaaatatataggctactgaaattcaaatatatgttgttgcaccgcatagcagtttattttaggaaggaagcatggcaagtccaatatatataggagtgtgccgaattagccatcaattttggtgggactaataaatggatttgttagtcctatgtaattaagtttatggcaagttaaattatttattttacaaattaacaagtacgcatgcatgccatatacatatgtaagttaacagattttaattaattagacagtgagggtcctaatgcgtgttagtaagcctgtgacatgacctgccgagatgtttgagggattctacaaaccctgatatgaattcttttaatttgaacctcacaggtagcaaaaggctactaataatctccgtcccgggtcgagccattgccgtgcatcccattgtctccacatagctcagatggttcatggctgtccagcggtgaggacaggtgctcatttggtgctgtcataggcgatggcttgaccgcatgactaatgcatgatagcttgatcgtgtaataattattttgactattttccaatgccacccattcctaaatgcacgatctattgg

SEQ ID NO: 9223 - DNA, 5982 bp, Oryza sativa
tgatgccgccgcccgccctccgcacgccggcgagctccagcgccttcctccctccgtctgcgtgccggcttctgtcttcctccgcgcgcgcaccgccgccgggtcagcaacaacgacgacgacgacgccacggcgaagatcacagggagccgctccctccctccccgcgcgcgtcggcctcaatcttcttctgcgcgcgccgccaccggtcggcaacgacgacgacgacgctgtggcgaagagcacagggcgccgctctctcccccccagcgcgcgccggcctccgtcttcctccgcgggtgcgccgccgccgccgccgccggggaaagagatttttttttatattatccaaactttaggtcaaacaagcaaacaaacaagatataacagggccaaataagcaagggcaaaatggactatttaccccaaaattaacaccgtcacctcacacaaacggaatagggtcagaccagagcttcgtactcgaaaatgagggtcaaataagcaaagttcaaaaagtagggtcaaatcggcaattacaattcaaaacgaggtcaaataagcaattgcccctttagacatcgtctcattgcacggaatactactgcctactacacgtacgcaagcccaaatccagtgcgagggcaccgggacaacaaggattacaaatgcatgctctccctgttgtcccctttgacaaccaataacccatagaattttgatggatggctgccaatgaaaccacagacccaagctgctggccatgattgtctggtggtgactctacataccaaaggatgagttactacaagaaaagaaggaattctcaagagccaatccccgttgggactgatgctgttctcgttgggaatgttattttcaaggggatactcttgtaattggtgccttgggattaatggcctagctaatactatcatttgctaggaccccgttgagaatagcttctgcaagagctaaattcaagagctttccttggaaataatccgtcttggttgttgcatagaacactgacaatctcaagggttgctcgttgcaaataccttttcaattcagtttattaaaaaatctaattatttttatattattagttaattctcctatacaaagaaatacccttgggattgttttgatttatcatttttttattaattctaattaaccaggaatgatatttttaattattgttctttttatgcagtacgtagcaaataacatctgcattggatactgcatcacatgatgcaacaattatatttactctgacagaaaagcgtcaaaggatttttaatgatcaatataaacagtagacaatatatttgcatttaatctaagacaggtctgtagacaataacacataaataaaatagtctcagaaggtaaattgatcaaactgattaatctagcaactataataggtctgataacatgatcctggattcctgatctctaaatgcttgcaattcgacattagcacatcctagaaacgccagaggtcatcattctcacaagttcttccacaatgaccagcttgtggcgcctcttcagtagtgttcatcccattctgaaataaaattacagaataagctacaaagttactgaaaaactataagggtaggtctaagtttgaacttatgaatgatacatagcagtccatttctaaattgaactcactaactagtatcgcaactaaagccataccattggcagaacatttttaaattgatctattgttgtccaagaaccaaatttttcataatgtttgttcaagagaataaataataaggatgtacagtagtaaaaagattgaagtcagtatataccatgagaagtgcatgaaggaactcagggacaacagaagaagatggtccatttgcatcctgtgatttgaaaaataataccagttagtatgttctttctaggtaacaaaaatagctttaatttatacttacatgggaatgagtttctgccttatccttatccactgtctgctctagcctttctatccttgatgctagttattgatgagcattgttcacagcattagtgactgcctgctgaacaatgtcttgcacttgctgctgtgtatatagtggctgtgtctccatgctaccagatggtgcacttgctgaattaccaacatggtttctatctataattcctggaagaccataataccttccacgttttctacctttagtgagctgcacccaaacatgttgtttgtcgacttgattgttttctccttccttgacacgatcattatacaccacctaattaagatatgtagtggcaccattgcatggttttagatgatttcactttttttgattgccaaacttgaaactagaaactagaataagcagaacacataccgctaactgttcagctttcttgttggcatactgtcccttgccctttgcatgtcgatgtgtgcgttcaaagacatcaatatcatcaacatccgtccctgcattctcaattatctatccaaaagtacatatcatagtgagaagtcaaagtagtataaatcataataggaaaatcatttaactttggtaccatggcttgtttatgcatagcaacacttcgtgaaccacaagtatgatgaacaccacctccttccatccgatttttgctgttttgagctgacactttctttacattttcatcagaccacaagtcacacaacatatcccaccacttttgctcaatccaataaggagggaatgccttccaaagttgaggatcatcaacatcaaaatcatcatgagaaggggcatctccatcctgttgtaactcagtcgcacgcatattttcgatatgcttttccaaagaacgttttgcttcagatttctcatgtgacaaagcttggctaaaacgttcaacagctttgcgataaaataatctagcacaatccacttctctaccatcagcaaacttaaaacgcagctgtaaaaggataaggtaggacgtcaatccattaaaagaacctaaatattctatgtgaatgctaacactgtaactcaccaaaaattccttcagaatagttatccttgtatgagcaggaaagttgtgataatgagcaatgacaactgcttcatcctcaggcacctgtttgccatgtttatccaaaggtctatatgtgccagggtagtgagcttttataagacatgtgatggtagatgaaacattcttcttcataggattcgtaatccaagcactagaaacaacataccatttaccaagttaggtaatattagtgtaaaacaatgaaagtgacaaaaaaatatgttcagccatcataatattggatttataggaactatgcatctgtatttcttaaaatttaacatggagtttacaacaagattttcaattattaacaacaatgatatacatattatatggagtgtgtgtttgtgtgtgtgatagacagtgtgtgttttaatataagcagaaatttagagtgtcaacttactctttattgagtggagttatcactgccctatctttctctggaactggtgccatcaaaacatttggaccacgaccacccttactttcttttgttgaagtaaccaaagaatctgaaggttcatcttgtgttgaatcctcaaaatggtcttcaacttcaggatccggataatgtcgatggcgtcttgacatagtacttaactagtaaaaacaagggttattttgcaagcaaatgtagtcattaaagaatagataacatagtaaatttgtaataatgtgtcacgaccggaattaacccaacgggcgttccttacgtgcgtgtattatttcttgtcccaggaggcaaggtacaccaaaagttgatacatttcagagtttatcaagcggaagcataaatagttaatttattacatgggcggcgaaggcccagcacacacaaagacaaacgggaaacagcggaagactagggcgacgaccacaggcgcttgacggcaggctcctcttctgggtttgggaaaaaattgagcaagacagagtacaaccaccgtactcaacaagacacacccacaagtgcaggataaatgtaagggagtacaagggggttataatataaagggttagggtttgcagtaaacagcattaaaagacacttagttgctcaaagctattttgtaaacacgattccagagctatacaatattattaatcaaggccgtgaacccacacgaacctgccttaacccaaggcctacgatgattcagaccgaactggcaacccgaccctgggtcccagctcgtcccaagccaacccaggccaaccattccacattttagttgttaagcaggttttaagaattaaaacactaacttgggtacattgctcggcttgcccataaccgagggcgcggctattcgaatagattatactctgatcagaggtgtacatctttacccacaagacacatcctcctcacgtgtaaccacgtgccacataccaccacggtatacggacagaagacgtgacatagtttccaacccatcctagccatagacaagagtaccgacccaaccccacctacggccggaacccccgggacaggtaggcaggactgagcccctagcagcaggacaccggccctgtgccatgacatctcgactaccgggccgcagctcgtgtagccttcatttgtcctagagatgtccatcgacccccgacttcgtccatctccatccgtgtacttttgtttataaccagactgagccacaaactaagccttacccactagacatgtggaagtacggtagtgctctgcaacggaggcccgaagaccggtccttatatggccgaggtgctactatcaaaaccatgcaccccgagcccagcctaaaaccattttgaggattttgaatagagggggaggtgtgaatccaattccacaataatccatccattccaaagtgtccaggtgatgagaatattcccaaagtctagagttgtaaaaccacctaatgttgcctaattaaccagcgaagcatctacctaaaatcatactagtggtaccatgagtagagtgtccactagttggggttttgtttattctagggggaacaaggaaataataacaataacaataataaggtcataacaaaggaaaataggcatggcttgataaaacagtgataacgcgggaatttaaataaagcgataatgcaataatttaaatcaacataattttataaactgggattcaatatgttcaaggatgatgtgacttgccttgctcgctttcccaaacgtcggcttcaacttccacgaagagcggatcttccgaagctgcggcgtctacacgaccaacggaaaagaaaaggcttttactctaataaactccatataacaagctggaacaaagcacaaaaatgggttcttgacttcttaagaaaaaattagagacttgaacggtccaattccgagttcaaatggccaagttatggtcatttgaagtttatatgctctttaaatgaatatttgcgaatttcttcatttaaattttaattttaaaagggcttattgcgtcagccgaggggagggggcgcgcggaccgggtcagcgggagtggggcccacgcggcagcctcacggtccacggtggaccgggtgcacccgggctcacaccgaccagcgccgtgggtcccacgcgtcagccgcacccgagggcgcgggcggctgacggccgggccccacgcggcagccactcggtgcgcccgagggcggccaagccggcgcagccggcgggaggcggcgcccgcgcccctatggtcgccggcggcggccataggcacggcggagcggcggccgagagaggggaagggaagggggaaaagaagcggcggtccatggctcaccctaggtcgacggcgacgacgaaaaaggcagccggagcggaggaaggcggcgactcggctcgggtcgacggggtcgacagcgttcc

SEQ ID NO: 9224 - DNA, 12991 bp, Oryza sativa
attttagatagagcaggagtaccttttggtttgcattccctaaattatccgttctaaagcgtcgtctactgacagcaaggtttagttggttggtgttcacatagacaccaattgcatgcatgtatctacttgcacgagcaaagaagccaacaatgctgcaatttgtttgcagtgtggtgcagaaaggatcccctctttctgttccaaaatggccatatctgtcctcattagtgaccagtgtaagtgatgttataacattagaacgtgaattggcaaatcgaccaattgttccagacacctccaatagaaactctgagggaccgagctgaatctgtaaaagttaggaacatgattttttgggtgtcaagaactgcaggacagagcccataagagtgaaaaaaaaatactgtagttgtaagatgcatttactcactgtataaggactagggccaggatttccaccccaaggaccaatagtgatactttgaccattaggtccaatatatgagaatgcaagcgaatcgatgatttcaccgctacaaattgtcacactatacagacggtggggtggcacctcgatgtcataagcgctccctcctttcccaccccaagggccaaacttacgaagaactccaacctcctgatgagtgaacacaaccaattaagcaaatttagaaagaatgaataaataattacacatgtaaattaaagccccgtgattagtaaattattacattatcatattctcctctagcacctctttcttgttccatcgtctccctttcattgtgtctacttgcattgctggaatcctgagaaaatggcatcaactcctcataaatattggtaatcctgctcaaaatatatgtatcgtcacgtgtatcggttcattttaaaaattttcagcccatgcaatgcctgttttcaaacaacttaggcccattttgggttggtacctttctgttgatagtgtcaaacttgaggaaattttaacattaacatatttgatgtagtagaattggtactagatggaacccaaatattgatatatagatagtgtaggcaaaaattggcattgaaccaaacatctacatgttactattaaagttgccaaattaaaattttgatagggcaagaattggctttaagatccacaacagtccatataacatagatttcaattactaagcatcaatatatatagatgtggtaatgtagcaaaatggcattttgtgcacaacaagttagtgttctaggcgaaaagagatccattgtgcaagagctcttttagagtgctccatgttacctttgcggtggtaagataatattaataaatcctggtcattgatttttcatatttgcttcgtttattgacaaatacatttccaccacctaattaataaaccaagaataaaaggaaagctagtgccgataagtactctttatgcatgcaaggaacgaattatcgtttatatatatggtacaaaaacaaataaactaccattaaaatctcaaattttgatttattacaagcacttaatcgcgcatatatactttctagtatcaaattcaaattattcagttttgagcattcaggctgtacatacatatatataaagatcagtaagttgaactttgaaaaaaatgttggcgatattcatgtacagtaattcgaatttggaatgcattacataattactttataggcaacaatgttttttttgtggcagtttaattataatttgcttttttttcattttctataatctaatcatacctgatctccaggtgatgctggatcaatcggcagctcagaaggtaaaagcgatggtgacgttctctgaaacatagcatctaattcattcagtctgctgacaacttccgctatcgtaggccttttgtgtcgatcggcttccacacattgtaacgccatttctaaacatgtcttcacttgtcgttgaagactacctatttcctcagatgtatacgtcggcgttgtctgctgaaatcttctactccagttttcatggacctaaggaaattgaaacataatataagaaagataattaatggtatgggcgcacaaaactaattgaggaccttcatcatataggctagatagaaaatttcttacgagctcgatgaactcttgggaaggcatttcaagcagttttgaccgtgccttaggtccttccattatctctattattatcacacctagactgaatacgtcaaacatctccgtgatatgttttttctcaatgtattccgggggcatgtaacctctgcatgatcgatatcataattaagttagcatttttctcatttacataaagtgtgaatagctaacaagattcaacaattaattagaaaataagtatatgctccctcctttctataatatgagggattttagatggatttggcacatcctagtaaaataaatcttgtccagatttattttactaggatatgtcaaatccacacctaaaatactttatattatggaacggatagagtatgcgattaagttgtcatgtttgatcaacttacggagttcctataaccacttttgttgtatgatgggatagtgttttctcaaatagccttgacagcccgaaatctgcaattttcggcacattgttcttgtccaacaatatgttgccaggttttaagtcgagatggaaaatatgaccttgcggtccattgtgaagatagtttacaccctcgcatgtccccttaattatgttgtaacgtgtgcaccaatcaaatccactggattcgtctgtaccataaacaataatttattttcttgagacatcaatttggttaccctttttcttgttaactgcaaagtaatatagttaaaaacacaaaaacttagttttcaaaaaaaaacacaaaaactatcataccagaaagataattgtcaaggcttccacgctgcaaatattcgaagcagagaactctttcctccatataagccaaaaccaacttgccattgtgtgggacaagcttacgtcttgtttcacagcagtagccaactaatcgaacaatatttttgtgtcggacactcatgaggttagtaaattcattcataaatttcacatcatcaagtgatattatgtcgagcttcttcacagcaatctcttccccattttctagtactccctgataaaattaatatctcattttgatacgggtcgatcaattaaactgtagaaaatataaatgttaagcataccttgtaaactgttccaaacccaccatgaccaatttggtgcttcgttgaaaaattatctgtaattcttgttaacaaatcaatcgtaagatcattgggcatcgtatcagctgtgtgctgtaacttgtccgccatgctatatgtatctcaaattgggcctagcttaccttccgtgtccttctttacagttaaaaaggggcaggtctataacgtcaaggtaagtgaatacgtaaggagacatatcattatcagatcaaaattaattgttttaagatatgttacaaatagcctttggactaggtagagttactagataagatgagtgatgctccgatactctctaccagtagtattatactaccagtataaatgatttgaattgtccgttattaagggtaaattagtaaattactaatataatgataggggtaactttgtcatttatttttttttgtctagatcaatatgtgatcatccattccgctaacatcgcttatattccatcgaaaaagcgaaaaaatggagaaaaaaagtttactcactgctaaatagcgattatacctgtacacacctttttttttgacaattttgcccctcaagtttctactaccgctaactgggatggtagtataaatagatctaaacccttcgatcaaatgagatcagtggttcagattgttttttactatcagtagagagcattgtagtgaacatcagattgttttttactatcagtagagagcattgtagtgaacatcaagaagagaatgatatatttgatattttagaggttttatatggtgctctctactggtagtatgaatgatctgagccgtcaatttgtaaggacattaagtactccttccgtcccaaaatataacaacttttagcccttaaaatttgtcctaaaatataataatttctccaccaatattctcttcccaaccaatcacaactctctaccattcacttttcccatttacctccactactcaacaaattacaaccctccaccatttatttctacctactttcttaataaccgtgtccaactttaaaaatgcttatattctaagacggagggagtactttttttactaactccgtgcttaattttgagattcatttactcccgtctgcatttacaccctagcagcggcgcaccaccccctcccccccacccccgagcggcggggcggctaggagcagcgggccggtggatgacgatgtcggcgctaggcacgggccttctccctctccctctcctctccggtggatgacgatggcggcgccgccgagcttgccatatccgccctcggacggcagcgccgctgagcttgccagatccgttctcgctatcttcgtctctcccaggctgctaacgccgccccgtcgagctcgggtagtggactcgccggcgacgaccgccgcccccttgcatggggtgtgtgggggcatcgcatgggggcttgtcctctccggcgatgctctcctctatttggcggcgtcgggcggtggaagtgaggagggcagcgtcggcgtcacgtgtcgcagagtgtgggcccacctgcgcaaaactgacgaggaacttgtagccaaagatggctacgcgaacctgaggaggccgaacggtttgagtacgtggacacgaatattcggttcgtgggagtgaggctgaacgccatatcggcgcactgtaaacgcccttactactgggatgactacgcagcatgcggaacgcgcgccaaccaatcaggcaacggtctgcgcatctatcggtaggaacttcatcgatctcttcccgacggcagccctagccgagcgtgacgcagtctcgccaagtcatggatcacagcctccgcctcccttctatgcgtgccaccgtacccaccggccggcgagacacatcggaagacttagccgccctcaactccatgccgtcgtctgctcgccgttcgtgtccaggacactctgctcgatcggccaaactctcagcacaactaaaagtacaacgcatgtttacaaatttatatatccggccttctgcacactcacttctctatatatactattatacccaaaaacgtttctactatcattaaatcaatttgatcccttagattaaaaaaaagatgaaaggccgtaggttaattatactatcagtagatcgaaaacacggtacgtagaaagcctcttgatattatatatggacggaatcatcctctcaatttcgagttcccctatactttcctctgttctcaagtccatatcctgtgctcagagttctccatggtcgctgaagtcattctaccaacgcaagacaccaacatcagctggtatgtatagggcacgagttcaacaatacgacccaagctctgtaagcaggagcgcaagaggctcctaatcacatctttatcctccgatcgtcccaactcgatcccaattggatggttccacccacaaccacgccaccccctccttaatttgctgccaatcttgttaggccatgtttataagctagcttatgagcaaaaatatctaagcctaaacaaacgagcaatttttctatttggcttttttaaagcaaaaaaacccactcttatatactgttaagccaaaaatttagattggagagcttttttttttcttatttaaaatgagggtacgactctacaattaaacttaattcttcaaagccacttgcttacaaaacatataagccaaaaatttggcttaaaagcctaatcccaaataaagatgccctaagtaccaatcagttatcacgttaagttagctaattaatactccagcattttttttattataagacatttttaattttttactagtcaaaacattgtagcatttctaacataaaacaaacttagatttgataaaattattttgatgttgttgatgttgcgattttttctacaaacatagtattttttacgaaataaaataaaataaaaattaaaacgacttataatataaaacataaaacagaacaagtattatgttattagttatccgatccgactttatgctcccaggtaaacaaatgattagctagacaaaacaatccgtacctcctcaatccaacatctccaaacactagtaattgttaccagcagaagtggagggaccataaatatataccgaatgaaaattttcaccagtattaattgtagccacgacgattaattacattttgagaccatattaaaatagcaataagtcactcagatgataaaatagcgtgacccaggggcggatacaggagtagggcagctagggctacagccctactcctgatcctaaatatgcattgaaatttcattttaaaacttcaaaaattagaagataaagacaaaattatataaattcaactaattgagttctatgtttaaaaaaaattctgactccgccattggcgtgaccaaaacatcccaagatcatcaggaatataattgatcatcatctcatctggttcagtaactagagatcgaacaataaagcaaatgcacttacctggagaaattcaagtactcgcagctctcgccagctcagtatggcgcggggcttggtcatgggatggtgctttatacactgacatattcatacgaggccgatcgatgtggatcagcttgataacgaaattccaaacgttagtataacaaaaaggtcaggcgcggctgagctatattatgtaattaatctacttgattaatgagaaattaaactttggctatatcagatcacacgttattggtcgccgagcttccaaaaagcatccaatatctttattagtatcgaacaacgttaattattgatcagctgggtgtctatattatatactagtatataggagagagatgatggttgactacaagtcatctatacaactcgctcggatgatacttttatattgatttatagccagtagcagatccagaaatttagttcgttggtatcacaacgtgtctatcggtgtcatagcatgttaattatatttagaatatagtgttataatatatggataggtggtttaagtatagcttttgccaaaagtcatcggtgtcacctgacaccgatggtattactgtagatccgtccctgtttatagctagtcattagctctactattaaacttgctctgatggtataagtctactctggtcgtacaagtcagagcttatttttggctgtatatatatatatatatatagacacacacaaatatagaggtcagatttttatttattattaaaaaaagtcagagcttatgtaaagtagtggagatgatatatattttggcatggaggaatcgtcatcttcaaaatgaaattacaaatggccaactgtatggaaccaattgaccatattaatatgaactcaaccattgtactagctagctattaatgaatgatcacagcagctgattgattacttattacgatgttcaacccaaaatagaaacatcataggtaaggcatgcactcaaatcattaaggctttttaatctccaaaagagagagattgaaggattaagtgaacaaggcctaatgtgaagcatgctggacctggaacggttcaatggaataacaaacaaaattaaccctcaggcgatgtcttctttttacagaggtcatatatttacgagaacttttgttgattactcatgtggaaaaatcattgacattacatatttgcaaacctctctataatatacacaatttgttcaaaaatattataattctagataatttttttgccagagattaatcttgaggagaggaaaaaaactttgatgtccttgttaaatgaggaatggttgggaataatgtgaaaaaaaataaatgggaggtaatggttgatgggacaaattaataatactctaaataaataatggtataagtatttatattttcatacaaattttaaatattagacatgattatattttggaaagaaggcgatagacaggatgctcgacgacttactgccagctgggtcaactcatgagagtcgcctgctgcgttctgaagcctacaaatcataatcttgtttgcagggcagcaacttgcttaccttgtatgcggccctgagtatggagtatactccctccgtttctccgtttctaaattttgataccgttgactttttagcacatatttaactatttatcttattaaaaaaaatcaagtaattattaattcttttcctatcatttgattcattgttaattaaatatactttcatgtttgcatatagttttacatattttataaaatattttgaataagacgaacggttaaacatgtattaaaaagtcaacagtgtcaaacattttgaaacggagggagtacttgttagtacatcgaagatttggtcgacagattccttcaacgaactaatgaatcagcaatcatcacttgagctggaagaccgaagcttttaatataacactagtccaaaaattccagttgcattttcacccctttgtttcctcatacggagtagaagtatataccaagaaccctgcatgtatgatgtatctgtttttgtcatatgagcaagacaatgcacgactgtgtaggtgctgtttggtttgctcctacaacttatctaagattgccacattcactactatacaagacatcaaatgtgccagtcaggaaaccctcgttgttgccggttttttcaaccggcaactgaaggcggcattaattagtgcgccgacagcaatatcgttttaaaaaccagcactaatgtggaatcgacgagccaaaaaaaaaggaaactggctcgagccaatacttcgagtcgatgagctcccacatgaaaaaacaaaaaatgatgaacagatcccacgtcaactcacatcaatagatgaataagaacaacacatgatgaataaatctcacatcaactcatgtcgacacatcaacatatttcacatcaattcttatagcaacaaatgaactcctacatgaacaagaacgcatctcacatgaacaacaacaagaatcaatatcaacgcatctcacagaacgcatctcaaagaacacatctcacaagaacgcaactcacatcgacgccgccgccgccggatccactacaggagactccgccgatgccgccctacctgccaccgccgccgccgtcggatccgccgtgggagagggcgccgccgccgccccacccactaccaccgccgctccacacaaccgtcgatgtcgccccgcccgctaccgccgccgacgccattggatccgccacgggaaaggccacccacatggagttagagaaactaggaaaaaaactgttgaactgagggatcaaacccaagacctccttgttcccacggaaggtctcaaccaccgggctatgtaacgatgttctaggattgtaacacacatttatttgaacctctttaaaccagcagtttgaccggtcgaaccaataaaccagtgaaccgagtgcctggtccggtcttaataactatggtgccaagcatgggggaaagctagctggcacgtgcgcgccagcggcacgcacttccgcgtaactaactccgttagttaacgctaatgacagtagattgaaaaaattttcagttagatttgaaaacttttgacttaagatttaaattttaaagtcaaattttgaaaactttcaactcaaattcgaaaactttcaactcgagattcgaaaactttcaagtccagatttgaaaattttgaaaactttcatcttgaaatttgaaaattttcaactcgagatttgaaaactttcaactcgagatttgaaaactttaaagtccagatttgaaaattttgaaaactttcaacttgagatttgaaaatttttaactcaagatttgaaaactttcaactcaagattcgaaaactttcaagtccagatttgaaaactttcaacttgagatttgaaaattttaactcaagatttaaaaaccttgaactcgagatttaaaaactttcaagtccaaatttagaaatttttaagttcagatttaaaaattactagtaaactaatcactagtaaaaaaaaataggaaactaatcactagtaaaactaattacgattttttctcctactcatacggcatcaaactgcgaagaaagcaaaacaagaaaaaaagaaaaacgacggtaggttagcgaaaaaaaatcgcgtgcgcgcgatgcgtgggccgtgtaggccgggagtgcacgctgccggcgcccgcgcacgaattaggattcttgccaagcatgtgggctgaatgaatcatataccgcatatgggatttacttctattgggcttccacctgtgaccgttgagggaataagttcatctgaggtccctttacttgtcaacaaatccgattttcgtccttgaaccctaaaccagatacaacgggtccctcaactatcaaaaccagtgcagataaggtcccacagcagtttagatggcggttttggctgatgtggctattttgactcggtcttcctcttacgtggcactaacgtggcgcttacgtggcaattcgatccggaaaaataataaaacccgtgggacccacatgtcagtttcacacacaaaattaattaaaaaggtgggacccacgtgggccccacatgtcatcctcagtcccctcctcttcttcctcctctcccccctatttcccctctcctcatctcactggcggccactgggaaagaaacggcgcgtgggcgccggccggagggaggagaggagtggcgcatgtgcgggaggcggcgggagagaaaggagccgcgtgcaggcgccggccggagggagggttggagcggcgcgtccgtgtagtcggcggccggcgagaaagggttgcggtagccgacttctccctctacttcctctcccgccgccgctgaagacgacgacgacgatgacagcgacgggtttgacggcgtcctcttcttcctcctctctccccatctccctgaagatgcacttaaatcccctagtgggttttggtgattaatgacaaggtggttaaagggaactaatgtgtttatcaagttttatacacaggagtttagtcccaaagtatgttgtgatggctaagaatacatggagaccccctaatttgaaagatcttcatgcgagaaggaccgaaagtggttagactaggttttacactttcaaaattgagtttaggaaaaaccgtactattaagaggggtttcaagtgtggttctagggtatacaaagtgctcttagtcatatccatgagtcaaaagatttttggaatcatttttgaaaaatgattttctccccgggatagagaggcctacccgtatgttctggccggaacttccgggcaccgaggtatagcgagaattttcctaagcgctgcccggaagttcctggcacttttacccggaacctcctggcaaccctccagttcaaatctgtgagtaacggctagatgacatcacctagccgttatatatagccaactcgaccccagctcattctttggccattccacttcagttctttcatgttctagggttttctagcctctcctaagctccctttgcttcctccactcaaatctagagcctatcttgagagattgagagaatagatgagagtgtaggtgtgttgtggagatggcttgaagattaggtttgattgagcactttggataccttgtgggctgtcacttgggcttattactctttgagatcttctcctagacggttaggtgtcgctcatgagcttccaaagatcttgtggatgtcccgggaaggtttgtaaaggttttcctcacctccgcaaggaaacgaggtaagtgagtaaagttcttgtgctgagctttcagaggttgtcctaggtagagcaacttgcacttgtggtcttttctagaaggaattgtgagttagatcttggtggtcactcaattctagaaaatgacctagaagtattgagttgaaggctgtggacttcctctgggatctttgcataagtgaggcaaggggttaatcgagacccggctctttggagcacctcaatggagagtaggattcgtgtgatccgaacttcgggaaaaaatctcctttgtctctattgtgcatgttctgtgattgtgcctactagtatcttgtgaactgtattctgtgaatctctgtgcttgttattgcttagctagaaactcattttactcggtgattttgatattctctattgcccggaagttcctggctcaagaactccggaagttccgggctactcatcactgcctagaagttccggtgttcatcaccaggaagtttcgggccctggtaaatttgaccgctgcgtttgtttttgaagaagttttcaggaacgcctattcaccccccctctaggccacatctctgcctgttcaattggtatcagagcctagtgctcctaattcaagcttcaccgcttggagagatccaagatgtcggacgtagggggagatgacgcgagtaatggaaatgaagatggagcgacaagcaagggaacacctgcatctaagggagtcactataccttttgattacagtaaaattaccattccctcacataactttgtctctgtgccttccgggcgtgctcctccatttgatgggacacattatgccgcttggaagcacaagatgaagttacatttaatctctttgcatcctagcatttggaaggttgtgtgtacaggtgttggtgctccaaatga

SEQ ID NO: 9225 - DNA, 29666 bp, Oryza sativa
tcctgcagcccatttttgtgtctttgggagtaaatgcttcattttgagtaagaagcctcattcatctaagttctcacctaaggtggatgagggattcttacttggctatgagtcaaatacatatgcctaccgtgtcttcaacaaaacctccggtattgttgaagttacaagggatgtgacatttgatgaatctaatgactcccaaggagagcaagttgttgtacatattgtagatgatgcggatcctagcaaagcaattggtactaaggctattggagacatacgaccagtcgagatgcaggatgaccaagaagatagggatcaacctccgtcatcgacatccaatagccctacaacaagacaagtgtcagttgacccagaagttccgggaccaaatgaccggaacctccggaccactccaggccaggaagttccgggtccatctgccaggatgttccgggcaaaggacagtcaaggagtgcctacggcacaagtggatgggattgatgccaagggcactgtaaagcatcctaatcaggctcaagtctcctcggtgcaccatccaaagatacatcacactgtccaaagatatcatcccgtcgacaacatacttggtgacataagaaagggggtaaccactcgttctcatgtcgctaacttttgtcaacactattcgtttgtctcttctttgaaaccaaccagggttgaagatgcacttggtgattcggattgagtgatggctatgcaagaggagttgaataacttcactcgcaaccaagtatggatattggtggagagacccgaccaaaatgtcatcggcatcaagtggatcttccgcaataagcaagatgaacatggaatggtagtaaggaacaaagcccggttagttgtgcaagggttcacccaagtcgagggtctcgatttcggtgaaaccttcgcacccgttgcctgccttgagtcaattcgtatccttttagcctatgtcgctcaccatgatttcaggttatataaaatggatgttaagagcgcctttctcaatggacccatctcggagttagtcttcgtggagcaaccacccggattcgaggatcccaaatttccacaccatgtgtacaagctccacaaagcgctctacggactcaaacaagccccgagagcttggtatgaatgtctccgagattttcttttgaaaaatggttttgaaattggaaaggcggacactactctcttcactaaaaagtttaaaaaggatttattcatttgccaaatttatgtcgatgatataatatttggttctactaatgcctctttttgtaaagaatttagtggtattatgactaagaggttcgagatgtctatgatgggcgagataacgttcttcctcaggctacaagtcaagcaagcacaagatagtaccttcatctctcaaaccaagtacgtgaaggacattctcaagaagtttgggatggaggatgccaaacccatcaagactcccatgcctaccaatggtcaccttgatcttgatgaaaatggtaaatgtgtggatcaaaacgtataccgctccatgataggatccttgctttacttatgtgcatctcatcccgatatcatgcttagtgtttgcatgcgtgctcgctttcaagcggagcctaaagagtgtcatttggttgtcgtcaagaggattctaagatatttagttcacactcctaacctaggcttgtggtatccaaaggggtgtgggtttgagctcttgggctattccgattcagattacgccgggtgtaaggttgatagaaaaagcaccaccgggacttgtcaatttcttggacggtcctttgtgtcttggtcatccaaaaagcaaaattccatagccctatccaccgccgaagccgagtacattgccgtcggttcgtgttgcgcccaactcctttagatgaagcaaacacttaaggatgatggctactccttctccaaaatcccactcctatgtgacaatgagagcgcaatcaagatagccaacaatcccgtgcaacattctcgaaccaaacacatagacattcgtcatcattttttgagagatcatgaaaccagaggagacattaccctcacccatgtgcgtaccgagagccaattagccgatatctttactaagcctctagatgagaagagattttgtgagcttaggagtaagctaaatgtattggattctcggaacatcaagtgatgggtggttggctgaccaatagccaaacatgagttactaaaatgtaaattaaaaaaaaatatattttgagcccttgtgtccttgagatcacttccttcatatgaagttggccttgacaccaggaacaaggctcaaacattccctctatcctcaaaaacccatttgtcaaaaagtttgcgaaaatttttgtgtgtctttttattgcgaaatttggtttttatcttctccttatgatgtatattgaccattgttttgtattgattgattgattggctggtcatatacatcataagcctctgcatgtccatagttttccattcctcagtttgattccttccctttaccttgtttttgggcctgactgcccattttctgtcaggccagaagttctgggcctccctgtccggaacctccgggtgttggggagtatatatactcagggggagttagaaccctagtctctctcctcattcttctccctccccgactccaatccctgccgccgcctacagtaaccctaggggcgatttccattttccaccaatcaaattcgctttttctccgtgaaatcgtccacattggtggctgggagcttccctctgcgattgattcgcagtttcatctctcaaggtagcactttttgattccatctctcggttcattgtgtttttagcccgatctctaaatctgtgaacctagggagaaaaccacttggatagtcttgtttctgctaccttgtagatcaccgatctataggatttgttcacatgcactagctatttttgagatcactgttcttctttttgctggccgaaagttccggtgttcttgcacccggaacctccgggcgctatccagccagcctgccattcttgattctctcaatttttgcctaactactgcactccaatttgttgattcctgttgcagtaaacattatgtctcgtgagaaaagacagaaagcctctcaggatgtgtccggtgatgagagtcctcctattcggttccctcgaggtcgtttgggtaaagagaaagtggttgagggaggcagtggcagtggtcctcgtacttctcccaggttcacaaggcagtccagcaaccgtcctctttagattcgggatgttgacggtggtcaaggcagtgatgcttctagtgcaagaggtcgtgggagaggtagtggtcgcagttctggggctggaagggcatctcacaatttccctgtaggatctcgtgagaatcccattcggctctacaagtctcttggatttgacaccactcccatgcaccacattggtagagccaagtccaactatcttcatcagcttgccaagtgtagaagagaccatttgattgatccagagacacagcctgaggagtcacaggatcctcgcttcaggaccttcactcagttggattggtataactcagtgattatggctagagaaaatccagtggttgagatgaagtggattgattgggcctacatgaggaagaagagcctagttctatgcgacagcattctttggtactactaggaagggtactccatgtgtgaagtggttgactgagggtgttaggcacaagatttccatggcacagcttgctgagatgttgggtttggaggatgaggatctcaataggcccaatattcatagtgaagcacccctccccatgatcaaggtgttgtactccatctttcgttggtccttgcttccaaaggttggagatgccactgctttgccaaccaagcatgctcatcttctcagccacatgcgctacaatcagcctcccttcagtgtgatgaagtttatttggtatgagattgctaacaccatccttgagcctaagcagggttgcatctatgctccttacattatgaagatgatcgagactgttatcgaggtgttctacatcaaagatgggcgccacaatccttttcgccctcgtgctccatcttcctcttctccagtggtgcctagatccattccttctacctcagctggtccttcttctagtgccccacagagttcctctagttcttctcccatcaagaaggctcttcacgcaattttttgcatgtatgctaagactgccaagaaagtgaagaagatagaaaggcgtcagaaggaagatagaagagaggctgggaaagaagtgtcagatgattctacagatgaggtctatgttgatccatttgaggcctatgaggcggcccgcaacattgctggtgaaggtccatccacctacttccatgaagaatcttcccattcagatgatgatgatgatgatgatgatgatgatgatgagggtatcaccgaggcagctgctaaggatgctcccacttatgttgataagggcgactccgctgcacagtccgatacgtctcatctctccggtgataccgagattgttccctctgatggagatggagatgagtgatcctcttcttctcttcatggtttctcgctttttggtgccttgatgccaaaggaggagaaattgtgacgtgaagggggtcatttgaatctttttttgctgccctgactgctgtctggtcatttggccggaagttccggctcttgtgacccggaggttccggccaggcagatttcccctctatcactactttctatatggacatgtaatcgtattctattatggttggatgtaatgactgttagatgctttattattttttatgtcagtcagttatctcatatggttgttgcattttgttgtgatgtagtgttcttttatctttttgagtgattgccatgtcatctagtcattttatttgcatcactcatcattcaagcatttacatctgcatctcttatttgataagtgttgtgtgaagtctctcttgtgctttccttcatgttatgcatattgatttcatatcatttctttatatgcatatctttagggggagcttcacacttctcaaatcattccaaatttaaaattctattatctttttgtgtgctttaaccatattgtcatcaatcaccaaaaagggggagattgaagatgcacttaaatcccctagtgggttttggtgattaatgacaagttggttaaaggggactaacgtgtttatcaagttttatacacaggagtttagtcccaaagtatgttgtgatggctaagaatacatggagaccccctaatttgaatgatcttcatgcgagaaggaccgaaagtggttagactaggttttacactttcaaaattgagtttaggaaaaaccgtactattaagaggggtttcaagtgtggttctagggtatacaaagtgctcttagtcatatccatgagtcaaaagatttttggaatcatttttgaaaaatgattttctccccgggacagagaggcctacccggaggttctggccggaacttccgggcaccgaggtatagcgagaattttcctaagtgctgcccggaagttcctgacatttttacccggaacctcctggtaaccctctagttcaaatctgtgagtaacggctagatgacgtcacctagccgttatatatagccaagtcgaccccagctcattctttggccattccacttcagttctttcatgttctagggttttctagcctctcctaagctccctttgcttcctccactcaaatctagagcctatcttgagagattgagagaatagatgagagtgtaggagtgttttggagatggcttgaagattaggtttgattgagcactttggataccttgtgggctgtcacttgagcttattactcttggagatcttctcctagacggttaggtgtcacccgtgagcttccaaagatcttgtggatgtcccgggaaggtttgtgaaggttttcctcacctccgcaaggaaacaaggtaagtgagtaaagttcttgtgctgagctttcagaggttgtcctaggtagagcaacttgcacttgtggtcttttctagaaggaattgtgagttggatcttggtggtcactcaattgtagaaaataacctagaagtgttgagttgaaggctgtggacttcctctgggatctttgcataagtgaggcaaggggttaatcgagacctggctctttggagcacctcaatggagagtaggattcgtgtgatccgaacttcgggaaaaaatctcctttgtctctcttgttcatgttctgtgattgtgcctactagtatcttgtgaaatgtatcctgtgaatctctatgcttgttgtagcttagctagaaactcattttactcggtgattttgatattctctgttgcccggaagttcctggctcaagaactccggaagttctgggctactcatcactgcctggaagttccggtgttcatcaacaggaagttccgggccctggtaaatttgaccgctgcgattgtttttgaaggagttttcagcaacgcctattcacctcccccccctctaggccatatctctgcccgttcactcccatctcctttctctaggagcccacgggtcacgggaggttcggtggctagcggcggcagccccaggccacggccagcggaggtgctcctgctccggcggctacccctgccactgcctccacaactcgcggatcctcctccacgtgcctcgtcgcgctcgagctccgcgcaccatggccacgcgccagcagctgtagcgctgtctcctcctctactaccgccgccaccggtttccccttggcgaaggcgggcctcacgggcggagaagcgtggccaccgccacgccacgggccccctccctccgtggcgttcaggtcgttgtcgtggccgctcccctcgcgccgcaactgcgcggggacctcgtcccttccgccgccgacaccaatggatgcggccgcgcatggcgggtggcccatgaggaggcgatggtgcatggaggtgatgatctcccacgccggtgccgtcggtgagttcaacattatcctcggtgcccctctcccttccctccaccactaccaccgcaacccatcgcggacagcgccaccgccaacgacgacctgaacgccgcggagaggggcccatggcgttggcagtggcctcgctcctccgcccatgaggcccagcggattgccgccattccgcgcgccgctgctccagccaccgtcgcgccactccgcccgctgccacgtcggcttcgcgtgctgctgctccgttccgcacgccgccaccccagtccacattgtagggatgaagggaggggagtgacgatgacacgttgggcccgctatttttttctgtgaagctgacatgtgggtcccatggttttgttatttttccggatcgaattgtcacgtaagcgtcacgtcagtgccacgtcagatgaaaaccgggtcaaaatagccacgtaggcgccacgtcagccaaaaccgccatctaaaccgctgagggaccttatctgcatcggttttgataattgagggacccgttatatctggttttgaggttcaaggacgaaaatcggattcgttgacgagtcaaagagactagaacgggattgcgggctgcgtgacgagcatcttgggctaaatttgttgataggcttctgatgggtccaatatgcgccgtacaaatattgggctgaaccttcaagtgcggtttagaaaaggccgaaaacgagatggtcatgaatgcgccgggtctgtatctctctctctttctcgaggttgaaaactggagtagtatttttctgtttccagttttctgcttcttcgcttaaattctgtcaagtcctctctgtcaattcaactgtgaattgttctttctgaaaaagaaaaatcgaaatacatcaaaaggaagcgccgtgaggcgcgggcaactactgtgtgtcagtgtcaagcatcctgttagggcaagtactggaagcccctacatattgcccctaaatttgccatacataattagatgatgaggtgtatgagattgagccacccctcatgcaaggggcaacctttacacaatctccaagaaaaaagtgtaagatgatgtgagtgtgagctaatattggagtttgtatattgggagcgtatcttatgcacacatgccctcgcgtgtacacaccgtgtacaccaactaaaaattatcacaaaaaattctaggaaaattcatacatgtactttcaatagtattacatctacgtgcaaagtcgcatcttcaaattcattctacatagagaataacaaaaaagataaaattctgacaaaattacaaccttaaaactgtcagattttttgtttttttttgttacggctaaaatataatgaatttgacgttaagattttaaccctaggtgtaatacaattgaaagtatgtgtatgatttttttctagaatttttggtgacattttttagttgatgtgcacgtgtgtacacgtgagggcctgtgtgcataggatatgttgccttgtatattagatgtgatatattatactccctccatactcataaaggaagtcgtttaggacagcgacacggtctccaaaacacaacttttgacttcttttttctataaaaatacttattgaaaaatgatacatatatacttttatgaaagtatttttttcaagaaaaatctattcatataatttttatattttcgaactcaacaacttgagagttattcatttatattcccaagatttaacttaaacattgtcataaacaacttcctttgtgagtatggaggaagtatgtgttacctcttaattaatgagaagatgacatattctaaattaaatgtgacatctacctccactataaaacaacttgcccttacgtgccttccctctcattctctcaaatctcaaacccgacaccagcaagttgagacagtgacaaaaggtagtactagattttcgttcaagactgaaaacctctagccggttggttaatcctcgtatcacaggatgggtgaaaattaaggcggattagttttacacctcaatcgtgtttaaatctccccttcaatcacccatggcggacggattaaccaagtactatctctgttgcaatatatatgcaagtcgtttagctctctgttacaacgacttagtacatttccgtaacagagggagcatgtcaaatgtgtcgttcagtaagagatgcaaggacaggtaataatttgatgcccacgtcgtattcaacattctatcgtctccgtttccacgtgtacaaccaaacaattttaacttaccctgaaattgttaaagtttgtgtcgaatatatatacgtagtcgtttacagtttagggcttaaaattgtactggtgttaggactaaaataagagtcggactctgtcataggctttctcataaatagagaggcatgcctgttgtatctgcatggcacctacaatatagcgtatacacgcagggagatgataacgatgtggccatggactcgtagcgactaggagatatattagatcggggaggagcgcccgtaatcagtgccccgagatgtagacatcggctgaagctcgttaacaaatatcatgcctcggtgtcgtcttcatgtttggatcttctatgatgtttctttcacgttcggttttcgaatttatatcgggccggttttataacagaaatagtgctagattagtagactatatagccattaatttctctacccctttctgagctatatattttcgagagataagatggtcctctgcagtactgtatatgcagtagtactacttgctgacatgtgggccccacaaatcctcataaccaaatgtaaataagcagtattagtatatgcaatacggcagagaatctcaattgcctaatggttactgtagacgtgcatactgcatgtgcagtagtactactcgctatcacgtggaccccacagaccctcggaaaaatgtgaaccttgcagcggctgcaattgtgcagctgcatgcccataaagatacctcccatttaggggcggatgtaaccattaggtaggatgggtcgaccgacccagttacgacccatgtcgtccacaccccacatttaggtatagcaaggcgtgaacacccaacagattagtccatctcttcacaaggcacgcacgtcacaaacaacgattgaggcagttatgcgattgaactataatacgatatttgttgtgttagattgctgttatcgagtgaatatctcccttctctgttccatctatcttttaaagttgtgtccgccagtcccattgtatggctgccgagtccacagtcaatttggccacatacatagtgtgcatgctcgcccatttgtacaacatgatttctttgcaagcaaattaagtctttcttgccatcccgagggccttaccgaaattttgtcatatttctttcaataaattgtttagcatgcaatccatgctttttaagaatgcacagtacaacgacacaaaatcaacatacaaagacaattctcggagaaaaccaaagcgacaagagaaagaaagaatatactttatgtcattgagttgacattgtccttttttataatatgcccatgagtttattagttcttctataatatgcaattgggttgtatcttattttcaaaaatacccaaaatacccttatatacatataaggttaactattcatttatcctatcagaagtttcaaaaaaaaatatgaatgtttttagtctctttcatgattcttacatttctgttttttttataaatataatttatctgttatatgttatgtagaatatttttttatgttttaaagtaaatcatctttcttatgctacatattttttttgtactattgtatttttataagctattttactctcatatatcacaggaaaatgactttctaaaaaaatattaaaaaacttgaaacttacataaaaacttttatgttgtctaaggaggttaccataaaaaaaatctgtatattttttaaacttctaatgcgattaatcaattattgatcttgcatgtttttaatgatattttgggtgtttctgaaaaaaaaatagcatgttatagatcaattgataagctcaccagtatattatataaatgtgtaatgttaatgataaattattaaactgatataaactcaatggcatagatcgaatgaattccctcaacggaaaaagagcgtagaacaatgagctacaagtatgtgcgaatatagaccccaacggcctcaacacagggccctgcacggccgaagaagccaacaatgctggcagcatcctccaccggaacaacgaatggagttcctcctccttttccataaggtccataggtgcgattgagattcgtcgtgaacttaagcgatgttatgacattttgtagcatgccaaatgaaccgactgttccagacagcccctttatatgctcaaaagctccaagccgaatctgcgtcaatgaatagagatttttttaaaaagaaaaagtagctaagaaggtattgagaggtattatattttcaaattatgtattatgtagctccaggtaactctagcccacagtccacactagaaaagaattactagaagctaaaggtagtacaccacaaattaaccctaaaattataccttttcaaaaaaaaactaaaattactcaaataaatactccctcgattttaaattaattgttattttaacttttcttaagtaaaagctaaaaactatctttgactattatttttttaaaaaaaaaatccgtatagtttaacagtttgggaatttcataatgtgaaagcttttctcatagtttgtcaaaatcgatgatcaaagatacaagtttaatttgacttagaacaaaactagattgaagtaatttgaaatggagagagtattaggctacttcagtttttacaaaaagacaaaacgatgacatcacacctgtccaataatagaatgtgttgaataaaaagcatgcatgaataatcttctttcaaaagtaaaagaaaaaccttattttaggattccttcactcaccgtgaaagcagcgccaccatcaccgccccatggaccaactgtatgttgcttcccattatggtcgttgtatgagaaggcaagcgagttgatgatatctgcactgcaaattgtcaagctttctaaacggtgaggtaccacctccatgtcgcgatccatgtctccgctgcctccccacggcccgaacttggtaagtgccttaccaacacaaatcaatcaagtaaaaattggtcagcctgtaaactttgaggatgatcttttttttttagaaaaaaaacttttaatgatgacaattatgataaattaactagggtgaaaaagaaatagtacatcatcatccccttttcctctttcctcttgaattgtctcatgctcggagtttacttgcaacgcatccctaaaatgtctgctcaaatcaagagttggtcgattgggactaacatagacaccgatcgaatgaagaaaaccccctgcacgaccgaagaagccaacaatgcttccattgctctgcgaagtgtggaaagcggttccccctccctgtccaaaaggtccgtagctaccactatttgtgaccaaggtaagtgattttacgacatcggccactgcacacacatatgggccagttgttcctgaaatttctgtcagaaattctgatggcccaaattgaacctacaagaggtaaaacaaattgttatgcttgcagtattgtggagatagttaacatcatatccagcatattttaaaaaaaaataataataacttttgggatagatatgttttcttagtattaggatgtgtcacatatagtcctaaattcgtttttttttggacggagtgagtactcactggtggagaaaccatctttggtcggtcgaccaaattccacgatattcccggttgcaataaaaaccgggatggttgaaaaggttagagctactttttaatctttagtcctggttggtgttatcaaccgggactaaagattatttttagtcccggttcaaaaaaggtaggtgatgtcagacccccccccccctaatatctttagtcccggttgaaagggttatagctattttttgatgtttagtcctggttggtgttaccaaccgggactaaagatcatatttactcctggttcaaaaaaacggtaagtgatgtcagacccctctaatatctttagtacgaactgggatctttagtaacaccgggaaaaaagatcggcatacgcggagagatcgaggcgtgtgcgtgaatcggatcgagatacatatctccttctccctcccggttctatctcctcctctcctcacaccctatctcttcctctcctcccccttctcctctcctccgatccccttctcctccccatcttacgcgcgaaggatcctttccttctcctccccctcccccctcctctccgatctgcaggcggcggcgccggcctgcacggcggcggccgggcggccggcggaaggcagaaggcggcggcctgctcagcggcggccgggtggtaggcggaagatggcggcttgcacggcggcggccgggcggtaggcggaagatggcggcctgcacggcggcggccggcaaggtgcagatttgttttgtttttttttctttgagaatttgtgatccggatctgagatgtatttgatttgtgtgtgatgtgaatatgtgatgtatttgtgacgaattttgtagaagttgtgatgtcattttttttaagattttgtgatgtatttggagatgatcaatttgagaattttgaggtgataattgatttgggattttagggatggagatggggatggagtgaaatcaatatattaaaaacaataaagaaaagaaaagaataaatgagcaactgggatcagctggactctatctttagtccctaaaaaggctctatcttcaaccgggactaaaaatgaatttttactcctggttatttcacctgggaatctttagtcccagattcgtagtcccgattagaaaaccgggactaaagggggttaagaaccgggagtaaaaactacttctcccctactgactccatatatcttggaaaaaacattcccatatgagtgttgttcactcatcaaaattttaatcctgatgctcatggttacgcacatacatatgtgtttccaataggatattattcatgtcacatttgagtttgttagtctatgtatttcttgagtgctagttaatgggtgtgtacttgttggtacgtgcgtaatagtgcgtgtgaatgtgcgattgtgggtctcaatgtaattgaaagagaaatcccaattgtgaatgtcaacaaattactcataaatacttataagataagattagttaggagctcaccgtacgagcacttccaccagggccaccccacgggcctgcttggtgcttcgtcttccctttaaggtcaacgtaagaaaatgcaagtgcatcaactatatcagcaaaccagactgtgacacttagcagacgatgggacgccaccttgatgttgtgagctttccctgcatttcctccccagggcccaatctttgcaagcacagcctggccagcatagatcaaccaagaaaaagaattagaaacatagtagagacaatgtgcaattaataaacaattaaatcttgtacaagaattagcacctcctggtcatttcctccccctcttttttcttctttctttggtttcagcttataccttgcctccagtgtcgtcgccgcactatattttgaggtgcttgcgctctatacataggcgtatcgaatcgagagatgtcttagattcacagtgcatctcactggtttgtgcatatgttgtatattgacttatattgggaggggatatataaaaaaagactacatgtacgatggtttgtacttgtaggggttctagtaaaagtattaataatagcggaaacaatctaagttattttctacgactacaaggggcggatctacagtagtatgagcggtgtcaggcgacaccgacgactttcatcaaaacctatagcgaattagcatactatgacaccgataggcatgttatgacaccaacgaatcgattttctggatccgccactgatgtcgactactaggatggtggtctaaatagatatatacatgttggataagaaaatatgatatcgatatgtctagatttattctactactagtataaactattataaaaagtatagaaaaagtagataacaagtattgccagtgttctactaccaatattatcgtcaaacaaaacaatctaagccattgtcttataagttccaccactagtaaaaaacaattatggattctaatccttcgaagaatatcctctcatataccttttagtgaagtggtatatgcatgttgtacacaacacattttttacattttttagaatttcttataactacgtggatgatatttgaaatgaggggacatcaccttattaagggattaaaatagtttcccgttgagatagcagtatggtgacccgtgcagattgcacggctagcatcattatattttattctcatacaatagcatatatattttctcaatgtattattcaaatatattaaaatgacaacataattttaaattttgtactacctttacgaaactattaatgtataatattcatattgtattttatatacgtgttattttatttattaattatttttaatattcatattgtattttatatacgtgttatttattaattaattatttttaatatcaaattttagttatttgtaaattatattcctatatagactctagactcgtcttttaatattttttttaatttcgaatttttgttatctgtaaattatatttctatatagactctaggcacttcttccaatattatttatttttaattctgaatttttattatttctaattgtattcctatgtcgactctaaactcatctttcaatattctttaatttttaatttcgaatttcagttacttctaaattgtattcttatattgactttagactcttcttcccatatttttttaatttcaaattttagttatttttaaattgtatttttatacgaaatctaaactctacttttaattttattatgtttattccgaattttagttagttttaaattcttatatggactctatactctacttctaatattccttatttttaattccgaatttctattatttcttaattatatttctatatggactctatacactacttctaatatttcttatttttaattccgaatttctattatttcttaattgtatttctatatggactctatactctacttctaatatttcttatttttatttccgaatttctattgtttctcaattgtatttctatatagtctctagtctcctcttgtaatattccttattttttaattccgattttcaactatttctaaattgtatttctatatggactctgtttttctttttctccgattaatatgagaatttctaggccgtgagagcgaacgtggagtctcatttttctattcctttaataggttaatagatgtttcaatggatgaaaacaaaaatgaaatgtctatattaattctaataccaatatagactattgtaaacattatctaaatataaggcatctcacactagatttttcttagacaaatttaaagttagaaaatgcaagtttaggcatttacatttttcacaacacaccttaagcaagtaaagttacgaatcttggcgaaaatagatctggcctgcaatgactctgatcatacctggtctccagatgacaatggatcaattggtggcttataaagtaaaagtgacggtgatattttgcgaaccatatcatctagtatattcaatctgctgacaacctcggctatcgtaggccttttcagtcgctgggcctccacacactgcaacgccatttctatacatgtcttcatttgaagtcgaagactctctacttcctctgatgtatacatcggggttgcctgctcaaatcttcttctccaattttcatggacctgagaaattcaaacataaagttatagtgtgtagaaaattatggataaagctagatagaaaattgcttacgagttcgatgaattgttggggagacatgtcagcccgttttgacgtttccttagttcctgtcattatctcaatgattatcacacccagactgaacacgtcaaatttctctgtgatatggcatatctgaatgtattccggtggcatgtatccgctgcaaaatcgataacatcagcacatgttcgtatacacacttacataaagtgtgaataggtatcaagatgtacaatttaattacaaaaatgtaagtgtatatgaggattaattgtcgtctatggtctatcaacttacactgttcctatatacttttttgttgtatgacgggttagtgtatcagaaaagagtcttgacagcccaaaatctgcaatttttggcatattgtttttgtccaacaatatattgccaggttttaagtcgagatgataaatatgatctcgtcgtccattatgaaggtagagtttacaccctcgcagatccccttaatgattttgtaacgtgtgcaccaatcaaatccactagattcatctgtaccatatatagagacgaatagtcattatctaaaaaaaagagacgataagtcaggtcatttccaacccaatgactagagtggtgtccatagcattaaataaaatgccatttaagatgaaagatgatatggcaagtgaataaatgaggaaagagaaggaaaccaggtcttgcatgagatatggtttctacacaacatccaagacatcatgtgagataagtagcattaaatttaagtatggaaaaatggtatttgcattgaaagagtggtgtctactacagtttcttaattatgtggagtttatggaaactatatctagtgtcttgggttgggactagcctgcattcacttgagacatcaatttgggttaccatttttttttattgtttactgcaaagttattgggttaccattttttttattgtttactgcaaagtgcaaagttatgtgtacgtccaaccaaaaactatcataccagaaagatatttgtcaaggcttccacgctgtaaatattcgaagcagagagctctttcctccacatgaacaacaacatacttgccattgtgcagtacaaccttacgtcttgtgtcatagcagtagccaactaattgaacaatatttttgtgttgggcactcataaggttaacaaattcattcataaacttctcatcatcgagtgactctatgtcatggagcttcttcacagcaatctctttcccattctctagtactccctgttaacactaatgtcttgttaatatgatgttatcaacggaaatatagaaaatatagggtggatagcccatctagtctctcaaattttaccaaaggcttcatttggtcctagcttgaggtttcatttcgtccatacatctacctttaaatcatccttgagaccttaatgtgcaacatatagctatttctagtccacattctatttagaaaatgtccctttacccataatttgcatatactagaactaataaataacattgtaaatatactccccattatttcaacacatgagtgttgagctctaattaattagtggccaacagctggccatagtatacttttgcaagtacatgattattattttttacataaattactacgcaatacctattaggagtacgcaaatcacaatgaaaaaaacatcatataattataagatgtatgtttgataggaagttgggttttttactggaatatgttgggtctttagggggtctcatcagacgatttcactgcctgaatagtactccctccgtttcataatgtaagttattttaacattttccatatttatattgatgttaatgaatctagacatatatatctatctagattcattaacaagaatatgaatgtgagaaatgttagaatgacttacattgtgaaacggaggaagtaaggcatatttttctcattttttccatatatatgtgaatgagtggtagaaaggtcatttatcaagacagatggtgattatgtttacccatgtggcttcctatgtgggctcaagtatgagtttgaactaaaataaaaacatgaaagactaaaatagattaattgaaacatcaaagaactagaagtttggctattcacccaaaatatagatattaatcatactttgtatactattccatacccaccatggccaatttgattcttcttagaaaaatcatctgtgatacgttttatcaaatcgaacgtaagatccttgggcattgcatctgtgtgttgtaactcgtccgccatgctctcatgtatctcctattggacctagcttctgtgtccttgtttacagtaaaaaaagagaacagttctattacattaaggtaagtgaatacgtaacaagacatatcattatcagataaaaatgagctcttttaagaggtgtggcaggctctaacaaaaaaatatccaacggtctaattttcaacgtacgcagttgaggtttgggccttgcagctattgaaattataagcacataatgatttaatttattccataaataaatcatggcattgcatatgtaaactaaaataaatgcatcattggatctacacatgtaaactaaacagtaaaacatgaacagatcgaatatgcgcaatatgttgaacatgtaccgaggttgccgaaagatcggttgctcagcaggaattactcgcgagccgtcgcgaaagatcagttgctcagcaggaattactcgcgagccgtcgcggacgaacagggagcagtcgcgcgaagcgcttctcaaaaaccttattgtcgccttctcaatagtctacgagctagatttatttcggttgctcagcaggaattactcgcgagccgtcgtggaagcgccgctagatttatttcggttgctcagcaggaattactcgtgagccatcgtggaagcgcttcccaaaaatcttttcgcgtaggttgcgcgcgcgtgttccccctcttctctccacctcacatacttcaagtggctaggaggacattctcccttttaatgaggtccccctctcctagaataagcaaggtggtactaaactctccattcataccattccatgaggtgggcttttgtgattttccaaaaaattaatctttaagtgggctaagacccatctattaattccaacggcggcaacaagcactctaatcgtgtagtagtgtggttgagacatcgtgaaccacaatagtaaaacatttccgttatcttaaaaaaaatcgtgaatcgcgagtaacctagtgatacatggagtctcaggttctcactgttgaccaaatgatatccaaaattccatccccaaaatcctgttttgagaatccataaacttgaatatattgattcctccaagagatggcttaaagttgtgttcgagaggaggggttgggagcctctctctccgatacgcaacatgaagcacatattagcgtatgattaattaatattagcttaaaaataaaaaatagattaatatgatttttaaaagtaactttttttatagaaaaaatgtaaaaaagacacaccatttagcagtttatatgtagcatgcacgtggaaaataaaaaagataaagttggaaaagtatattaaagaacacaacctaaacgaagtttttaaaattttaaaagtgggccacctgttaatccactcacattaatatctgttgttcctcccctcaccacccaccccccccccctcccgcgcagggtgatgagcgcgtgagaggcccaaggggatcctgactttcggattcatgtttggggcggccattgctggatctgatattttcagcaaagctcccaaaaaattagatagggatttgttttgggcctctctttgtccatgctctaaaatgtacccatattaatcccataaaaagtagggccattccgttctatttctccttgttcaagattcaaatactatcttgctacttccgcagaatggaagggaccataccaatgaaaaacctggagaatgccaggcgagtccggctcaggtgcagggaaccctgcacatagtaatatacaggccaaatcaaattgcgacacctgtccagggtggccctacttaattacgcatgcaacggaggtttaacgaggactaaacgggtgaatggttctgttacctgattttgtgggatcgtggttaaacctccgtttacattgttacttggttgattgggtggacctaccttgtatacaggtgtcgcgatttgatttggcctgtatattactatgtgcagggttccctgcacctgagccggactcatgccaggcgccgggcgcccgatgccgcgtgcatgcatagggcgctcctgacgtgagggggggcccacgcctgtgttgcccacgtgcgcctatgctgcccacgcccttacgctgcttctccacgtgtctttactatatactccgttgcaacaaatcattcatatattttggaaacactctattaaggaaatttggtttattttttgttccaccaaaaatgtttcacctagtgcactcacaatgtttcactatgtatagatctaatgttacagtgaactgaaataatctattgcaacaaaaaaaacccacatattttggaaaccccctattaagggaatttggtttattttttgttccaccaaaaaatatttcacctagtgtactaacaatgtttcactatgtacagatctaatgttgcagtgaactgaaacattctttcgctatttgctgaaatattatttttatataaggtgagacaacgtctgatttaaacgattgaagcattttcgatctacttagtgaaacaattccgatatatctagtggaacatcgtgcaataattaaaaataattcaataataagttaaaaaaaattcgtcggaatatatccatgtgtggtcttgttttgaatatttaattgcaacgaatttaatggtgcaatcggatcatgatttggataagtaatttaggagaaaatcagtttaaagtagttttgcatgtaaatcggacgctgacgtcatgctgacatcagcgcccgattttgctcctagccgatcgggcgcccgatccgtaggttcgtccgaaaaaccttgtcaaaatttttagcagtagtaaagccatcaattactgccatttcgggaccattgcataaaaatatactacaaagcatatcaatggggtgataaaataatgaacatgaacgttcgcagcagaccatcaggaatataacttatcatcttcatctggttcttaaaacagaattactagagaagaaaagcaaatgcaaaagttgtaaacctggagaagcttctatgctcgcagctccggccgtatagaaggcttggtccctgcgatggtgctctttatgtcgtagttatatagtactgagaaatacatgcacccaatttatttattattcataacactaattattgatatgctggtgtctaacacctaactcttcggatgtacgtacagctagctgatggtccaagtcgtggcgtgtctaggcagtggagacggcctatgggcatagtttagtgaagacaggataggttggcacagaagaatcatctttaaaatgaaattccaactggccaactgtatggaacaaattgaccattttaatatcaagtcaactgttgtggctataaattaatgaagaatggatgatcctctcacatcagctgcctgattacgacttgtcaggatgttaaacgcaaaacactgtagtgtcaccataaaaggaaatacataaactcaatcattaatggggagcatggaaacctggaatggttttcaacgaaattacaaacaaaattacccttgaagatgttgaactttttccgtggggtcatatatttattacaacttgtgctgattactcatgcgctgcgattaataaagcattggtttgacacattcagagacctctatgtagactagatgcatgcattgggtggctagcaattggcccgacgacgactactgccaactgggtcaactcatgagctatgccgtcttgagctatcctaaccttctgtgtcacccggaggtccctacttgttatagcacgactatgggtgcctgcataatagcctcgtatagatggtccgtaatatatgataatgtgatgaaactttaaatttaaacttttacagagttagaattataagtatgaacggacctatgattccaaagaaaatctgagattgacccctttgcttcttgatgcaaatgtgtcacatcaaatctgagatgaatcatgctagaacattttgtatacaagactgtccgtgagattcatcaagcaagaacattttgtatacaaaattttcaatgcgatatcttatagtattatgacgctctctctcgtggcccgatcttctggtgaggggataactctcgctttgatcgagtgtgacgtttgcgacgtggctaccaaccagaacaagtccaggacgtcgtgcaatcgctacaccacaaacgatgtcgtaccaactgtgacgcgcggttgatgatccctacaatgcaaacgagagaacactacaagaataagataagatgcaatctaaatattgcgaataggtgattaagcataaagaaatagttgcgattgaagtggtagatctaatcgacccggcaaatcaacacatcaactattgggggctctaaatcaatagtcgtcgactaatcgagcgagggactagagacaaggtgaatggcacttggcaaaattcaattaaacaaaacccaattgtttttgaggatgtacaaagctatttatagaggaaaataaagctagggttaagtgctaattcgtggaggtggagggagacacttccgagatgggtctagtctattacaaggcctaaggcctaaattcagtttcagcagcagcactgtcttgttttgacgattcccgtcgactcagaatgaatttggatatgagactggatgcgtttgaaaggtagcgagataagctttccacgaagtctaagatcacccaaatcggagttggcatgaaggcgctaggtctgtttgaagtcagtgctgtctccggaggccgaactgaacttggacttggaattatcattggaacatgtgaagttatgtgcgtatccgatgaagtgatgtcttcatcatagtatatttttttgtgaaagaaacatttaattatggagggaaattaagattcaccattgcagatgttttttttttattttgcttcagcattcttgtatccactcctttgaaattagaaatttgcattgatgagggtaatcattttttgtgtccttgtcatagctatttcatccctcctttctgaaatatttgaagtttaagaacagacacgttgaaacttttaaaaaacttaaccttctaatatgcagaaatatttaagtttatcatgtgaaaataaattaaatttagaagatttcagaaactttagaggctaatggcaggtcatgttagtttattaaaattaaaatcagagatgggcaatacatcataaacttcaagcttaaatactttatggtcagtatattgtagccacagtttcagtgaaaaatgcaaaagtaccatatgtactaattaccagatgcagaaatttacattttgttgtcaatttgacatctgcatgcatatgctaaatcactatgcaaagtcagagaaatttgatatctagtatttaaatccaatgagttgaataaccttgcaggagtacctttttgtaggttctcattgctctgctggctgcaaagcaaacagagggaaagccaggattcaaattaagttccaaacaaattaaacagaagtgagctgaaacttagttaggtcgttacctttgtgattaaaacattacatttgcataaacaatgaaccttaagatttaggttgcattcatttgcctctttttgagattggtccctcgattggaagacactattaagcagtagcgcttgacgttactaacttccaaagtccaaactgatttgggacaatgggacttccaaactattgcgaggaaagagtcagttgtcattcatgaagtactgatttatgtggggaaaaccccacatacatcactctcgagtctcgactcgatcccttccaaacttttgcagtaacactgattttgaaagaggaatatttttttttcaatgccaatgctggaagcagttgaaaaactgcagtattttttctgattttcttatttcatcgtcattgcactgctaatgataacgatgatagattgtgtactaatcaattaggagacttatcaagtccctattcagattagtgtcagtggtaaatttattgatcacaaaaagtattcaagatttcaagcacttatagcaatatataccaatgacgacagtgctgtcaatggagaggaagtattaatgtttatttccaacatgtaatttaggttttcccaaagcagtaggccaaacttgtacttaggctctcatattggtatgtccaggtgtgcaacatatatggtgtctcttctcctcagttacctaatgcaattaagtgttgctaacataccaattgccataaaaaccaacctagataccctaataaggaccatcagtcttcgagtcattgccatttttcaatataatcatcaatttatcattttgatgcaagcataaactgcatataagatggataccttgtttatccgaacaaaatctaatcacttaacagctccacctgcggagtacatatctatcttgcttctcccttcatctgcggatgatttttttttatcaagaggagacaagctccctacatttccatatgtcagaaacgaggcaacatagttcattgatctaccagatcggagatcataaaacgtttaaggcaaatgcgatgctagttacgttcataaataatcaaccatgtgttccgcattaaagcaaggcgacacgcattaggcatttactccctccgtcccaaaataaacaactctcgtacgggatgtgacgtattctagtacaataaatttacacataagggtgtccagatttatcgtgaatttgtcgtatcctatatgagattggtttgttggtttatttgggagagggagtacctaagaagccaacagcaaacagagattgggggtgcatagcaaacaataatcctgttttagctccagtaatgtacaaaaaccttgtgctattgatttccacaagtaattccatttatgtgtgatggagctatgcattagcttgtttgtgcactatgcggtttcagtcctgtcagcttgcccgaggatctgcacgtaggcgtccaattctcatcatttttttcgtcaattcgtccctctgtccaacgcctatcgggttcgtaatttcgcaggacgctgatgcattctgctgttccttgtacacagggaaattttgctttctgcatttcagaggcgttttgatttgttaagagaggcgagacgtacagcgagcttctcgggtgtgagaggacctaatttaattcggttttacaagttgatattgtggttcagatatgcgattcaaactccacgtcaagatgaggacctaaagtgaacttattttccatacgattctgacgagtccaatacttagaacgggccgtccttgtgctctgccaaattggactgaatctcccgataccgttaaaaagaagccgaatactcgattgccatttttttagcgacgcagccagtggccacggctactctcagttactgattgctttgctaggagccttagtgcctcacaactaattataccctgccaaaataccacaaatatttttcgcagaacaaaattataacaaatgtatcatcaccatcatgtcattttgtgacagatccaatgcattatttcttttcaccatgttcatcatcagcatacaacaatcatagattgaagcatcatccacatgtatgtgttcatcttaacaaaagagacgtttatttcgtcatcattaagagatatatagttcatcatcccgttggtatacaaagatgcttaacaagcattggaaaaaaaaagtactctcaaactaatattaaagctgggttggtgaccactccaagatctcaaaatataaccaaagctggtgcatggttatcaaatccaaactctgaaaatactttgggggtcacaccaagacccaagcgagggccaaaaaaaaagaaactacagaagaaagggaaaaataaaggtgatttccacggctcccatgataaatgtcgcaagttcagtagcagtattgttacaatgttactgattgttttgctcacatgctggggcctttagaacatttcagacagttagccctgccaaaacataaaagctatatcagcacattgtctaaagatcaacattgtaatgatatattatagttcagaaataaattatggcttcctggaaaagagaagatgtaaagcatggcctgtaaaaactgtgggttgcccatatgcaaagagttttactatacattcatagttactaaattggacatattatagctatataagacaaccagatattagtatggtctgcaactctgcatactgtttttcttttcatcaacattatgaactgagctcttggataaatttctagttttgatatatgaatcaaatgcatgtaacaggcagaagcatcttacctccataacaacatcatcgtccttagatgtttcacctgtcaaaataaagaaccttatttttgtcaccaaggaacagacaagaaacaaattgcggtaagtgttatcaagaaaatatatatgtggtcacgagattaggttgtgaacctaacacttacaacagagtttgtgttcatgaatatattaacagaattacatcaacatcttagaaatacaatttcttgataactttacagataagaaagaaacatgatcttctacatcatcttcgtagccagttcaaattaatggtacattttgagttactcagtcaaacttggatcaatgcaaagctgtactagtgacccttattagaaaaaaaagattggttggaagaatgacaaagcaaagcaacgcaaagcatgatcacttgatcagtactcaagtaggcccttttgcacatacagctactgaagttttacaagatcacgtcaacatgaaaccaatgtcatgtcattttggactgcctctaccattcgttgctcacattctgtaaatccttcatcaaatattatgtggtaattcagagggtattttgttctgcctatgagcagcttcacttgatgaatattaagttatgaccagtgaccacaacatatggtaaaagcagaatttctgctacttgctctaaacctttcaaaatggtaccatatatatagaagatataacacagaatattctctttatcaaaaagcagaaatgcaacagaagttgattgttgaaaatattttttattgtagttcatttacctccagttagttctgatgtccacaatgccaggttctccttcaggagctgcatcataagcatgctgtccttgtaaccctccacaccagcagagttaatctcagcagtagcctcatcaagtgcttgttttgccacttggctagctctgaaaaaggaaataaaatgactaactcattgattatggtatatctttgaagctttgaaagactggtggatgatgtgaaatctggcatggcccaagatgcaactacacacaaattagctgtcatatccaaagtattggttaaataaaggcagatccaggaaacatttgcctatcctgttaagcatttcgcttgtggggttcattgatgcaaattggtaatgtttcatgatgccatcttatattggtactaagcttttctcgatcatcaaatttaatataatgaataatgccggcatgcttatgattcaaacaagtttggcgcattaggaatatcagtaaaatgggagaaaggggccattaatgatgcataacctctcaggagagttcattatctcaagaagactgaaaagttgagcgcaaggccaagcctgaattgatgggcaggagaaagctcactggaggcaacaaccatggcgtgctggagcaacatatgttagttttccaaaggtggaaaccaaggattaataccagaagttcatttgagcatgtgtactatatttaaaagatttcacacctgataggccataagggactgatcagtagcagccttcttttcagttccagtgctaaattcagccaagtaacggtagtagtcacccttcctgtaatttttttaagagtgatgtataaagcagattaaagaaaaaagatatacacatgagtatcgtgcgaacatgcac

SEQ ID NO: 9226 - DNA, 21982 bp, Oryza sativa
aggtgcggtgtccattgaccaaataccatatttatggagtgttttcctctaaaaatgagttcaggcggtatcccacggctaactccacgaagtcgaagcgtcctgtagcaaaatttacctcgaagtacacacttattatcactaaaaatgcacctggctaccttgcagatcatgcacttttctggtcagtcttttctaaggttgttcggtacaaacatatatatttagtgaatttattttgttgccacagtttatagggataattgaaactattgtttagatgctgtgttgggtactccaagttctcaacactcacctctccttttccacgcgcacgctttttaaactgctaaacagtgtgatttttgcaaaaaaaatttatatacaaaaattgctttaaaaaatcatattatcattttctttaaaaaaatagctaataattaattaatcacgcgctaattgatcacttcgtttttcgtgcgcactgtttgaagttaggaactgcatctgaacacagcctaaacaattctttcaccatctgatcgatgtcatctcgatccgagcatcaccccacagcaacagccactttcatttttttaaagttctattaaaacactatataaataatattatttatctcttcttcaccggtagtaatataccggtaatagatattatcaccagattttaattcttcgccactctcacagagcttgctaccggataggaaaagagcatttaatgcttcttaccggcagctaaaaagtaacattgttgatgcccttactgatcgatgccaatctcgatcctacacagtttccgaacatcgcggctggatacgtatacaaaagaagtaacgtaaacaagtatctctctgtttctttttgtttgatgccggttagttcaaaattacactaatcaatactatttatttgaaaacagaggtagtaataaacatggtgaatatttgtttctcattgtttatttgtttctcattattccatatcgatcgagcttacacacatatttaatggactaaccatattgttgatcctaatcggtgcctccattatttattcccgcgtgcatgcatttgccgtcgttgacacatcacggcttggccgatgttgcggccgacgatgatcgtttgcagatacgtaaaactcggcagatctttgttacgctcgacggcgggacgctaggcttttcctccgtgacatctgcgtggcctgtcgattgctccatcacgcatgcgaatggaaacagttaattaatgtacgtaggagtatgtgttacttcaaaaaaaaatccaatatatataaaaaaatatatactaaaccagaaaacgttcaaagtaattcctcctcgataaatttaaatctgaggcaattattatattttaaatagagaaagtatgtagacatagctagctatacttaattaaggctttgtttcgcaatgaaggtcttgggcacatgcaaaaatggagggactcgtaaccatatgattaattaagtattagcttatcaaaattagaagaaaaaattaatattttttaaaaatagtttttttatatacataactttttaaaaaaattatcgtttaatagttcgagaaacatgcaagtagaaataagagagtagaggttaaaaaggggagggccaaacacacgctagaagaaagaaccgcaactccaaatgttcaaagagatgtagtggttagtttctccacatgatatttcacaaaacatatacagatggaactggtaattaacactgatgttattcttaccggcggcagtgttcgtgggcatcggaaccaactggcgggcgaatgccgaaggcagcagagcttgctgctggctactcaggaccagcaggattgcaaggctaaacagcaagtacttggcagaaggagaacccatatttgcttgtgtagtcaattagtgcgcgcgcagtagctacgagtataactaatttgcaattgcaagatagcaagagatatgctgaatgttttgatgcagttgcagtcgatcatcgagccaattatagtcaggcaggcctacgcctctttgtattactcaggcggcgtttttagtgataaggatgaagtcaagtcgtcgtcgactgggtgtgtgcttccgagaagcaacgtcggtaaagcaggaagtacaagccagcaggctaaaaaacaatttctgctatatcatcacgttcctagagagaatctataattgaggagagagagagcacaacagatatatatcctttcgattaaaaaaattgtaggaatatgagtccagataattatttgtttgtccaaattgatctttgcaaattagtttttttttaaacggaggatgagatatttgtttctagttttttgaattgttggtagtagggtggacacactttttattactgtcagtcaatttttagattttttttctgaaaaataaagaggaatctattcccaacccaaaatccgattagcaatcttgaggttgtaattttgatgatggattatgttgaacggtcccacatttgttgttgaaggataaaaaaacaatgtataagagagaaagcccttaccttattggttagcttttaaggtagaaaagatattttaagattttacaattggcattaggtcttatctagtttaacatctttgtcctaagggacatagtgaagttctaatagaccataggtgctgcggtaccaatataccttagatacttgtcataagtgacatccgttggaataacgctattagccctttagaagaagatgctttggaagtgctttttattttcaacgagaaaggtagcccgcgcattcgcgtgggcatgtattatagtttgtgtttcaaactctataacgacggaatataagttgtagaacatttccggaatataaatcagaaaagaattttgcatagatgcacaggcatcttatttgttattaaaaaaagaatgctaaaaggaatcatacatcactatatatataatcactatatatatagtgtaagagaatttagatcatcctacaataaaaaaaggaatatatttaccataaaatagatggtagattttaatatactactaatgtgataagaatgtctcttagatttaaataaaaatccctttatcctggtcgtatataaactggttgtttgtcatcactacttactataattgttttaagagttagatgacttttaataaatgaatctgtattagcaccacttaaacaaatgatacattattaatacactaaaaaattcatctacacaacataacccggtgttcatcacttttttcaatcatatgtacaattagtataaatatatcatatctaccgaataatatgataacaccattaaaaataaacatgaatgcctctctaatggatgaagtatgtaatggcttaaaacatataggtcccgcatttcgatgtagccatgcccctaaaaaccatcatacaatacaatttcaacacttagtacactattggtacacttacaaatgattatattgataactatgtcactttagttacattgcctatgatggtctttcacagacaccaccttaactcaaccatgtagatgcccatacaatatatatgacagcgtagcaagtactgcaccctgcattaaatgtcaaagagggatagaaagaaggaggaggtgatgaaaacaatttttttcaaaaaaatttgagtcgatttttggtagagaatagacaaaatgtgtatatgaagttagtaataagtacttatcaaattttaatggaatacatacaatatcatatttttcaaatgagtggggttaatcattcgacactacttaaaaaaatatagctaaagagatgtactaccacgaaaatctgtaaaacaccgtatcattatttatattttgataaagatttatactttagcgccaaatttgtttccaccatatgttatttataattatatgagactcatttaataattctaagaatgtacttattttcacaaacttatttacactaaccaattcgctagagtgcatttatagttgggttctgtggtgtataacattcgtcaattatatacccagtatattagaatttctatcaactacaaaaaatataatataagtagttttatgcgtattttattggattattcatgttttgccaatactacttggcaaagataatacatacttctcgtgatgaattaagagttgtattctagcaaaataactgtctaaaatcttatttatttttttttcacatctatctatcatgtatgcttctcactcctcaaataacaatcaaaaagttttgaaaaatttcagatacctttagaatctcaatatcacccaaaataaacctaaaaagatccacttaaaaaccaaagctaaattctattgttttattatcactggctaaaatttaatttatgttttctcatcaatctattaattgtgcttctcatacctcaaataagaaaagttttgaaaaattcctaatactttgagaatctcaatctcttccaaaattaaataaacctaaatagatgtactcaaaaaacaatgctataggttttgttattttaattttttacatatgtagattcaaattaacgttgtatatttgtcacgtgatatttgacaccataaaatacgatatgaaattatttggaacattattatcgcattaactattacatgttggcgtcatttgtcatgatatatttatcactacaataagtttacgattaagtttagctgtgcatatttgtgtagtattatttataataaaatcgtagattaaaggatgttgacaacaaatcagtgctgacgctgatgatttttcatgattagaatttctttccgatactactatgtacgtgtgcatgttttctttttatttttttggctttatcttttttcgatcatatatggtgtaggtatttaagttttttttccccgagtaggagacgatcgtacgacgtaagcaagttatgtttttttccgggatagagattagcagcacggaaattttaagagctctaatccaatgtttaaaatagtgggtccactaatttaagtgaaaattaaaggttggatggttttctttttctactctaaatttttaggatttctctaattttattagagcatcacgtgacaatgttggagtgtttaatagacttttagtgtataatagatttttagtgtttctctaatttatttgagagaaagtttaatgtactttttttatataatagatagatttagaagatggtttaaaagaacattgataggatatttattatagatcttaatttaactaaatatatttatatgtgtgaagtaatatattttatctttatatagtagaaaatcatattttaaatactgttgatttttatgaatgtatgttttttctgtcatttttatgtacatgtatatgttttttttccagcgaagattaggaaagttttgttttcaatcatgtacaacgtttgtacgtatggaaagaaagcagtggcatttgtaacgtataaactcaaactcatacattcatgaggatattattttttaataatagatctaatctaatagtgtaaaataacaggtctatcaatttaagtgaaaatgaacggtgagattagatagtaccatgtggcgacttaggagcgtttgtaggagtgccacgtggcggcttaagagcgtttgtaggaagtttaatggacttttagtatataatagaagattggtactctttactaccatgcgtgcaattaatcagcttaaaaaatatcatgtactcatgcattggaacccacggtgtaaaagaccaagttaaagggaatgtgtgaatcatccatgtgccagaaagtcaatagtgttaattcttcagacttagactcaaatatttcgaaagtgaaacaatataaaaccacaagtttaatgatgcagcatttgcaatattcagttttcatcaacagtacaggtgtgcaacttatggtcgccatcagtctgtagatagtttgcaatccaggtttgggttacaacttggtagacttgcaaaaatgaaattggcggctcaccggttcgttaaaaaaaatgtttcttccatctcttgattcaaaaactcgaactaaatagtttttttttcttaagatgatggattaactcctcctattgaacatcgatttctttccacggcataaaatttctcacaataagatggactcaagatttacgtgtgctatcttttcccaatcccactcattcccagttgaatcggtagagccgaccattgtttcccttttactacaggtcttccacctatctaaactttctagtatacaaagctttccagtatacaaagagatgagaatggacagtgcaagtgagtgcttggtagagaaaataaattccagtagctgaactactggttctatacgaataatggaagaagacaattaattagacaaacgggatgtacctaattaatcataagatcaacgaggtcagtcacagaatcactgcacatccatcctcatcctttctatttgcgtcactctggatgcttcccattccaaatagtattacggcacaatgagatcagaattgaagcattccaaaaagaatttagcttcttcgatttatatgcacatcagcacatcaaggccagattttgaatgcttcaatgttttcgatttcctactgtgtgtttccgactaggctaaacacagtaggtgcattatccgacaacaatgcatttatttcctaccatttgataagtgcactgtatagttccaaatattggtttctacaatttttcccaacttgatatctaatctccaactaattaaactaatttctattgtccaccaatgtgctaaagccggtgctgacatcaatagagtagctattccgtccgccccatatacaagttaatatagtacgagatgtggcatatcctaaccagtactataaatctggccaattagattaacttattatgggatgaaggtagtagctgctagcaccatctaaaagcactacacattggctccatttgaacctgattaagatacagattttacctcgatttctgttagcatgttttttaaattgctaaacggcttttttcatgcgaaagttttataggtaaatgttgctttaaaataccaaataaattcatttttcaagtttaaaacaactaaaacttaattaatcatgatataataactctcattttacatgtatgtacttaatctgcatcttgggctagcttatctggggaattcggtaaggcatgcacagtggagaaaagaaactaccccagctacaaaagttaaatcaaacaataatgctatgcagcacctgtgggcgatgatgattctgaagcctactatttatccatgaacagtatcacggctgccatgttttcttcttttctggtgccacccactcctaaacagcacaaggaagaattaatattggcataacacttgctgtataaaactttgtccaccatatttcacagtggtacatttcactttatgccctgtgggcctctgtttggagctcaatattctgggttagtcgtagtagtaggaagacagaagctaagctgctagctgctaggatgaagcttggattacgatttgatttatgcaattgttgtcaatctgtcagtataaatggaggacaagcttaagcacactgtactagatgacacctcacaggtttctagctaggggaagttataatgtaaaataagcaagattgaacaaatgactctgtatggtaggcacgaatatataaacgcagaacatgcgaccagattgatcgggttaattagctcttcttgatggtgtggcctcgtgcatgggatgagctgataggtagtatatgttagggtttaggtggtagaaaaataaaaaatagttatccaaagaatagaaacaataaataggaagctaaatggccacatcatgccacaggcaaaaagatgaatgaaataaaattgtgcacaatcatcttactacagtttaaactcatgaatgaaataaaattgtgcacaatcatcttactaaaattgtgcacatcatgccttatttattctagttgtctacccatccatttcacaggttattatttattacaaatactataaatgttgttagaactacttctaatattccaagcgtcaaacatgcatcagcctaggcccaccccaccccacgtcccgtcatcccacttctactgttgtcggagtaaacgatttactcctatcgcgcgcctcaaccacccacatttattcgagtaaacgatttaattcaataataaaaacaactcccctgcttccgattccaccccacgtcccgcatcgtgctcctaccattatcggagtcaatgatttacttcgataaaaacaacttctctgcttccggtatatattctattttttctgtacccaaccaaccactctcgcgcccactttattttttttcctttttttcagaacccactttattttttttcctttttttcggatctgaattgatccaccatcccagcccacagatcggcgatacaccatggaggaggacgacgacaccgtggcggttgatggcggtgaccggcgagcggtggccggcggtagttgaggcgaaggcactgcttcgggcctcgctgccggacgctaggcaacaccttaacgagcatggagatgttcacctgggcctatagcaacaaccagtggctgctccatgtcggcgactttgatagaacaagcaagtaaggaaatgacactctgatttatatttgcatactctccttcaacttcacacatgaagccctaattttttttgcaaatcaaattaacgtgcaatctctaatattacctgatctcaattgatgggctgcacaggccttacatttgcacatcgtgctccatggggctggccgcagaggatagggtggaatccgccagtgacagaggttgtttgctatttttcttttgctcgtcgtctctattgacatgaacaaaaatggttttttatttttttcgtacttgctagatgatggatggctgctactgcccaacgtcgagctcatctctataccacaccgctacatccttccatgattccatcatcgactactgctcgccacccggttgccctctccactaccagtcacaagacacagaccatgctcttcatccttatagcaagatccagcaaagccaccagatgaatttttggctgaatcattttttttcttttctagtttgattcatatgtgagtaattttatcgcttgtgtgtgattgagcatgtaaattttttcattcatacgactattttgggatacagattaacaatactcttagtatcagtctacacggtggctacgagatcatggttgtatcgagaggaaggtggtaattgttttactcgcagaccacgaaatctcagtctcttatactgtgtattgaacacatcagtaaacatattactacacggtggctacgagatcatgggctatattgagaggaaggtagtaattattttactcatagaccacgaaatttaaacaatatttataatattggttaaagaattactagcattgtaagctggtaatatttcttttatgaccatctaggtattgcgttatacgatgtggaggcattaatgagagtaaatttgttacttttggatgagtaaatgtgggaggctgggagtaaatgaaaaactccacggagtaaattcgttacttttgaaacgtgcggagatataaaaaaaggaaaaatcggaaagaaaaattagatggtaaatattttacaaaaacgtgaaaatagaaaaactatagagaaggaatgaaaaacaaaaaaatctggatggttaatattttaccaggcccattgatgaagcatggatgagatggaaaagtgaaaaaacatagaaggtggggtggtaaaaaacaaaaaagacgaaccgagaaaatgtgggatgcggaggaaaggtggagtggtaaaaaagggaaaaatcggaaggacagggtattctgcggcgctcgaactaatattccgcactgtagcgcgtggaatagtgctaccattaatgttgtaatattatgttaaacatattggttatctttcgtgtgattatattaaaagaggagtccatataagttacaactttgctaattattaatttagaatagtagaactgaattaatagagcgcaaaattgagagtctaagatgggtgtaaaatatattactaccttcgtctcaaaatataacaacttttagttcgatgtcacatatcctagtactacgaatctggacaggtcactaggatatatcacatccaccaaaaaattgctacagttttggacggagggagtaatattgattacttgtggatttcaaaattataaatttagagcccacactattataatgcatgatttattttacacagactcgcaaccccatgcatggctcaagctaatattgttgatattaaaaatattaagattgctttcatatcttatatgtcttggtttctttcattattctggctttgctgaaaagaagaatccattccattttcaattttcttgttattatttccgaatttaggatatattaaaattttaggtatgtctataactaaatagtccatggtagtaaaatttgaagagtccatgatattataattaatcaataacacactacatttaacacgaatcctctcttattataaagttataacccactaactcctaaagtttaatatgcaaagatgccacatcattgtccactaacaatatgccacatcctcatccactaacaatcattaaatttaaacatcatacaaacatattatattatctataaatttataatttgttaaattttagagcttttaaaatataaacatgttaaatcatcatcccgtataattcacataatatttcaatatatatcttcattatttttacaatatgctatgtagctatatagtttatcctcacttagttaatgttatttctctcttctctcattgagtcatatcacatcaattgtttttagtgcttaaatgattaatctatggtctaaattatcacctcaattatttttagcctttagaagattaatctacggtccaaactatctcaatatttttcttctttcataaagtcatatcaccttacttttacatttgaatcattattgtatatactatttaaatttaaattatcataaaccacgttaacttatataatattatattgtctagttatcttacacgttatttttacttattattatcgtactagactcccgcagcaacgcacggggtttcacttagtatttagtacggcattgataaccaactaacaaacagtcgcaacttcttgattggtattgcttagattttaataaaataacacattgactttcgagcatgtaaagtaaaacttcatatttgttgttttgaagaataaatataaaattataaatttaaccatatgcatggatgaataagttggcattgtcatccttgaagaactaattaagaaagtatattttttaattgtaaattactttttggtgttttacaatcttgaaatatcattggcgttttattttagtaaagaaggaatagtgagttaattaaaactgcaatgtaattatttatatatttgtacaaacaatactaacttaaaactataactatgttactcttctaaatctattcatgaccatggattattatgctgtggttatttctggtagttgtatcgatcgtgaaatcagcgaatacatattggatgccaggacaatatgcttatatttgttggcatcttctcagcacatttagtacatgtcctcatcgagggttcgcatcccctgcctttgggcataacggcaagtttggatttcgctggtccatacatacacctcaaaaatcacttttttctcgaacggaagacctcttagacatcatggttgtggcccactgtagctcaattttgttttatgtccatcatgaatacctgcatcttcaagatttattatccacaatacatatcattagggaatgtatgtgtgtattttaacaaatgtatcagttttttctcattggacatggaacaaatggaattaaatttaaaaatatactgttcatccaattttttgtcaggaatattcgggatgcaaaaacttgtggagaaatattgtaacatacccgaattttaggtcttaaaaatttcttgttaaaatagttagaaactaacttttctaattttgagagccaaaaattgctactttaacctaggtgaggtcaacttaacttgtacttaaataaaaatttgagaacaaattaaaacctttccattttcagcctagcacaaaaatgcaaaaaaaaaaagtgtacatgcatatgcatctagcattagtttgatttcagtcttttatgtgcatttggattttggtttgcatatcatgttaggttcatgaacatgaataaaaggacaacttcactagacaaacccatggtcattcttgtgacgtaattataaggacatgaaagtgaattcaaataataacaactcagttcaagtcaagtcctaatacaagtctttacaaacatttagatgcatttatataatgagaacacttatataaataaacgccttgctaattattgaaaataatttatgcaaggtaaaatcatgggaaaattcatgtagtctctactcaacacatacaattcactataattttattaaaattttaacacttagaatgatacctcgaataaatcagtcaaaccagttaaatgatagaccaattataatccttaatcggctaaaacctgcctcaccataatgtgcattaaactgcataaaagtgtatagggtaaataatttattaaaatactaggttatttatcatgaataaatagaatttttacagaatttatctactctgttcaaatctcctaaaaattcaaacaaagttctaccgagcccatattctccaattttctgagtgcaaaccacataaaatttttaagagaaacaaaataaaatggaaactaggtatcttcagctacctccagaaaaatccacatgaatttatcgtgcccacaaattaaactatagattaacaaagagagaagagagattcaaatcctgaaaatcatccaaaatggattaacacccaatctcctacccacctctctcactccagacttgttcccttcgccctggacccacttggcagcctccttggcttgcccttcctctgtctctcctctccaaccgaccaagaacacgagagagaagaggggacacgccctgggcgccggtcgacgcgtggccgagacgcgtggacgcccagttctgcatctctagctttctcctcctcccagttgcatcgccacacatcactcaccacccgtgagccaaagaaaccgagagggagagctccagctctcctcttccctctcctcttcgttgccggccgccaggaagaaggacgccgcaacccatcgtcgagacatcgccaacaccaaatatttcccgttccgtattctaatcttcatgccgaacaagtttccttttgacaccatctcatttcatccactgcagcgacgggaacgccatcgtgcccacgggagctccagagcgcgcccggagcgccgccgccacgacctcgtcgctgtcccggcttctgtggagcgaatccggtcgagccgtcgcgctaacatcttcccctcgaggtcctctccaaatgccctcaagaatccccaagatctgagcactgaggagagagatcgagctattcttctccaactccggccgccgagctccatctttgattcttctttctccggtgagctccaagtcgattccatgcatttcctaggacctctttaacaccagagacatacatgcatggcacttcttgtagtgagtcaagccgacgccgttcatcgagaaggagcgccgtcgccgagccgttccgaacgccgtcgtcgacgaccaagcttcgccaacctcatccaatactactgtgagcaccctggagcttctagagttgcatgcatgcattttatccacctagatccggcctctaacgtgacatgcatcactaccccgagacccaaagccactcgtgctgccgtcgccattgattccggtaaccacagatcacgataagaccaccattggcttcgaaaagaacccctattccttttatattttggtttcatgccgagatctgccaccgttcgccgccagaaagctcgagaacgagctcagccatggctagctctgtttcagctcgaaccagggacctctgtggagaagaaacaaaactgtagatactactttgtaaaaactaccacacacatggaacagtcataggactgcggattgatttcctgaaaagccagggaccttttgcatattggtctctcactgacaggtggaccccatgagcttaaaatctgaaaatctaaggaaaatcctctagagctttatattttcaacagaaaaacatgcaaacttgtaaaattcatacaaagtgaaatatagctcattttgagatgattcaagtttctgtgaactcatagaaggatgaaatttaatatggaaacataaaacttggcacttgcagtataaatttcacctctaaaatttgtctaagaaaaactatacataaagcatgcacaaatttacaaaatgtatagagaattcatttcaacttaaattgaagcaaactcaacttccacagattcatcaacttactctctaaggtaaaataaaataaaaagatgcacttgctttacaccaaatacctctaaatgtatgttatacaaaataactaattttagacaagctgaactttaaaaatttatataaaattcatcttacttcctttttgagtaaactcaagttctgtagaatcatcaagtttagcactttagatatataaaataaaaatatatacttacagtgcaataaaagcccctaaatatttatataaggaataaacaacttagagcacccttcaacttctaaaatttgtagagaattcatctttagtccaaatggaatgaaccaaatttctttagaactagcaagtaatgaactttaattaggtaaaataaaatgtggcaccttctatactaaatatgtcactaaactttaaatagataacttcagtgctagtcacatggtataggttaggcaatacatatgtataaatgtatatataaatgcactctagctctaagtaaccaaaataaaacttgatagaccagagaggtcatagttctatccccaaccaccaaaaacttagcacacttagctcatatatcaatttctagattggtatgttaagtaactaacatagaacactcccctagcgtataaaatgtgtagtagcgtaatataatctctaaaattgtgaactaagattatattggttaataaaattagtcattttatacatcacaaacaatatgaaacatgtactggacataaaactccaaaaccatgtacacatagaagctacctacctacaacacgttaaaacttgtaaaatacataagaaattcataataactctaaaagttatgaaaccaaatgtgttagtcttagaaaacacatctctacacccctgagaaatcaaacctaataaaaatcactttgcaaaaatatttcataacactacctaagtaaataccaccctgtaccgagtaaacttctaaaactcataactcacaaataaaaagagataaaatataaattctttcacctaaattcatcttagatcagtacctacccactgtgcacaaagcatgcattttagagcattttgaatttttacctattttggtgtttaattgcataacgtgtattttatatagataattgcgtaaatgatgaagaagtgaattaggtgctaacatttcccaggaacaaggcaagttttctcctcccaatctttgatcacattgaatcccatgttttgaggaatgaaaatatatttgtttgcaaagttgcatatgaatttagactataacggtatttgaaacttggttatggtagctatgacctaattgctgcatttacttctttgaataattgtgatcctcactgattgtaaccttagaaatggttacttagaaatggttagagtactttcaaagtgctcaattgggtttatacatgcttacataaaagccttacgcttagccatgcctagtagtttctaaataatttcatgatcacttttaaaatgagaatttaggggaaaattttcactgctggacagaggtgaatatctctgatatttgtgaattaaaaggtgtaaaagtgtgattttagacctgggcggcaagtggtatgcatatggtgttagttgcatacctataggggaagtgctcgccctagtcaattaaggaccgaactttgtgtcaccatctaagtataccgtgcaaccacatgtgctaggaatgggacggccttagcttattaagttgtttaatgtctaaccttgcattgggaggcagtagtagtatgaactagtcggaatgatggtttataggagctacctagtgcggttgtgcctaggcgtctaagcgtgtccaatataacggttaatataacggttaagtacctcgtggaggaatggatgtgttcgctgccatggcgctagggatggcgagggccccccgacctagcggcacttgggttgctcctcgtgtgaataaacacttgccgtgctcgtgcaaggttaggcattagacaatgtaaaggcttcgttatgacctttagaccacattcaacgtgaagaatgtggtagagtcttgcaaactcgaaacaaactatagtgttcatatcatgtgggtaaagctgtacaaactctgtagagttctttaaaactaatcgattagccatgctcacggtcatgagcgctttggtgatgtgtcatgagtatagccttgtgttgatgaaacttgggattgaaatggaaaaattgtgttgagttgtgtgagtgatgatgattataagagttgtgccattgaaggcaacaagagtatgcttatgatgatatgttgttatatatgatgatatattatgttaattatgatgaacttacaaatttgttaatttaattgaatcaactcctttacaaaatatttgtgaaccaaaacttgctttatgctgaaattaaactacatattgtcctttgaatatatgccttacatgtagtatgttaggattgatttttggcttgccagtacattaaggtactgactcttgctactggaataatcttttgcttgcaggttagacttagtcttcttgagtggtgcgggtttcgattgctttttctaggacttgaacttaatggggtaaacccttaatcggtgtgcttgtggttgggtagtcaagcttccgctgttctctgttatctatctatatttggtcggtcggcctatgtaactataaagtagttgtaaatttgaatcgctttcgtcttatttgtatttgctatgcataaccatgcttaagaagaaagtgtgaatctagtacatatcctaggaacaagattcatatgagtatgagttaaggatatttgaggtatcgtagatctttagcccatttgacaagtctcctgaatgtgtaacacatctgatcgtctccttcgtgtggtttgatgggcacatctcaggctgaagttgactggcaagctaaaggcccattaatgtctctaatatccttctctcgaggcgtcggatgttttattacgtttgtttgatggcttgaattattcactttatccctcaaatataatgagaggtccggagagcctacgacaaatataccgtcggtatcgcacagccattgcgcgaaaataacgtgggaaagacgtcgcgtcggtatcgcacagccattgtgcgaaaataacgtgggaaagacgtcgcagacggtatcgtgcggtctcgcacgccgcgctgtcgctcgtgttgttgatgagttgattttgacaaagaatgtgttgaaaaaaaatacaaagttgctttttgtgcaagttctttggtcaatgcttcatgtgcaaataaggcaaaacaaaacaatggtgttttgatttctcaagattgctcaaagtgtgttttgaatgagatgaagttgaaagatgctttagggcgtgttaaacacatggaagaaattgttaaacaagataaggtgttttcttgcccaacttgtagaaaataaaaaggtcttttggatgcttgtaaaaattgtgctattcttacacagaaggtttcttatttgaaaagttctttgcaaagattttctgatggtaaaaagaacctcaacatgattctggatcaatctaaggttagcacacacaatcgtggtttaggttttgattcttatgcttatcatgctagacatcctcctattattttgggtgttgctaggaggtgaaattttgattggatctgagcctaagaacactgtgtttaaatttgctggcatcatgtcttctttaagtgcatcttcatcgaaatcaaatgttgtgaatgcaaaaccatcaatttcagaatcatctacttcacaaacttgtcgtgaaaagtacacttattctttttgtggaaaaaatggacatttggttgttttttgttttagacttgcccataaacagaaaaaggaaagagaaattgcttttgcaaaatgacattggcaaaaatcgggttttaattcgaggagcacagttagaccgacattgtccagtcggtcagaccgcaggtgaacgggcggtcagaccagttgccaggcccggtcagaccgcaggtacagcggcggtcagaccggccttggggcaatttttcgcatacttcaaatcggacttttgtgaaacgacaaggtaagttttcaggtaagtctggttctgattttattagtgcatatgtatctactggttctactggttgtgtgactcagtgttggattccaaaatttcttatttctaaccccaacacagaggcgtcgacatcttctcgtttgtaggtagtttggtggcatagtccccatgtgcgttcaatgttgagatgacgattgcttttcaaggtaacatcaatttacttttggattgacataatattgttctactttcttgattattagcttttcatgtgctagtgtttgagattgtagtttttgttgatactaatgaatgtatgtcaattttgagagtatttgtgatatctttggcaattggatgtctttttcaaaatctttgatttcttcttgatttttgttcggggagaattggaggttattttgagggggagttagtgctttttatgactttcttttggcatgatttaagggggagtttatacctcatggttttatcaagcaaaaatatgacaatgaaaaaattgataaaagagagctttgtttatacatatggtattttcttgtgcatgccagcaatactttgaaggtttatttgtctctagcatagcttgtatgtattctagtcttttcatgagatttaaattttgcttttaagagagatgatgcatgacacttaaattctatacttgaattaagcaaatatgcaatgttgatgtaaaagcatatggtttgatttctaaatgctatatatatatatgttttattgaattgttattcctcaaatagctttaattgctcattgtgaaaaagagaataaaatatgaaaaaatgaataccgaatccttggaaacagtcttgacgacaaagacgtattcgatgtgagtaaaataatgggtgccgaatccctggaaacagtcttgacgacagggacgtactcagaataaaaaaaagagaaaaatatgagaaaaaggctcaagaaaagaaaaagttaaaaattctctttgttatgttgtgctaaaggttatttaagaaagagtgataaatgcaataggtatatgtgtttagcgtttatttttcaacctatgtgcttgttaagatgttgcattataaattgtatgaaatcatgaatttttattgttgattcaagcttaattgtaaaatctttgattcatggttatactttaatgcatgcttattatattatagatgggttcatcttcttttattgcaacacatgacatgatatgctatatgtatgttaagcttttatacattaatgaaataattcctatgctttatgaaatcattgtcaaaagggggagaaataatgtgaaaatttttagatcttttggagttgtcaaaagggggagaaataatgtgaaaatttttggatcttttggagaagagttaagttttagaagagaagagtttttaagaagagcatgtttttggttcaattgggaatttctttcttttaaaaaggggagaaggtttcttgtttttggttcaattgggaatttctttcttttaaaaagggggagtagttttcttttggatttttgagcacgatgtgtacgtttgtacgaagtgtgctttttaccgcttttgtttttaatgttccaaactccaaaacatttttaatgggtttgccaatgtgttcatcaagggggaaattgtaagatcaacgtgtgttttgatttttattctgtgatgaacaattggcatctgtgattattggttttgatactggagtttattcacgaagtggttttggagatgattggagttcacaggtgaatctacaggaaatcgctgttatttcatgtgaccggtcagaccgggaaggtgttgccggtcagaccggcggagatcgagcggtcggaccggccggcccgcggtctgaccggccgacgctgtgtcggtttcggtttcgggttgtttctttggatatctgtgattgtttcatggttatggcttctagatagatactatacgtatgtaatactgttgtttgctaacaatgagtcaagttggagatagcttggtctcagaatatggtttctttgtttgtttcatgtctaggtgactcgatgcctcgggagagtatttgcggtgatggaccgggagtcggcttggtggtaagacgatgtccgtggtggtcagatatcaagcgggatactaaggctagagttgatacacgtggttggtgaagattccatatggcatacgatggaggtattgtgtacgtatgggatgcggagtcgaatttgaaaggagtccaaatttggtacgattggttatgtaaagtttctttcttgtactagagggtttcctaaggtgtttaggactcttagtatgagtttggttcatggctttaggctgcctacctcatgtataaatagagggggagcgtgaggcttcccggattcgcttttgagagcaattgagttgagttttaagttagggtttcgagttagtcaaaatttttgtaaggagtgctgttggtgcactttgtaaacacagagagaagtaataaagtcgtcatccactttaagagttcttcgatttgtgtttcaccaggtttcggtggtctaaccgacgactcatcggcggtcggaccggcggcaaggcggcggtcagaccggcggaagcgaggcggtcagaccggcgatagcagcaggcacggtaggcgatctcggcggttcgaccggagttcgatctcggtcagaccggcgtgttccaggcggttagaccggtgcaactacttcggtcagaccgcgatccatcgatttcgaaggtaacttttatttccgctaaaagtttttggtttttgggtatctcaaccattcaccccccctttggttggcttagttcttgtgattcaatcctacaagtggtatcagagccacgtttgctctttttgatctttgccgatcttgagtttttgccatggttacttctaataaatttacaactaagcctcatattttcgatggaacggat

SEQ ID NO: 9227 - DNA, 23480 bp, Oryza sativa
ctagaatgacttacattgtgaaacgaaggaagtattcatcaatgagcagcatgtcaagctatgtagaaatgtagactagaaaagatcatattttaaatctatgtagtaatgcaaaatacagaaaaaaaaaaggttttattatgccattacttgaagtctgaaatatccaacatacgtcatagttaatatcaaaaggggaaaaaaagatagaaacatcatacctttatctcatcaacaaatgctaagaagtttctttccatgtctcccaaaatcgagtcccactccactgaatttcagagcatgtcccagagaaaagctgccacagaatgaaacgagatcatcacaaggccatcaaaagcagcacgacctggctatgatcgaagacggaagggtcaagataatagctgcctacagcgcagctatccgttcctgcttgctccgcgtcggtacgccttcgccaccgaaccctcccgcggtgcagcagcggaggagccacggcggcgggatgatcgatccagtcggtgaggtgtggtcggggcattacagcaaacacctggtgggcgcggcgcaccggtgctatgcgaaatcgccaaccagagactagagcccgcctccttcgcatagcctggcgtggatggtggaggcgaggagctatgtgaagaacgcagaaggtgggcacggcgggcagagctgatcggcggcggcggcgccaccggcgccggcttattcatcaaccgaaaaaagaaaaaagaaaaataatcagttgcggggtccggctgcagcgtagcgtgcggtagaaagccaccattcgcattatctgtcattaaggggtgaatagtagatacgaacagtgaaaatataatacatgctacagtattttactatagctatagtagaattaccttaaaaaaagaattaaatagtgttcgatggttctatattggtctactgtaaattactgttgattaatcccgtgcatttatgctgcagttggaatgacaaaggataccatcccgacagccacaatactatataacattagctattttctaacattaatcaacagtaatctacattagaccaatacggaaccatcgaacaatattttcatacgtttctacagtaattctattgtagtataccttacattttactattcatcaataacattcaccctctaataaacattttactattcgtcaataacattcaccttctaatagcagagggtacataccatttagttttgagataaaatgtgagcatgatgagtgaaaagacaaaatctgtcaaaatctcaataaaattcaaacaaaacttggcaaccaaaatttaaacgattcttttgaatgttttaaccaagtgaagtagacgaaaattgttcatttttagttgaaattcatttggtttatggaaaactcgttgcttttcctataaatagaataaatgaagaataaatgttacagaattgagagaaatgctaaagaaattatgaaggaatcggaaataaaaaatgcagaataaattttacaaaattgagaagaatggtaagaaatgaggaataatcagttgataattagtgttaccatcctgtttttctctgattttttttaaggctaccttggtgatttacacattgcccctttgtgccctcggctcctcgtgctcgcgcgggttaccactcgtatgaggtgcgccggtcaatccgatttttaggccaagtgggatgtgcatgcgtgccggtccccgctgttggttggtactggtttcatcaataggctattttgtaaaaaaaaaaatctcgtgtttgcatgaaatatcatatacgtcctaggacagcctaccacgctgttatgtttcttccaaaaaaactcttcgtcttttagagaaatacaacaggaagaagaaaaaaatcttgcttataaggatagagctgtaatcattaaaattacaggggcattcttgaaaataaccacatctgaagttgcatctatccccctagtgggttttggtgattaatgacgaataaggttaagggactaatgagttttattgagatactcaggtgattagtcccaaggtaaacttaggtgagcaagagatgcttggagacctccccccccacaacaatcattcaagcggtattagaactcgaagggtgcataggatagtttaattttgcaatcgagtcttaggaaaaccatactattaggaggggttccaagtatggttctgggatataaaaagtactcttagtgagatcttagtatcgaaatatttttgggagctatttttggaaatagccctgccccggacagagaaggctggccgaaagttccggtctctggacccggaagttccggaccttcgagagtgaaattttcctaagtattgtccggaagtttcgggtgtcaggaagttccagactccttccagttcaaaaatgtgagtaacagctagatgacgtcacctagccgttatatatatatccagatctcacccagctcaccttttggccatttttacttcagttatttcatgccctaggtttctcttgaagttgcatttatccccctagtgggttttggtgattaatgatgaataaggttaagggactaatgtgtttattgagatatacaggtaattagtcccaaggtgatcttaggtgatcaagagatgcttggagacccctacaacattcattcatgcggatttgaagctcgaaagttaataggatagttttcatttttgaaattgagtcttaggaaaaaccgtactattaagaggggtttcaagtgtggttctgagatataaaaagtgctcttagtgggttcatagtgatagaatatttttgggagccatttttgcaaatgggtccagaccggacagagaaggctggccggaagttccggtccctggacctggaacttccggaccctgcattggatgaaatttgcctaagtgttggccggaagttccgagggtcaggaacttccggacttcctccagttcaaaaatgtgagtaacggctagatgacgtcacatagccgttatatatatctagatcgcacccagctcattttttggccattccacttcagttctttcatcccctaggttgttctagcctctcccaaggtccctttgcttcctccactcaaatctagagcctttcttgtgagattgtgagagtagatgagagtgtaggagtgatttggagaagctttgaaaactaggtgtggttgagcactttggatatcttgtgggctgtcacttggggcttattactcttggagatcttctcctatacggataggtgtcgcccgcgagcttccgaaatcttgtggatgtcccgggaaagtttgtgaaggttttcctcacccctgcaaggaaacgaggtaagtgattaaggattcttgtgctgagttttcagaggttctcctaggtagagcaacttgcggttgtggtcttttctagaaggatttgtgagttggatcttggtggttattcaaattctagaaaatgacctaggagtgttgagttgaaggccttggacttccttcccgttctttgtacaagtgaggcaaggggttaatcgagacccggctctttggagcacctcaatggagagtaggatcccaagatccgaacttcggggaaaaatcatctttgttccctctgtgatgattgtgcatgttactgtgattgtgcttttgttctgtcatcctgtagtttatttcgtgcaaattagctcaactccctgttagatcttcaggtttttctgttgcccggaactagttatctcgtgcaaattagctcaactccctgttagatcttcaggtttttctgttgcccggaagttccggtgctaagaacaccggaagttccagactgtctgagcagaccggaagttctggtgttctacaccaggaggttctaggcctgttgaattttaccactacgatttgtttgtgattttcaggaaagcctattcaccccccctctaggctacatctctgcgcgttcaacatctacccccaaaccctaccctgaccgtctcccatctcctccccaccacgacccacccagatctggatcgtctgcctttacgtggtgactgcatgagcgtgccttcagcacccatccaccatccaaacaatctgacggctcacatggggcacgccatagctgacataaccagccatcgaagcccacgaaaacctaacaagaggcagcaatgacatgcccacgcccatcgccgcctgcgctggggattggcccggagcttgttcgatggtatgtgctgccgtcagtcgagtgacctgaagcttttccagtggcacacgccaccattggccgctccgagagccgggctggacgtcgtgttcaatctccgccagcggatcttccattgaggacaagtttatagcggcggcagcgtagtagcagtcggaggcaagcatgacaaggtcttctcgttgtgattccgcagaaaacctgattgagggcctgtttagatcaatttgctgcggcaaatttttttgtaaaagatttggcattgcaattttacaactaggtgtttagatccattttacccaaacagtggtctaaaaaggaaaacttttgtcattttggagagtctaaacaggccctgaatgcatacgtaatgcgttacttgctacatggtcgaatcagaacgcaaagctttgcttgatgcttggtgtaactataatcgtgttatgctactaccaggattcctaattcgcgcgtacgcgccgcgggcgagcacttccggcccacacggcccgtacgcgcggtgctgccagcgctaatcgagattttttttcatagcgcacgtttaatgtaagtaactgtttaaggataatgataataattaatgaaagatttttttcttttttgagatttttttactaatagatagaaaatttttaagttacatttgaaaacttttgacttaagatttaaactttgaagtcaaattttgaaaactttcaactcatatttgaaaactttcaactccgatttaaaaacttacgactcaagatttgaaaacttttgactcagatttgaaaactttcgactcaggtttgaaactttcaactcaagatctaaaaactttcaactcaaattttaaaaattttcaactcaaaattgaaaacttttcatattaaaatcgaaaactttcaactcaaaattcaaaaactttttaactcatatttgaaaactttcaagttgatattttgaaaactttcaaatcgtattttcaaaattttcaagtcaatatttgaaaattttaactcaaaatttcaaaatcaattgtttttatttttttattgataaattactgtagcattttcgttaatcactagtcagacgttgttgttttctttcgagaaaaacgctaagcgctacttaaagcgaaggtccacgtgcacgcgacttaacgtcctcgcgcgtgcgcgcgagctagccaccccctgctactactcgatcttggtgcatccatatttttcaagtttcacagacagcaagcatgctgaattgtttccaattgctgcatccaatcctagcaggaagatcgtctgccttcacggggtcgtcgtccgttcccggctgctggtggtggcgcatcctgacggacgagtccccgctgtggacggcggcggctatagcgacaacgaggacgctgcgtggggtttggtgggctggttctattggttaggaatgagcttaggaatattagtaggtgggcacacacccagagtaacataatttaatctataacctctacgacggattaaatttatcacacataaatagattagggacttggaaaaaaaatctcgtttcacaaactttatgggtaacctcaccacccacaagaataggtatttacacacaagatgtatctatccaaccaaacaacatcttctgcatgctaccattccatccgccccatgctgcaaccaaccaaacaacatctcatcatatccaggttcatctcatccaagcaaccaaacgcctgcatgtgtatcccctaaaccaagctaaacttagcctggatgagggagatgagccagactagagggatacgagcaatcaaacacacccatgagccaggctagagggatacgagcaatcaaacacacccttaactgtttaaggatacgcatcatgcgatagccgtcggatacttggatggcttggtgcagtcaccccgtgaaggcagactatcttgatccgccccacccgtggatagactgtctccgccgccgtctaccctccccgcgacgccgacttccactctccccccgccgccaccttccggcctccccgctgccgtgcgccaccaccgcccctcgctgccgccaccaccaccgcctcctcccaccctcttcctccttcccctcctcacctccgccctcctccgctagattgacgaccgcagcaggtgcgcctcctcctcccttgatcagaagacgacagaagaaaagaattaaggtaggatataactataagtggccaaatgttacggcatgaaaccaaatcgctccaaatgtgagctgagtaatgtaggaaaggctgttgctacaaccagcccgtagctcctcatcctcctcctccgtcgatttgagaacagcctagctcctagcgcccgtcagaccagggagcagcagcgtcctgttggcccggcctcgtcccagcgagccatatgttacgactcgagatctcagcaagaagaattagagatagaatctggaatttagaaggaacaaagaagaacagagcagatacagacttggagagggggaaaggattggtatttagaatatgtttgttcaatacagttcacctctttcagtacaagggtaatctatttatagaccttgcccgaagctactggacccaatccttccccttcacgtgcgggttgtcacgcctctcccgtctgggccgagcggtagccgacggcccacttgatttgatccttcctcccgcgcctgagcctgatgacgaatactctggtgtgacattcctccctccttgagaaccagcttgaccccaagctggtgcagctggaaacttgtgacgaagttcctcaagattctcccatgtaatagctggagaagaagtacccttccattcaacctgaacttgttcaattagtttggcaccccgttgacgaaggtggcgttccaaaatacgatgatgaacagctaacggaccaatttcagaatctagtgtgggaagagaagcctgaacttgttcagctggtgccaatgccttcttcaattgagagacatgcacaacaggatggatcatacttgtagacggcaaatccaacttataagccacactgcccactcgttgcaagacttgaaaaggtccataaaatttgaaagataatttccgattggccctggtcatgacagattgctgcacatatggttggagcttaaggaacacccaatcacccactgtaaagacacactccgatcgatgtaaatctgcttgatgtttcatgcgttgctgagcccgcagcaaatgatgatgaatcaaagcactcatgttattgcgatcagtcaactaggaagccaaactcacaggagcatcaacggcagtaatagttaatccgaaataggatggtttatgaccaaacaatgcttcaaaaggagtcatagcaatggttgaatggtaagaagagttgtaccaaaactgagccattcccaaccaatgcttccactgtttggggcaagagtgcacaaaacaacgaagaaatgtctctaaacattgattaaccctctctgtttgtccatcagtttgcggatgataagaagaactcattcgcaattgagtgccagctcttaaaaataactccttccacaaagtgctagtaaatacccgatctcggtcagaaatgatggcacaaggcagaccatgaatgcaatgtatgtgatccataaaaagttgagctacagacaaagctgtgtaaggatgtcgaagagccaaaaaatgagcaaacttcgaaaatttatccacaatgaccaaaataacattgcaatggtctgataatggtaaaccctcaatgaaatccattgaaatgacttgctaagcatgatcaggtacttccaaaggttgtaatagcccaggtaacttgatatgctcagacttagctcgttgacaaacatcacaagcctgaacaaaattgtgcacagattgccttaaacctggccaagcaaaaagttgcttcactcgatgataagtagccaaattaccagagtgtccacccacagttgcagtatgcaaattggccagaatttgctgttgcaaagatttattgttaccaatccaaatccttttcttaaaatacaagatattagattgcaattcataatgtgcatgatgctttccattattaagcagagaagtaagaatccactgagtgtcagaatcagtagcatatcccagaggtacctcctgcagccaagcaggaatactgacagatagcgccgaaatctccaccatatcaacaggagattgtcgagataacgcatcagcagctccattttccaaaccctttttatagacaatgcgataacgcaaccccaataacttggtaagagctttctgttgccaagtggtggacaatcgttgattatctaagaaggccaaactatggtggtcagtccgtattacaaattcagcatgttgcagatatgatctccaatgctccatagccaaaataattgccaaactttccttctcataagtagagagaccttgagtgcgaggtcctaatgctttactgaggaaagcaatagggtgatctgactgcattaagatagcaccaattcctttgtcagatgcatctgtttcgacaacaaattatttctgaaagtctggcatggccaaaacaggagctgagatcaaggcagatttcagagtaacaaaagcctcctcatgaacagatgtccagacaaacaactgtcccttcctcaacaagttagtcaatggtttacaaataatcccataattgcgcacaaacttgcggtaatagcctgataacccaagaaaactgcgcaattctttgactgatgtaggagtaatccaattccgaacagccacgattttgtcctcatcagtagctactccattggcactaatcacatgacccaaataagccaactggggctgaggaaaagaacattttgattgcttaaccttcaagtgattatcagataagatctgcaaaacttggcgcaaatgcacttcatgctctgccaaagagtgactgtaaacaaggatgtcatcgacaaacaccaatacactgcgacgcagatatggagctagaactgagttcataatactctgaaatgttgctggagcgctagtcaacccaaaaggaagcacacgaaactcaaaatccccatgatacgtcttaaaggcagtcttatgctcatcatctggatgcatgcgtatttgatgatagccggaacgcaaatccaatttagagaaccgacaagcacccgctaattcatccaagagttcatcaatgataggcaaaggatatttgtttttgacagtaatcgcattaagatggcgataatcaacgcaaaaccgccaagaaccatctttctttttgaccaaaagaaccagagaagagaaaggacttgagcagggtttgatgatacctctgtccaacatatcaacaacttggcattcaatttcatccttctgcaatggtgtataacgataagggcgaacattaactggttgcgcaccaggaattaacggaatggtgtgatcacattcgcgaacaggaggaagtccttgtggttcttgaaacacatccgcaaagctctgtaacaattgctgaatattgtccggaattggcaaatcagaactagactcagaatcaagggtgtataactgaactagaccttcaatagaaccggactgatataattgatgtaattccaggaccgataagacaggattagcaggtactgatggaaccaccccacataaagtaatcagctgaccatccaatgtaaaccgaattgttttctgctgccagtcaatatccatagggctataccgctccaaccaatccattcctaaaatcatatcataactctgaagtggtaacaccttcaaagcagaacaaaaatgatgtccctgaactgaccaagaaacattagccaattcagtttcacaagacaacatttgtccattagccaccttaacttgaaaagaaacaggtaactgtatcagattcgacaactgaggcatcactgaagaactgatgaaactgcaggaactaccagagtctactaaaattagaatatcatagccctgaataatcccttgcaaacgcatagtttgagcagtagttgtaccctgaatagcatggactgacaaagagaacagagaatgaggctcagtatcctctcccgaagaattaccagaatcactgtcattttgttgcagtagagcaaatacctcctgaacagcattcaattgcacagaacctgaacacttgtgagatggtgaccatttctctgcacaaatataacagagaccttgggctcgccgatgagccttgagagctcgcattctatccgcaatagcagtagtcttgacaggttcagatgaagacttgctagcccctgcactagattccgacaccttggtaggaggaagaggaagaggataagctcctttaatccgcggaacatgatcacccaatttacgaaattccttgggcttctgagtctccatccattcctcctgtaaacaagcaatagccagagtagtctctaggtcgcgaggacgttgcatcataacagcatgacgaatgtcaaaacgcaacccttcagtgaacctatgcacaatcatgagctgattgtacataggatcataagcaagcaattgattcataacatcatcaaaacgctcataaaactcctccaccgtcccggtttgcttaatctgctctatctgacgaatcaacatctgatgcctatctcgatcaaatttcctatccactgctaagcaaaaatccgaccactcagaaaaccgcaaatgagccttcgacgagcgtaaccacgaggctgctcttcccgtaaagtaaatggtagccaccctgacccaaagtattggatgagtaccataaaccccaaagtaatgctcacatctcatacgccaattttgtggatctaccccatcaaactgtggaaaatccaatttcggaatccggtgattatagcctcgatcctcagaacccccaacttcatcccgatgcaatgaatcacaagcaaagtgatggggaaatggagaattagtcgtacccgtgacaggaggtggcacaggaggaataatcactcctgttgccttcccccggttgttgattgcaacgcggtggccatttgagccagaatctcccgccgacgtcgaagcaacgaacgactccggcgtgggaagtagcggtggacgttgatcgttgtcgtcgccttgcttccgcgtggagatggcacctacctgcaacatgttcgacgaattgcccaactcgccacgaagcttctccagaatctccacttgtttcttcagctcacccatctcagattgaagtcccttgactgctgcatccacttgaggtcgccagctagccatcgctttatccatctggagcaccaccgcttgtgtttcatcctgcttcaccgcaacggcgccgatggcgttctggattccctcaagcatcttctcgaatcctcccgcttgtttctccatggcatcgacttgaagctgtagccgcgtttggaaccttggcttctccaggatggaaacgagctctgatactaagatgttacgacccgagatctcagcaagaagaattagagatagaatctggaatttagaaggaacagagaagaatacagacttggagagggggaaaggattggtattcagaatatgtttgttcaatacagttcaactatttcagtacaagggtaatctatttatagaccttgcccgaagctactggacccaatccttccccttcacgtgcgggttgtcacgcctctcccgtctgggccgagcggtagctgatggcccacttgatttgatccttcctcccgcgcctgagcctgatgacgaatactctggcgtgacaccataaccgctggctgcaccattgaccgtccttccgcacctatttggcccagcgccgtcccgacaatggagcaagggggtggctctgcgcgaccttctctttactcgctttatctggctgtagccatagcccagacgatggattaggagcggctgtcttcagtgctcaggtattgcgccctattttctgtgtcttaaattgggatttgttgtctcatatatgcaggattaattatgctttggactacaatttatcctctgttgtatccacacttgatgactttacttgctggattgcttcttgtttattacattcacaaaagaatacgtgctttcgaaatgctttagatatgatacgctttgcatgacatgaagaggtagctgccagtaccatatgttaaaaatacacggaatacttttatataacacaggttggtttccttgatattttccgtaacaacaacatggtactggaattgatttcttatcatgctacttacagttgattggaatatattgatatctccttgagctaattaattagatccaacttagacatcacgagcagattcagttcaacctgtttttattataatcatcatattattttgataattggatttcattaattctataagagtgtgatgttcagttccaaattattggcctgtacactgtatatctagctgcctagcatctgatgtgagaaggatgttgatgcaatggaagtttgatctatgattgttcaagaaattaaaatgctggaccttttcttatatatcactaactttagtatgactaaattcgttgcagggcgcgcatatttgtaagcaaggaggtaagcatggactgtctgtctagctataatttttttatgaattcttgacattgctacttgctacctgcctacctccatgtctcgaaagttgtatacaccatcctgtttacagactgtcacctccttattactcgctgactagcttcgcagttcacaccctattggacataatgctttagtgcttattattactgtcatggacatgttgtgatgtaattctttgttctgaaacagagtgaaacgcaaattcgtcctaaactagcataaaaaaagaatttcatgaagttcatgcatgctaccttcattcatagaaaaaacaaaatgcagggttgattttctttagaatgaaagccaaaagttgctgatatatttctttaaaccatctgttatcagggcaattttaagttcagatattcttcatgtccaatttatcgcatatgcattccaggatagatctgcaactgctgtaaaactatttcagaaaggttggaatacactcaggcaatcctatttttaaaagccttttaccatttattttggtcttcccttctctaatacaatgttggacttactgtctacttgcttcagggaagaagggaatgccattcgaagtgagctgaaacaaataggtgatactgaaaagaaatcagtagttgtgtaatagtatcttgcgttattgcctttttctatgccaaatggaatttgagaatggaaattgcctcatcttgaatttgtcatatattagatgtgtgcctgaatcctatcaggtctcacgagcattctcgatcagattcccatgtatctgggttttgatcaggggtcagcatattttctggtatctgaattctgaacactatgatgtttactgaaacaattaggtgatgttgaacctgtcactgcaatttgtttttccccatatgcatatctgttggctatttttttttcgataggaaagggtatataagttttattcagtcattgtcggcaacgatattataattagtgtgcagaaattatttttcacggcttcgtatctcataattgcagcattacattattttatcataaaccaatttttacattaagataagatagtattttgaagattggagttctgtaatgttaatttatagcaaggttatttttctattgcagatatctggcctagcttctcaggtaaagaagaagatatactaacaccctcttgatgattgtgaactatggtgttcctatctaactgtccaatgccagcttcacatatggcattatctgctgtcggcaaatttgaaagcaaatgtattggtcgtaggagaagtctttgatagcttacgttgatgattgctgcaactttttccctcagcccattatatattttgtttaacatgtgaatacaatgttttggacatattgtatcttgcatatgcttctattttgcaaaaatgcctttatctcatctagtctcattaacagaggcagagcccggcgaaagataatcttattagcagataagataattacacaaagtcattgggttccacgaatcttcaacaccgccggcaagccaaagataattacataggaccagaatcttttcccgatgaattttaggactggcgctgcttgatacctcgctgcccagattccaactctaatacgcaccgagtttgccacgataaggggcctccggacctccatacatgcagacaagaaggagagaaaagtgatggcgcagacagactttgccatggtgagagcaacgggagctagcacgacgtacatgcccaaggcgaaggcggcgaccaggcttgtagctgagctccgcatcatgaccaacgatagggactggtatacgtagcggatggagatctcccgcgacggcatcccagagtagagcaggctgacggtagctagcagagagcaactgaatgctagcgtgtttgcggtgatgaatgcgttgaaggagtagctcccagcaagcgtcggtgtcccgccgttcgcgtggtcgtctgctctgtatcccccaggtaacgtgaaagctgctgcaaatgtcaccgttgcaatcagaacagatgaaatgccgagaactgaagttgcgttcgtcaagtactctgaatcgatttcttcatccctcctctttgaatgcttctcatagaagtggtcctggcgactgtgaccaactggagctctggcaagtgctaatgattggtgtatcatacctcgtgaattctgcaggttaacgtatcgtatatagtggggacagaatcagacaacttcatatatgtagctaggataaattgacacaaaagccagaaaaaaaaaacgattactacctttttatagtagaatcttgcaggaatcataatccatgaaagatcacgaggtgtcagcccgtctttgtttggtaaattcaagctcacctccctattccgaaacaagaggttgaaaattgagacaagtccagctttgacagcaaggtgcagcgcggtatccccctggttgtcctgcacatttaacacagatgcaagttcgggccttttgcacacaaatgcaacaatactatgcctcttcttctccacagcaacgtggaggaaagtctttccttgcatgttccgcaatgcgatgcagccaggggaccttccgagcaaggttatgacagccttgagcgtcccattggaggcagcaacatgtataggatatgatcctccgttatccggttggtacatagcagattcattggcatcaagcagcagcgtggttggacttggtttcggatggaaatattcagaccatcttgacaaacctgtggtactagttttcagcgatgcagcgaagtgaagcggagtgctcccatttttgtcgccttgactagtaaggtgtaagagaacaggcatactcctataccggcctccctgatcaatgttgaccttaacatccttgcacttgtctaacagtatagacagcgctgcaattcggtgtcgtcggttaagcaagtccaaagggaaaataaggctcataatagtaatacccaatcaacgccagtacataactggcatcaccactagtttttgaattaccagcactttataaaagaaggaagtgatattagtgccagagctagcaattaatgatatttgaattccaaattcaaattttgtaatgccataaacaaatattatgtatccatctcttatggccagactactcgtatgtgtaaaacccttttaggagtactttataaatgctgtgcatactttgaatactctaaaaaagtatactctttgatattaggcagcatttctttcactgtcttgagagactatgatactagctagtattaatttacttgtgtttttttttgtttcgtttgcacattcttcttatggctggttactttggatgttttacttggtacagatgtccaaggagaaccaaaggtatcttgagaaatcctgtagtctcaatgggtctcagtgcggcacataacaggattgattgcagagtttcaatggccggaatatattatgaatggaaaataaacaaggagttggccatacataccttcgccgcggtataccgagatatgcagcacgttttggccttcaggcccagagtatgacaatgttgtaggacttctatcaagcaggtcccgtgcaatctccaagcgccccagcgaaacggcgaggtacagcggcgaggcgccgatgccacgatcctccggaatcctggccagctccggatcctccgacacgagcctctccaccaccatcctgttgccgccgcggatcgcgccgtgtagcgccgtctccccgagcttgttcctggtgctcaggatccgtccgttggcggcgccgccctcgtgcgcggccaacgagatgagacggcagaccatggcatggtgcccggctctggcggcgcagtgcagaggcgtgtcgcctctgttgttggtcgcgcctagcaggtgcctcgccctgccgtggatcatctccgcgcactgcacgtactgctcgccgtcgccggaggtggccaccacatggagggccgaatcctggtccgaatcaagagtcaacccttccaggagaggcgacgctgctgctggacgatttgcaggttgaccttgttgagctagatcactactagtactactagtatttgaagctccctcctccggcatgcggatgacgagatgggattcagcagccgcctcctcatggttgacgagaagattctcaagcgccttgcacgcaccagatcgtgcagccatcagcagctgcggatccataatcacaggggaatccatcgcgacaccacgccaatcgtgctctggagagggagatcgtttagggcgatagcagtgcaggcacccgatattgagttaccccgtacgccagctaggcctagcaccgttgaaagaaacaacctccacactgcacgagtgcacgtgacctcaaatagagcccaaaaaattttagcccacagtggtgtatccttgattgagtgtaccaaacagcagaaagaaataaattaccctaaactttcctcaactacacccgcatctccttttcttctttttttttttacttctcgaggcttcttgccatctctcgcgactcgccatctctatccgcacaaccgcgccttctccgcccgccgaatcgctcctcagctcagccacgccgcatcgctcctctgcgccgccttcgagcgttttttcccctcccccaatcgagcgaaggcgaggctcagtggcatgagagattgcgacgccctcacctcccccaactccaccagctctcccattgcccctccgccagcgcccctcctccctccgccggcgccggctcgacgacgccgcctctcccctctcatccctgggcggcgagttaacaagctccccagccgccgcgccgtttctccctcctccccatccgtcggcgcatcgatgcagaggagcgcagcggcctcggggatgagcggcagcggcggcggcatcagggatgagcggcggagcttggcgtcgaccttgatttgtgttgccgcgatgttagcgatttttccaaatctcctcggggccgagcggcaagcggtgattttgttgccgcgatttgtgttccttgatttgttgccactattttggtgggcgtgttccttgatttgttgccgcgaatttggtgggcgaatttggggaaaacacttccacgggtggcgcgaggtcacgagcgggcgggggcgcggggcaacgcgctctatagcgcttctctccgtgggagcgagtgtctcttctgaggcgcggaacctagcgccacgcaagctcgattccgacgtggtgcatcatagcaccgatccacggtgttgcactgtgaagggccttagccactcattccccgccctcgcagtcggacgggctgccatgagaaatcatcatgggaactgcaggggcattcgcctccttgtccgattactccatgccatggactccctccctggcttccttctacgtaggattgcaatcaacgctcttctccctcttcttaccctttctgcagccttaagtctgagctaaactcggtaaagcttgctctaccccagcagaccgttcgttttctctataaagcagggcatcagtgtgttggcaattttttgtgacaagttgacaacaacgattgcagcaccttatgccttgcggtgatcctagagtcgccaaccacctcgatctagcaaagagctaaatctagatgggttttgacaaataaaccggctagtggagccgatttaagataacttctcgtttcgtgggcaaaacggaaggttttcaggacaaacctacaaagaaatgtcgcactctcgcaacggcggcggacagtttacggtgcaaaccgacaaagatggacaaactaagagaaaactgaaagcaatatgaaaaacgatttgattgattgattgtagattggttttttacaatgaaccagccatgtcccttatataggggttggtcttgtcctctacaggccctcctccacatccaactcggggtagaaactaaaggaaacccgaaacatgccttcccgagcaaggaaaccatgaaacccgacgaaacgcagtcggactcggacctgccggtcagaccggccacacaccgtcggtctgaccggccctcaaccgacggtctgaccggccctcaaccgacggtctgaccgcccaacacacggcggtcagaccggcccactcggaggaaaccggtagacttccaaattttggcaatctttcctattttaatcctaggtgccaaatttgggtgtaaacacatgcccccctgcctttttgatgaacaacgtgaatctaaaagcatagaacatgttttggtcttaggactataatccaattaccggccatagtacctcctaagcgtcttgccacacactcgggaagtatttcttcaagtatttcccattgattgctcgctgaaaacgctccccttgaagtgtctccaagaaatatgcatttccttgaacaatgccgcatactcgataaggaccctcccaactaggtgaccacttaccgaactccctggatcgagtacccaaaggcaaaattgtcttccaaaccaagtctccaacttgaaacaactttgctttcaccatcttgttgtacgccttggccaccctcttcttttctttttctatttcttccaaagccttcaagcgcttgtcgatgacttcatcaaggttgtctcccatcaatgtcttgtaatcttcacttgacaaatcatcttgcctgatgtaacgaagagaaccaagatttacctcaaccggtaaaacggcttcttgaccataaaccaactcaaaaggagtgaatttagtggcaccatgtttagatatcctatgcgcccacaatgcttcggaaagcacttcatgccacctctttgggtgttcctcaatcttctttttcactaatttcaacaatgtcttattactcgactcggcttgtccattagcctgagcgtagtaaggagaagaactcaacaatttaataccataagattcggcaaaattcttcacttccttagatataaaagaagcacattgatccgtagttaatgtttgtggaatatcgaatctatggataatatgcttcaaaataaagtcaattacctccgtatgagtcatattcttcaacggcacagcttcggcccacttggtgaagtaatccgtagcaactagcacgaatctatgcccctttgatgacggaagataaatttgaccaatgaaatctaaagcccaacctcggaacggccatggtttgattataggattcaacacggcggcgggcgccaattgaacattgccgaaccgttgacaagcttcacatcctctataatatttgaagcaatcatcaataatcgtcggccaataaaaccccgctctcctaagcaaccaattcatcttgtgggccgattgatgagtcccacaaattccttcatgtacctctctcatagccactttagattgatcttcatctaagcactttaacaagacaccatctatatttcagcgatataaatcttcatcaagcaatgtgtacttgaatgcttgccgccgaattttccgatcaaccttaagcgtgggatctttcaaatatcgaatcaaaggaatcttccaatcttcttctgtttcttgggcacaaatgtccgaattcacaattaattcggcctttaaattgattgaaaagtgccccccagcgctctgcccagaactgatcagaccgctcggggtcgccggtctgaccgacggcatgtggccggtcagaccgcccctggtcaccggtcagaccggccgtgcaatgccggtcagaccgctcctggtctccagttttgccaatttcgcacaaagatttaaaatcaagcaccggctcttctaatatcagaaataatcctttcttcacattataaccagatgcttgttgtgccaagtcatttgctctagaattatcatgcctagcaatatgtctaatagcaaaattatcaaaattggcaataatatccaaacatgaattaaggtacctatttagtgatccatccaagtatttgtaaactccggcgacttgttgcaccaccaattccgaatcaccaaaagcttccacgtacttagctccaaccatctccatgacttgtaagccgaataacaaagcattgtattcggcttgattatttgtacaataatattccaaacgaaccgatgcttcataacacacgccattaagtgaaaacaaaactacccctatgccttagaccttctttgtaagaagaaccatcaaaataaatcctccaaggtataacttcaactaggcaaatctcttcctcataagcaatatatacatgatggtccactataaaatcacatatgatttggcctttcatagatttcaatggttcataagccaaatcatattctatcaaaacatacgcccacttgccaattctcccacttagaattggcctttgcaacatgtgtttaataacatcagtttgacaagcaactatgcatgtaatagataacaaataatgcttcaatttggtacaagcatactataagcacaaacaaagtatctctataaagacatacctcgtctcggcatccaaaagacggcggctcaaatatgtaatgatatattccttgccatcttcctcttgcgtcaaaacggcaccaatgactttgtcttcggaggcaaaatataaccgaaaaggttttccggttttaggcgcccgcacaacgggtggagtagacaaatacctcttcaactcctcaaacgcatcttgttgttttgccccccaagtaaaatcggcctcctttttcaagcgaagtataggaacaaaagcatcgattttacccgctaggttagaaataagccttctcaaataattcaccttacctagcaacttttggacctccttcttacatttcggcgctttgaaatcacgaatcttttctatcttcttaggatcaatctcaacccctctctcatgcaccatgaatcctaagaacttccccgccgacacaccaaaagcacatttaagtgagtttatcttcaaaccataccggcgcatcctctcaaaagctaacttcaaatcggctatgcgtccttccataccatccgatttgacaacaatatcatcaatgtagatctctaagataatacctagcaaatcatgaaagatcaaattcattgccctttgatatgttgtaccggcattcttcaatccaaaagtcatgacaacccactcaaacaaaccaacaaatcccgggcacctaaaagccgttttgtacatatcttccttcgccataaagatttgattgtagccggcattaccatctaaaaagctaatcaccttatgacccgaagcatcattgatcatcatgtcggctataggcataggatattcatctttgggagtggctttatttaaatctctaaaatctatgcaaactctaatcttaccactccccttcttctccaccgggactatgctagaaacccactccgcataacgacatggcctaataaaccccgccttcaacaaccgatcaatctcctctttgactcggtcatatagcaaatgattaaaacgacgaggtggttgtttataaggcctaaaacccggtttaattggaagccgatgctcaacaagctcacggctaagacccggcatctcattatactcccatgcaaaacaatcaacatactctttaagtatctctattatcttaaccttataatctgctctcatatttttgtttacaaaagtcggccttggtttgattccatcacctatgtctacttcctccaatggatcggccgatgtaaacccttgtccaagcttctccacttcatcaaaatcttcaatagtttcaccaatatcgttctttgtagaccgatattcttgcaccctcttttgtaaccactctaaattagcctctttactcattatacaaatttatatggcttagccgtgctacactagctggctttacatagataggtacaaatttgccatcggagatactaataaaatcatagctagaaagatccctccccgataagcattgaatattcccatgacgccactcaaaagtagcatcggccattgcaacctcggccgatgtatccgcttgaacaatttcaacatcatcgccgtcccattgaattaaacattgatgcaaggtagaaggcacacaacaattggcatgaatccaacaacgacccaaaataacattgtagttacattgcacatcgacgatgaagaaagcggttagtaacgtcttgttccccatggtaagctccgccgaaaagatacccttcgcctccgttggtttaccattgaagctattgagaatcatgttagtcttcttcaactcatcatcctcacgccccaacttcttgaataatgaatacg

SEQ ID NO: 9228 - DNA, 40586 bp, Oryza sativa
ccgtccgcgtgcgtgcgcgccgccgccgccgcccccgcctgatgtcgtgcgtgtgagagagagaggggaagagagacatagagtgagactgtgagagagagaagagagaggaaaagagaggatatggcaggtgggtcccatatttttttataaatagaatgctaactgaattgctacacgtacgccacgtagaccaaaaccaccgcggattgggtcgagggggggtaattcatccggtttgcatagttggggagggggggggtgaagaatgtcgtttttgtggtttagaggggtaattcggacgactgcgatagttcaggggggtaatttgtactttttcctattgaatattgaacattgaattctgaaactgaactggcattattttgaagaaaaaaataaagataagtataaaaaaatcccaatcatgttatcttattaaagataagtgatcagggttcaagttgatatggaaccatattattaaatgtttaattttgattattttcctagccatgtactgaagtattgtctaattaatgacaccggaatatgcaatttgacctctttgaattacttgacatttgaattttttctaccttagccatgacggttttgtaaggttgccttttatgatacctgtatagttagatgcaatctttaaccaatcgaagtagacgtttttgtgtatttttattttttttttacttttcagaaataaggaagaaacacaaattggaattgcaaaacttgatgctaacaaagcatccgaatagggcattacatttttttttcatgttagcaaatatcaatggtgtaattaatactactcacctgataaatacataaattccttggcaatgctactaccgagtcattttttttgctcgtgtgcatgaacattttattttcctcttctgatctcaagtcccaacccctattaatttatttctttaggtttctgcttcaacgtgttaagaaataaaaaaactactgatcataaacaaggctatttgataaagcagattaccctaatctaaattgggcgcggcaaggccgcgcgtctatgcatagtcagtactatagcctcactaatcctcgtcgaggaatctccttgccgccctagaagtttgagattgtgcctgactgttttggagtctgttcagcagctccttcagcgcctggggattgacgtcggactggagtcggctcaacatgaaatcaagcatggtatgatagtcttcttcacggagctcctctccattcttcagagtaatatcacacaatgtgtccagaatctgggcgtgacaggcgcaggctttttgtagagaactttcctttcaaagagagaggtttctagtgatccttggatccaaacgttttgtcccttgtggctttgcccatctcttgtattctgatcggagtcttgggtagttacgaggatttaaaatccattgctagtgtttccaggaacacaaagtatatgatacttggatctgaacgttttgttctgtttcttggaaaggctttctctgttttcaggaacgcacattcacctcgcgacatcagatcctttcaaagaaaactttacaaagacattggatgagagcatgttagacctgaaaacacaaactttacaaagacattggatgatagctagggtttcccttaccgtaaaccacgcggtaaccattggatgataacttcactcccccgcggtaagacagaaccgcgtggtaaccgtcggaaaccacgtgaaattcgttctcaaatatttgaattaaaaaatcgatggtttcagcgtggttactgtgcagtttcgcgtggtaaccacgaatatcgcgcgattaccgctaattgtgtagcagaacagagaagctgttagaaaaaattgaaaaaacatttaaattcatgtagaaattgggaataattagaagaatatagaggaaacttgcaaacataacttttggggtgtaaaatacaaaaaatcaatatgacctttttctatattatggacttcaacgcaattcaacatttcgtagcataataattcgacaacaataattcaacaacctcacatttgaaagcattatgatgtccacatgaagctgaaataatagagtccacaatagagagagcaatagagagagatgagaggaccaggagatattttctccacttataggccttaatggactggacagtagtacaagataagaccttattatttttttcatttctaatgtactttcggtttttccctcaaaattgaatttatctaattctttttcaaaaaaatttcttcaccatccgccactaaaaatgaagaactatatccacgattttttttcagttttttcagaattttgaatgtgggcaaaattcaccaaaccctaccaccggtaacccctaccgtaccccgcgataaacgcgcagttatcggcattaagagaaaccctgatgagagcatgtttagccttctccgttttgtagaaggaaataatataaaaatagctcctatataaagatattcatttgtttgtaatccaattgtgcaccaccaccgacaaaccctagaataggtgtagaataggtgatatttactggaccggcggcgtctcctcgagtaaaggcttccacccaaattgcatgactaacaggtcttacgtgtaaaggatcatgtacccatgattcaaaatttccttgccaagcgacataaaacagattacccgaaaaggcaaaaatgttataataaagacattcctcactaatatcatcatgacattggaaattaactaatatcatcatgacattggaaattaatctcaaaatcatgtgcggtagcgataccaacccaacaaaataaaaccagtagctagtgggggtccttagctatgccttggcactactagaaaacagcttttcacaggcggcctaaacaggtttttgcaggcggacgagtgcaactgaacgattgtgaaaatagttacttttcacaggcggacaactagtccgcttgcgaaaatagcacctggcattaaaaaaaaaaagggcagccaccgcccactgccgttccagccaatagcagtagctttccattctcctcccattccctcatccagattcaacatcaaaccaaatcaaatacacaaaaacataacagattaacagacatcgtagtggttcacaatcaaatcaaatcacaaattttccatggatgtcgtcatcgccgtcgcacggacgcaccccgccgccatctgccccgtgccgccggccggtccgcccgcccgccggcctcccccctcccccctccggccaaatctgggagggagggagggaggggagccgccgccgaccgccccttccgccgtcggggaggtgtaggggaggggagaggattagaggagtaggggagaggaaagactcttagaaaaatatcagcccacgtgccacatatatataccacgctaattttcgcaagcacactttatgtggtccgcctgcgaaaatagcaggcaccgcttaagtggtccgcagcgcccttcaccccgatttgcatttttgtaggcggctatttggctctaagggtcatgcccgtctgtaaaaataaatacctaatattggcgaaaatgctttttcagtagtgtggctaaacctgggaaacacacaactcatctagttaaataacatgtgcactaaccctcttcctagcttcaaaatgggattaatcggtgctactctagttagctaagcgaggtggtattattgccgctacaggtgttactgctttctaccttgccgagctgctatgcagctgcaactactgttgctcaacactagttggacaaaggcccaaagcctctgttgctgctgaaggcgagctaagcagcccactacctcaacataccctcatccttttttctcttttttttttcatcaattatttttggggcacaccacggttttactttttttcaagtgcaagtggcaaaagttattgccgaatatattagaaagatagagttaatcctatttataagcaaaatcgggcctaaaaaccatataactgcacggtttgcagaagtgaaacctacgaaaatcttacacagaagacacaaaaagcatgaggcaaaacaattacgaaccacagaatgctgagggaaaagcaagaccctaagacgaagccttcaagaatatcaacacgacgaagctttcaagaatgtgaacaacgacataagccattgtcgacgcccgcccagaatgggttttcacctaggtgggagagagtccataaggcaacacctccaaggaggaatcggcacccgcagacgtcgatattgccgatcctggaagagcatgcagggcttgagcaaaagctctcgcaccatggaggtaagcacaccgctccaacctcagcaccacaacaagctcagaaagccacagtgcacgtgaagcaccggtgaggcctaagagccctatctacgtacaaacaggaccaataccacggacgaacaaactcctcaagcaccgaaagagaccacggccagatctggaagtagacagccaagggaaggggaggcaccaaagaggcatggtcggcccggagaggaactaagagctgaacatagggctgtggcgaccacctgcaacttcaccaccagtgcagagaggggagcgctgcgggggagtggggagaggatggtctcccccaacagtttgttctgcgagggggcatagcgaggaacacacaggaggtagccagcaaggaaccggcgcccgcggcggtccgctgcgcgggggggcgctgggggcagccagccagcgcacacccccagcaggccgacatgccgtcgacccggagccggttgccgccgcctgctgcctcacgagtcacctcgcgccgcgacacgccgcgagcgccggtcaccgccggccacctcacgagtcgcaaccgccacgccacctcgcgcccgcgagcagcgacgcctcgcgggcgccagccatgcatcccacgagccacaaccaccacgccgcctcgcgccgcagcggcctccgccggccgtaccgcctccgcaacacgcttccagacatcgccgtcatagatctggcgacagcggggccggatctacagcagcccaattaacctgaaggcctcgccgccgccggcgaacgatgcatcccccgcgctgagaaggggcaccaccgcgagaaggccccccgccgccatccttacacaatggatgccactgccaggagtaacatctctttcccaaatgaatggaaccaagatacattaattattatttggcagtaggataattacaatgccagatatattcacacccgtaccatattattattagcaaaaatacaaaaagaatctaatcctgatatcaaattgttcccttgaacactcgactgaattttcaaaattctctacatcatctccaagaaaattccgaatgcatacctccttcacatatgcatacggacgagacgatgatgacggaacaattagaacgaagaaacacctaatcctagtctgcaatgcgacgactcggccatttgagtcgcatcacctgctatgatcttgccattgtccagctccggcagctcctctttaacaccaatgtcgccgttcacgtccaccaccgtcttgacaacgtcgacgatgtcggcgttcacgtccaccattgtcttgataatgtcgatgttgctgttctcgtccaccattgtcttgacatcgatgtcggcgttcatatccaccatttccttgacctcgatgtccgtgttcacgtccaccgtctgcacttgctcctcctcctgccgaaggtcgaacacatcgacgagtgacggtcccgactttatctcgaaccccttatcatcaatctggttgtgctcatccacccctaccggcatttggtgatcggatgtgagctcaaccttgtgttcagcatcatagttggtgtcgaaatcaaaatgctgcattccatcgacattgatgtcgagatgcggcttgctactgacgtcgtcaccggcggtcgagtcgtagtagaagtaatcgtaaagctgctgtggttgaccgtgatggtgttcacgctgactctcgtcctgattatgatggccgtcggcgtgtaggatcgcagcatcggcttcttgattggcatagagcgcatcaacgacctcatgctccgcactgagtaggagaggctggtttgacgaggtgacatcgagatcggcgcacgcgtcgtccaacacgcctgccggcagcgcagcggcgacgctaccggacgcgccagcggcagccgcctgacgacacatcgccagatggtggagtacggtgttgagttcggccgtgtcgagctcgagctggcgctcgagatcgcagatgacgcggcaacacccgccgacggggtcgtgggcccgcatctcggcctggtagatgagcgtgcgcatggcgtcgtcgcacagctcgggcttgaggtggcggagcgtcttgaggatgttgctgacgccgaagaggcggtgcgcgttgaggaagcggcgctgctggtcggcggggaagtagggcgccatcgggcagtccgggttgcacttgcgccgctggtacttgcacgccgcgcatgcctgattcgtccctccccctccacctccaccaccacctccaccaccaccacctcctccgctccctccgccgctggcgccgcgatgcgagccgccgctgccgctgccgctgccgctggagtgcggaggacgggcggcgacgggaaggctctggcgttggtgggaggcagtggtggtggtggtggtggagacggggttgttgttgttgttggtggtggtggtggtggtgttggtggtggtgatggtggtggtggaggtcatggcggcagccgcggcggcagcggcgacgggggctctctggctcgccaggtcgcgaggtcggaggcgacggtggagggctggccctggcgtcgtcgtaggaataggagaggccctcagcagctgtccatgtcatccgccattttctccaccactcgtctccatcgatcgccggatgcctattaaaagtaaaacggattttcgatcgagcctagcatcgatccatgcatggtgcagttgccaacagctggtgcttaactgtgtgcaagctgtcaagagagcactgatatgatcgactcaaaagagctgcatgaaaagccatgaaaagggatatgatcggagagggaggtcgatcggtttggtggctggtaggcctagctaggagatggagttgcttgatcgattcagaatttccatggatctcgaatgtgttcgagcattgcggggatgtcacactcgagagtttgttgctacataaaaaggtttgatgtgtcaaactgctactaccattagaattagaatagctaagactgcagctaacgatgttaagccagaagtttagctagacttttccttaaagatttaacagtgtactctctccgtgttgaaaaatagttgttattttggacgagactatgttaaacttatttgaattttgattacgaataatttctaaaactagaaagatagcccgcgtatgcgcgggcatcttatttaactgtgctagaaatttgattaggaatgtttatgattactctattttaaacatgtttaatttttcaataatttgtgtggtgtttctctgaatgctagtaaccatcgctggtgtataaattctaaactaaaattatttaaaaccatgcaaattaggttttataagaaaaatatatatgtgaaactatatatcacttctacaaaatgcacttcttttttttaatatttagcatatcttatttttgcacattctaaactatgagtaacaatttttcttttgtatactatatatgtttttatgaattttaggatatattaattgaagatattttctattaaaaatatggctaatacgactacatcatctaactaaatgaactgaatatgttgaaatattgatttaattgtaagtatatagtattgcagtatgaatttatggtttagcagtaaaagtttttctaaatcagaaacagaaaatatattagaaaatgagacttttatcgttctcaagttatagtttagggttgtatacttcgaactgatattatgttagattttatttccaacataatgcccaaaatgtcaaattttatattatattttatttagaattttaattattttcattgtatcagtactcctaaatatttgaacattgctatttagaatgggttttagattaaaaaaatcttaaatttagaaaaacaaagttcagtcttcaattatttttatcatgttatttttttttctagatttctatttcatcaagcatcccttaaatgttttggtctctgcaatttggtatagaaatataagtgggttaaggccatacaacttggcatgggataaagttatcgcttaattgttttcaatctattgtctataacaaatagatcctagacagggtacacgttatgacataaaaaatgatataattaaaagctttttctctaatccattagtgacatcaaatatcataggtataatttagatgttatgatcatcttaggaacatttatttatctctaaaaagatcatttattcataaaagcgcatctaggatgaagtataagagaaattaactacttccattgttgaggaaagtatatcaatatttacatcaccaaattatttttattgaattcagaattgaatatgttttttataatataattgttttgtgttgaaaatgttactatgtttttataaactaattcaagtaacttgacatagacaaaatttaaaatgacttgtaatctgaaatagaaggagttggaagaaggtcattagatatttagcatggtataaataataggttgactgtttattaaaaacataaggtgggattttttattttttaattagaaattttagtattttattttatttattggaggcttcaaggtagatagatgtggtccacaatgtactgaattattgatttaattgaaaattgtaatagtttagaaatgtcatcaattgaatataagatttaaaaatttatgattattttaaagtctaatttatgttgtttctataagtgctagcttgagaagaaagagaagagaagcacatgacagagtaaaaggttgctagatttgttaggcggagtctatttgtaggtgtttttttttctcttaaatataattttggatttagttgctatggagataaagaacagagaatgaatggtagggaaagaggaacgggagaaatgggagggagggagtttttggattttcgtttaaagatagatctaactatataagatagtggatccattagttcaagtggaaaccgatggttggatattttgttttcatttgtcacacttatagagtttttcaatttattagagtgacacgtggtgatcgatttagaaacatttatgggtgtaccattaggcctagacatttgtagttagaggagaggaggaggaggaagaggaagagatgggggtgaatgaggaagaagagataaagggaggaggagatagaacttattaactgatcctgtgcgcctcctcctcctcgatctcgcgcgcacgcctcgccctctccacgtatgccgatcatttttcccggttgataacaccaaccgtcactaaagataatagaggagtttgacaccgcctgccttttttttaccgggactaaaaataatctttagtcccgattgttgttaccaaatgggactaaagatcaaaaagtagctctaaacttttgaaccgggactaaagataatcttatatttagtctggttttattgcaaccgggactattaattgtggaatttggtcgaccgatcaaagatggtttttcatctttttccagaagtgcattgatcaccctactaattagactaaatataacccaacctaacatggctaactaaataaataatttttaagacgtcatctttccgactgaatgaaacaaaataataaaataataattaatacaagctaactccaaacctaaccgctacatgcaaatgtccaatcctaacactttgctaataaaatattaatccatctgctaagagcaaggttaatagagaaagcttatcgtcggcaccaaagaagtccagctctgctttatagctaaccatatacatgtagtgcgtatattagtaatatcctcatattatctctaaaagctattttatcttttaccggacccacaattctaatttgataggctcatacacagaaattatctcttggcaggcacgtgttaactagccatttgctttcttcacctaggcgcttgtgctcagccggcgcttgtgcaatcgctcacttgcctctctctcatctcatctccctcatccacgtaggacttatttgacgtggcttggctattagccagcagagctggacttattatacctgctctaatattcaccatgcttcccacacaatgcgagattgttatctgattcaaaccatgcttcccacacaatgcgagacagggattgtgtcatattcagactacgcttgatgcataatgtaagacaaccggtggatatattgccttctattgtgtttctgaaatttacagcttatgattttctgaaaaaaagcatgctagctagaaaacttttacacaatgtatttgaccacttccatacctttaataatgacacccatgcatatagacagcgagtatgtataattaaaataatctttacacattccaacgcacgggaatttgtttctagtatgcatattaattttaaaatatacttcaataaaatcgaatttctataatatagaaaaagagtgatgaaatttatttttttaaatgtggttttctgtaaaacgacaattattttcaaacagaacggagagtaatagtttagccctccgtccatgaacaatcacagttccaaaaatttttttagataatatcagagttgctaatttaatcatcgttaaccgttgttgggaatcttctcgcaggttactgcccggccggccgtgattaaactaaacacggtccaaataaaaattaattctcacccacttgcatgaattacacatgcttaagcttaattaacaaccacgtacagcttagtccgtgtacgctgagagagagaagtggagatccaatgcgattttccactccagatgatcagcatgtcatgtgtctcacgcgcccgcgcgcactgcttcttctcgatctttcatttgtttattgttcgacaccaaccaaaccatctctcacagattcttaatatacagaggtttcgaggacgagcagatcgctgcaactgcaagaaagcaaagaccggggtgtagtgagagtgtgtgtgacaagatcgatggccgcggttgagtcgtcgtcgtcgccgtcgttgtggtggtggccgctgccgccgtggctcagcccgggcgccgcgtggttcgtcctgttcaccgtcgttgtcggcgccgtcgctgtgtcgtcccgggcgcatgagcaggcgccgccgccgccgccgtcgtcgaccaggcgcaggctcactcgcagcgcgtcgtccatggtcatggagcggctacggtccttctccgccttctccttcgtccacgcgatctccggtgtgcaagaggacgacatcaccgtaggtccaccgacgtcgccggcggcgtcagggaatgcagaggcggcggaggagaatcccattggattggacgaggcgcacgcgcatccagcggtggccgccgttcggccgccgccgccacaagctgctgctgctgctgctgccaccgccggcgaggtggctgctgctgctacggcggaggagaggccgaggaagaggagggaggcggcgaaggggaggcgcgcgttcgcggaggtggaagggaaggcggaggtgaacgcgagggcggagcggttcatccggcagttcagggaggatctcaggctgcagcgcctcatgtccgtcctcaaccgcacccatgcgctcgccggcgccgcctcgtcgtccgcaccgtagcggcgtatagtagacggtggcgtggctgccggccggccagctagctgcctgccacgccgcggcaacaccattgtactgctccatatatattccattttgctttgcttaattaggatatctaatttaaccttcatcacatgcgaaaagcaagagttatggtatatagttgttttttcttgtcgaggtcagcagggatgaagctagcgctcctcaaattttcttttctggaatgactagtacaagacggtacgaaattctagtgatagagtagaaaaaaattataatattacatcctgtaggtcgtaaccagaaaaaacaaaaaaatgtactgccgcccacacaccgacaacgccaaaccacaagtcctggagaagagtagcaccggactggccgctgctaaactaacaacagaaacaaccgagatcgcccaaaaccctacccttacaaacaacacaaaatccaactttatccacgtctttaggatttagcgagagagggtgagagagaagatggaacatctctccccctaggccctccgccgtggccaacttgtagtatttaggacgccgccacgagaggaagaaatttagagcgtgcttgcgccaaaagtttgggtggttttggtaaggggatgcctagatgacgtctccaaggagagaagcgatggaaacaccgccgccgccgtccgtcaaggtctcaagagagccgagactgggctttcgcctggcaacaaccgttgaggggtgagacggcacgacaacaccctcaggaggggaatgacacttgaacgccatcgattgtcggtccggccgaggccgggctgggttttcacccgccgtccaccacctgccaatctaccacagaaactccattgctccaccgccataaaaaacctctgccggcgcgtcggtacactgcaccggcgcccccaccggctagtatccgcgtgcagccacctcaccaggctccgcctccatgacatcacctcctgctgcgtagccatcacgcgtcggccgtcctcgatgccgccgaccaagcctacacgcgcttcatggctgccggccgcaacttcttcggtgagctggcgccacctccaccgtcacggagtcgaacctcgcccgccgccgtgccaccgggcaccgccgtcgatcgccagcagtagaccccgccaccggtcacttccccgccatttctaggcgcggatctagcggtcacttccaccgccgccatcacctccaaacgccgccgccacccccgccaaatgccaccgccccacggcactaccccgccgccaacttccttcctaccagatccggccggaacgcacaaatctgggcggttccaccgttccaaatgccgagcagccccctacccctgcgtggtgagagaagcgaagccccgccgcccccatccttgcggtcacgcagctttgccgacggccactcaggcggcggcgaggcagaggaggagggaaggagaggtcggcgatggcagccaagtcgcctcccgtgtcgcccgagggggatggcgacgcgagggccgttcgctcctcaaatttaacggagatccatgggtggatgtccactcaaccaaatatctatgagaaaactttaaaaaaattgataagataaattaatgtgtaatatattacttcacaagtatgtaaattcaaattcaacttctagtgtaaaaaaaataagaaatttaatacaacctttacaagttgaatttgaggttgctttgtggagtgatatattacccattaatctatcgtgtcaaattttttgaatttttttttatttcgtggaggcaattgaagggattgccgatttgttaaacggtgtacacattagtagaggcctgtggatgaaatcatcacggcaatgccgcaactctctaatcgatcgatttcatctattattgctgcatgggtatccgaaagattactttctcagcaacctttaccttctaaaaggattgttttatgtatctctctgacttgtatcagtttaaagcaacgtacatgggaatttatatttccctactcttattaatatatataagtcgaatattcaaaaaagcccgcatgccatccaaaaacctcataaaaaattagtcatgtaatttaaattcgagctattcaaataaaaatatcattgtttttattcgtatatgcttttacttgtatagcatgtgacatcagcgatccagaagtttcatagggcatgtcttatagtccctccattagttttttaatagataatgttgttgacttttaaatacatgtttgatcatttgtcttattcaaaagttttaaagcatccatgcctagatccagtagcttgaaaactggttggcgtcggatgcagccccaggagtgaaggtttgccggatctggggcatccgtggctagatccggcatcttgtcggctcagttggtgatgatgggtgatgatggacgctccatttatttttggagggtgtcggtggctgcggtgtaggaaagtaggtcaccttgacacactacgttgggctagggcagctgtaaacacacctgtgagcgagcacaactgacagtgggactgctttaacattggcagctcggtggaggctatggtgaaagcctagacggcaatgcctgtgggcgccgttctcttcttggaggtgacatttttgtctcctcgtcatgctgtgtttcgattcttcgaatgaaaacctagctcaaggccagcaatgacgacgtggtttggcatggtgtccttcttgaaggcatcatcgagaaaatccttcatatctttgctagtgtgggagtcttcctttcttctagcttgttgcatggccttgccgtttatgtgttgagcatcgtttgttgactgtccttttccgttgctatgttgtttaggttagttgaagactttgttggagttgtgattttcactcagttttttctaattaactatgtgctgtaaaattcagttccctttttttcttaaaataggatacattcttctttatttaaaacatcgggaatgggttgaccgttcgaaaaagaatttataattgatgatcaggaaggtgcagattgaagacgtatttcattatcccctatcccacaaaagcttgatgaggcacgatcctaaacatgcatatatgttgtcatatccctattatcataaatatatgtttcctttcactagggttatgggcttgtgtcaaagcagaccttaggaagattcaaatacattattgttctcgtctctcccaactaagactcaatacctaacgagatctcattttaattaggttccttttgtagtttcccagagaagttggtatatagaattgttcttgccattcctaatattttacctgattttttattgtaaatttgcgtacagatatattgaaaagtacaattgaatttgatatgcaatttttgctatgtgtaattatattttgttcacacagctatatggctatttgctccattataatcttgatacaccacaatataacggtgcccatatttctattttttaacaaaaaatatttttcttattttacacctctaagctatttcattggagcacttaacctctataaataattttctcactcattttataccccagactactgaaagtcattcaacttactcactaatgttatttcttctttttttttctctctctctatacaagtcgaattttgcattaaaatttggtgtgattgatagatgcactatataatattttttttggaatttttatttaaaaactagaactcatttaaacattgaggctttaaatttcaagtcaacaatcatgaaaatttcgaaaaatattttacaattttaataatgatgtcatctatagctctaaaaatttttagcttaaaataaaaatcatatgaagaaaagaaaaggagagatatcattaagaagtaaagtggcccatgtttaatagtttatgaggtataaagtgagcctagaaaatagtttaggatattaaatgctttggtgatatagtttgggagaggaaagtagatttttttttaattaacatgttaaattttaggacgcatattaggcttttagaaactcaaactttgcatatcttgaccaataattagttgcagctaataaaagtcatctgtagcctataggttcatattttagagagttttacaaaagaacaactttttacgagtaatcgtaaatcaacacctaatgccattgttactctaccgtagtagtatatgttgtttgcattaattcatacctaggaagttttttttaacgcaaaaggtagagagactctaccttataaccattgtattaatagctaggaagtactacaacatagatgcctgtttcttcgcttaagatggagaaaagcacaaagccagttcgaaagaacactgtcacttatccttggctttccttgtgcgcctgagtatcccttgctgccagatcacttaattctgcaacctggtaatatatataggtatctctgtaatcgctggctggcgactttgtcctctgattaattgtgcttcacggaaggaaggaaggagactgcagatcacaaccctgcactggctagctatatatacacatacgcgcgcaaatcattaagttcaggacagatactaacaataacagagagagagagagagagagagagagagagagagagagatcaggattaaggtaagctgagggagaggttgcaaccatggcacagcggttgctgcacggggtgatggaggccaaggtcctggaggccaagctgtcgtcagtgtcctcagaggcatcagattatggccatgggcagcccaagctggctgcctatagcaaggtatacatataagattcggagagctctgataacttgacgctgtttgtttgacatcccgatctactttcgttcactcagatgatctcacatactattctagctcacaagtatcaattaaagcaaattggcaacaggaaattgtcaaattatcaaatttttctaagagacattgtttcgcttggagctgactgtaagacgtaattgcttattaaggaccaataaataatttatgaataaaatttaaatatatatgcattcttagtgaatcaaaagcttatataaaaataacaaaatcaattataaaattaagattcaaaatttaaattttggatatggctaataagctcaacagcaaatgaatagcttgtacgatggcacttatgtataataacaattatagctagccaacgaaactacatgctagacaatttcactgatgtgaaagagggagaatagagataggaggggattgctaaacatttgcctgctagacgaagtactccctccgtcctaaaatattaaaatataagtgagataggaggggattgataaacatgctccctgtcctgattcgtagcacttaaaaaatgtcacatccgttcaaaatcccttatatttggggacggagggagtatattttaagaatttaagattgtctcagaaatattgtatttttagaatattaggtgtcacatcaatcatctcttgtttgaaattatcttcattttacccctaactacctcccacatccaattcattatttaatgaagagcatatatgtcatttttcttcctaatactttaccttccaagtgttagaaatgcacttgtaacataataacagatatagtactatatgaaacacaattttcgagggaaacccagtttcagcagaaaacatgtctatcaatgtagctaaaaataaccatagagcccattgaaataaataaagtgtactcttattggtgacagtaagtgcatttccagtggatagttttattttgtggtttccaatagtgcaacataatccattgaggcttgtaattatgaataaaattaaatatctccaatacactgtttcatttcgtggtttccaatgatttagtcacaatggactttcattctatttccaagatatagttaagtgcgtaaggtggtgtttggatccaaggactaaactttactccctgtcatatcggatgaatttggagtattaaacatagactacttataaaactaattacataaatgagagctaattcgtgtgacaaaatttttaagcctaattaatccataattagcgcatgtttactatagcatcacataggctaatcatggattaattaggctcaatagattcgtctcgcgaattagtccagcattatagaatgggttttattaatagtgtacatttaatatttataattagtgtctaaacatcttatgtgatagggactaaaaagttttagtcccatctaaacagggtctaaaccaagtttcatctagatgaaacccacttcttgtttctcttcataaatttcttgagtttagtttatatggcattggcatctcatttaataagattgaaaactattatgaaacttgcaccgggaatggcctaatatccattgagccaactcttgtgtgttattttaggaagtggactctcttaatgagatggaagacttaaggttgactttggaagtgagtttggaatatgatttttcagggtgcgcaaaatgtattaagccattagtgtataactaattgagtatctattatattattagaacaggtttgaaaagaggcaacgcgttcggcgtggacgctagaaactcccacattaatcagagaaaaagcaagttaagtatgaatacatttacaaatagctaaaattagaaatattgaaccaagagtccatatagaacactactagagattaattaaaattcgaaataaaaaaataaaaaaaaattgaaattagaaaaataaaaataagagttcaagtagaaatataatttagaaataactaaaattcggaatgaaaaataaagaatgttgagagaatagtccaattcagaataaaaataaaataaatttcaaaatagaaaaataataataagagttcaaataaaaatacaatttataaataactaaaattaaggataaaaaataaggactattgaaagaagaccatctacaacacaacattatttaaattttggacaaaagaataaattctaagattagatgagtgaaaatgagagttcaagtagcaatacaatttagaaataactgaaattcagaaaaataaatagtgcaagaacagtacatataaaatatagtatgaggctaaataaaattcaaaataaataataaaataaataatggaattcgaattaaaaataaaataaattctggaataagaaaaagtaatataacagttgaagtaaatacaatttataaataaaaatgagagtaaaaaatagagttttaaaaaacaatagttcatctagaaaataacgatgataaatgataataaagatgaaggagtaatgggcttataaagaaatagagtagtgatggtcgacgggacatctaaaaatataaaataaaccccaaaaatgattaggttcgatttttagaatcccaaacgattaaaaataggaccgatgggtaagccattaagcgacatgtatgcgacggttggtgggacttctaaaagtaaaaaaataaaccctaacaataattatgttcgattttaaaatgacaataaagaggggatgccatagaggaatacaatgacgatgtttgacgtgacttctaaatataaaaaggaggccaatgagacaataaattctaaaagctataaggtccaatttttaaatgttacaagataatgaatgtatatccattatatatatgtatgtgtgtatgtgaatcaaataaataggtaataaaggagtaagggatagtgacaggcgtgactattaaaaactactgcctccgtttcaggttataagattttctaacattgcccacattcacatagatgttaatgaatctaggcacgcatatatgtctaaattcgttagcatatatataaatttaggcaatgctagaaagttttataatatgaaacggagaaagtattaaattagaaacccgagatgataacatacgattttttaaagtcctaaggcaacattatagctatttaacaaattgtaagtaaaatcgtttgtaaaaaatagataacttcgtataggtgctagccacgcaattgcgcgagcaacccagctagttaattattataagttaaaaataagtttatttgattcttaaaagaaacatctatattaaaaaaagagcaaatttcacgaaactatatgtattttgatcaatctatcataaatagatttaagatattgtataaaaagaaactacaaattaacatcagttttaccacaaaagtacaatttttgttacctcaataatgctatggatataaactctaaaatttgtagttctttaataacttcatcacaaattaaagttgtagacttgtgatacaatgctttagatatgtggttgtatcataaatttgatgataaatttgtagttaaatctatagttttacgatagtttggttaaagttcctatagttttctgaaatttacttaagagaaacattgtttagcattttgggaagcgtgtgtgctaacgaaaatcaagcaagctgccaatacgggaccttagttttggttgggctgaactaaatggatatgcccttataaattgatagttgtttattctctcacagtgccatataattaatggatatctcaattatttcaagtccttaaattaatagctgatctatggtgtattctgttcctcttatctccttaagctacatcataattaatctaaggaacaaaattgaatagaacacgtaaagccaaacccattcaccacgtttaccattttgtcatttaacttaagtcacacgcataggatttcgatctagtgacatattataaccgtgcaatttgagaaaagaaatcgacttgtgcttgtaccagagtcagaagctgccgaggacaaagctcttgtcactaatcatgaagctgccgttcatcttcacctgccaggttcgaaaactctcctgtcactggtcatgaagtagccacatacgccatctaattgtccattattaattattgtacttaattatgcagtaatgcttctgtaactaattccagctgatacttgccagtactatcttccttcaattcgttgtttaatagatatatagcatcgttaatttttaaagttacctccttcattccaagataaattaatctaatataaaatatgacacatcttaatttacgaatttggacacatataatagtaagttaatttattttaagaggaggaagtacatcaaccattaatattattaaaattgtccaaatagaaaagaaatgtgctttaaatatatttaatgataaaccaagttaataaatagtacgtactattttaaatcagacgaacagtagttgtacataaaggtcgaaggtatttatgtattgaaaaaacggagtaacttccttgtaaaagaaaataatgatactggttaactgatgcactcgcagaggttcgacaagtccactgaccaagcgcaccacggcgacggcaagtgcctcgtctacgccaccattggcatggacgcggcgcgcgtcgcccggacgcgcgccaccgaccagccgcagtggactgaggagccgctccacgtctactgcgcgcacgacgccagcgacatcgtcttcaccatcgtgacgaccggcggccaccgcgacggcgatcctgaagacggcaccgccgaggaggtcgtcggccaagcctacctgcccgcggacgacgtcggcggcggcaaggagatcgaccggtggctcccgctctgcgacgagaagaggaagccactcgaaggccttgacaaggttcatgtccagctccggttcaccgacgtgatgtccgacgtcacgtcgcggtggggcaagggcgtcgatggtcccgtgccgccgccgccgtacaccgggctgccccgcgctttcttcgggcagcaccgcggatgcaaggtgaccctgtaccaggacgcgcacgtcgcgccgccgctcgccggcagcaggtgctgggaggacgtgttcgacgccgtcgccaacgcccggagtctggtgtacatcgccggctggtcggtgagcaccgacgtcgcgctggtgcgcgacccgaggcggcccgcgcagacgctggggcacctgctcaagtcgaaggccggggagcgcgtcgccgtgctgcttctggtgtgggacgatcgggcggccaccggcctcggcgcggcgcggcgggacgggaggatgggcgcggcgcgcggcgaggacacggcgagctacttccgcggcacgggcgtgcactgcgtcgtgtgcccccgggacgccgtgttcacgcaccaccagaaggcggtggtcgccgacggcccgcgcggcctcgtcgcgttcctcggcggcattgacctctgcggcggaaggtacgacacgcaggagcacccgctgttccggacgctcgccaccgcgcaccgcgacgacttccaccagcccagcttccccggcgcgtccgtcgccaagggcgggccgagggagccgtggcacgacgtgcactgccgcatcgagggcccggcggcgtgggacgtgctcgacaacttcgagcagaggtggcgggggcagggcggcgccggcggcgaggccctcctcgcccgcctcccaaggagctccgccgcgcgcgaggcggtggagcaggacaaccaggagtggcacgtgcaggtgttccggtccatcgacagccgcgcggtggaccggttcccggacaccgccggcgaggccgcgcggtgcggcctcgtcaccggcgccaccggcgacaccgtggagcgcagcatccaggacggctacatccacgccatccgccgcgccaagtacttcatctacatcgagagccagtgcttcctagggagctcctacgggtggaaccgtgacgtcgccggcggcgccgccaccgccaagaacgccgccgccgccgccgtggcgccgcacaccatccccaaggagctgtcgctgaagctcgcaagcaagatcaggtccggggactcgttcagggtgtacgtggtgctcccgatgtggccggagggcgtgccggagagcgccaccgtgcaggccgtcctggactggcagcggcggaccatggagatgatgtacaaggacgtggcggcggcgctcgccgcgaggggctcgacgcagaaccccagggagtacctcagcttcttctgcttgggcaaccgggagccgtacgtccccggcgagcacgcgccgccggagcggccggagctcgacagcgactacatgagggcgcagcaggccaggcgcttcaagatcaacgtcaacgccaacatcatgataggtactcccctctgtcccaatctatattacgtcgtttagtttccacataacgttcttcgtatgataaacttttgaataaaacgaatagttaaatacttaaatgttatctaaaaaatcaatggcatcataaattttaggacgaagagagtacattatatggaccagggatattgacaagatatggacatttgacaagaacacgatgatcaaaacgaaaccgttgacaatcgatcgccatgatttttttgcagtggacgacgagtacatcatcgtggggtcggcgaacgtgaaccagcgatccatggacggcggcagggacacggagatggcgatgggcgcgtaccagccgcggcacctggacaccccgaactcgtggccgagggggcaagtgcaccagttccggctcgcgctgtggcgggagcacctcggccaggcggcgttccaggccgccgccgccgccggcgacgacatgatctacccgtcgcgccatgggtgcatgagccgggtgaaccaggccgcgcggcagcactgggacatgtacgcgagcgacaagttccaggggagcctccccggccacctcatggcgtaccccgtcggcgtcggcgaccgcggcgagctctgggaggccgtccctttcttcccggacaccaacgccaaggtgttcggctgcagctccgacgagcttccaccggtcctcaccacatgaacttgtgctagcctccaatcacaataattaatatatatatatatatatatgcagcgaaaatgtattgcttgttgtacgaaaatatatgaggtggtgatttgtgaataaaaccatggtgtatgaaaatgcataaaatgcttctgctgcagttgtaaacatgaactgtactaatttatggatttgtgatatgagctatgaattcggatctggcgcctctgtgactgatctggctgcggtcaaccggcagcgtgaagatgtccttggagggcgacacgatctgagctggtggaggctacaacagcaggaaaactgacgtaggtgatggcagcgggcggccggtgtggttgacggcagcgagagacctgtgcaggcaatggaggctggtggaggccgcgcggtgtcttggcgatggccggtgacaccagctgctggcatcgacggcgggcgcagttgcgactccaacagtggcggcgacaccgatggtgggcgcgacagttggtggttgccatatgcaccaacggtaggccatggacttcgatggcgagcacggtgcactaaaggtgtgggagcagcggctggagcctgggaacggctggtgcaacagctgcctagctaagctgatggcggtgggtgactttctatacttagtgtttctatagggtggcatgtttgttagaatcatatggtaatgggaccacctatacatttgtcgacaaattttctcctaaaaatttgatagatgtaattatagtataatcgtagtgtaattacactgtaacttgtatgtaattacactgtaatttgcatgtaactacagtataacttgtatgtaagtttcacgtaattttgaatcgttagatctattacaagatttgttatagtgaggaagaaaaaaatcacagcacacacatatgtgaaaagatttgttcccacgacctccattttaccgaaataacatgttacagagagatttttgaaagttacattatagttacaatgtaattacatgcaaattacagtgtaattacactacgattgtactgtagttacatctgtcaaatttttggaagaaaatttatcgataaatatatagcaaaatcgtatttactaagcaatggcctaaattatgtagagaaggacttcgtaataatactgtatttttacaagaaagctaattggcacgcgctagctggcggcacggtcccacccccgcacggcgttttttttcccttttttcatgatttttttcttttgtttttgctcttttttctgattattttttaaacatttttagcacacgtatttttaaatagtttgtgttaaaagtatttaaatcatgacttgaaaatttttcaaatcttaacttaaaaattttcaactctcgagttgaaagtttttgaatctcaagttgaaagtttttaaatctgggttgaatattttcaaagttgagttaaaagtttttcaaatttgagatgaaaagttgaaagttttcaaaatttgactttaaaaattcaaaattcaagttgaaagttttaaaatctgggtttaaaattttgaaaatttgacttcatatatagattttcttttcaatttgttatttaaaaaaatctcgcgggaaaaagaaaatcttattatctactaccgtcattatctcaaacggttattatctaagactaatagattagtctaactaccttatcccaaagaaacacgcgccggcagacgcgccaactagcgatccccgtatttttatctcttttacctagtgagcagattaccattttattgtgttcaaaaacaaaattgttccttagcggtgagggagtaatttcttgggttatggaaagaaatagattgataaatagtgaaatgcacatgtacttacatatagttacatagattaacaactatattttgggagggaactattgggtgtggaaaatagagttgggcttatgactatattgttgaagatcaggcccaaaacatctatattggcgggctcaataagaagacaacataaaaggcttcccagccttctctttttgaaatttcaagttaaaaggaaaaaaaagtttatagaaacctctctttttctgaggatgctctatgctactacttcctatcaagtagataccaaaagttggtgttaatattgagcactccctggaaaatgggaactaatacttataatagtgattagtacaaaagcatcagtaccagactctcagttgtcaatagcacagtattcatgatcattctaggaaagaatcatatcgatcttgtttgaattaatgattctgattcatgataggcaggtgcagaggtgctggcgttccctgcaggatattgcaatgttttgtagctgccaaatatcatcacacagcatgacaaccttgtcgctgcccaaaaaaaaaaagcacatactattagcatatactccatataatataagactgactggtgaacctatttgctataaataccctactaaacttcgaagacttttccatcaaaatacccttcgaagccttaaatcttcagccactactacgaaaacctttttcgtggcggccattttagattttcgctggcggaatttggagccgccacaaagcaaaggccagtgaagatcacgattttcgctagcggttatcgaccgccagcaataattcattttcgtcttaagacgaccgccagcaaaaatggatctttgttggctgtcgtcttacacaggccgccagcaaaaattcattttcgctggcggctgtgttaaatcagccaccagggaaaatatattttgggaaaaaaattcgcatgcagctgcccagccgccagcgaagatttggagaaaagcccattgattcatttttaaaattcaaatccacatctagagatgtagattctaattcatatacatatggctgctcatttccaaattcaaacacaatacaaaatcatcattagcacaaaatcatcattagcacagatgtacacagatcaaacatcacaacatgcacaaaacatctgcatcatctagatcatcaggaaacatgcaaaaaaaaaaaaatcctaactgagctcgtcagatccgtgccgctgccggtctctcgtcgtcgccacctcaccgccgccggtggggaggaaggaggcgcaggatccgctccccgtcgcctcctcccccgcgccgctgacgccgagagccgctgccgccgccgcccccttccccgcgctactgccgaggcctcatcggcgtcggcagcagatccggggatccggcctcccccatcgtcgcggcggtggatccggccaccctcgtcgtcgtggcggcggatccgacctcccccgtcgtggcggtgacggctccggcctcccccgtcgatgtggctgcggattcggccacccccgtcgtcgcagcgacggatccaaccacccccatcgatgtggtggctggatccgaccccgagcctgcggtggagaggcgacggcagcccccggcggcagtggaggacggagagggagaaggagagaacgcgagtgagaaggagagaaggagagactgaggtaggggtggtaggtggtaggtgcggtgggtttatatattcgccttaaaactttttcctagcggtcccttttacctaccgccagcgaaaacgcgatttttgctggcggacacttaaaaggtccgccttaaaaaatagagttattttttatggcagacctcttagcatggccgccagcaaaaatcggttttcgctggcggtccgtaaccccctctccccttgttatatttttgctgacggtttttgcgtatggccgctagcgagaattatagggtaacgccatgaaaaattatttttctagtagtgagccacatcttgagcaaattgaagctaagagcattggttgtccttaataccgattttggacagttgttacaaagagtttgataggtttgccttttgaaattggacaagataaagcttgagtgaaataacaacgaaagtattggctggattgttgccatttcgcatgattttcaagtatccgtagcggaatgctagactccgggtattggctggattgttgccatttcgcatgattttcaagtatccgtagtgtatattttagtggaattctagattccgggataccattattagcgttcatgacgggatcctctcccaatctcacgtggctatgaacaaaaaatgacactgagaacacaatatttcatggcggccattacggcgcagagacaaccggattccgcgcgaggtagcggtgtgatggcgcggtggcggacaccaccgtcgcactgcgcagctgcccgcgccagccgaggacagcggcgctgcacggggcttggttgtcatcgctgaatcaaaaggagaggtcttgcaccaaggaacagtgcaggctcggtgtcggagccgatggatatgggttgtggtgacggctaggatggaattgtcataggagtggatagacgtgacggctgggacaaaattgtcgtaggagtggatagacctagtgcgaggaggattcggctaccaatgacgagctccagcgtggggcgtggactgtggaggacctacttgcagaggacgcaaccatcgacgatgagctctggagtgccgtgtggatggaggacctgctcaacgaggaggacgtggccactgctgacgagctctagcgtgggggcatggacggtggaggacctgctcctcgtgaactacatttgtcgcccacgtggagtatcatctgatacctcgtaagtatcaccgacacttcatacaaatcatctaatacctacaactatgagaacccaagtatcatgtgatacctcgccaagtatcacctgacatctcataggaatcatccaatatctataagtatcagaatccgatatcataagtatctctttgtacctcgtaagtatcacccgatacctcgcaggaatcatatgatacctcgtaagtatcgacgagtatcaggtggcatcaacggatatcaacatccggtaccaataagtatcagtcaatacctataagtatcacttgatacctaaccagtatcatcttgtctgaacgggttcgttgtatagcagcctcctaattaattctagcccactccaaattcaaagaaaagatgaaggtaaaatatatgtactctttgtgttgcatgaatgtactggtgctaattgtacaacttacggtcataaatatttaatgctcgactttttccatagctatcaaaatacaactctgaccacaattttatattggaataagttgataaaatctactaattttatcatattataatagtacttgtcaaggaaaatctacaaatgccattattattttgaacaaaggaattattacttctggcctttataccaactaaagatacatcaaccaaatttatatatactaggatttgaaccctggtaaattgagccatgtatccacgacttcactaccacactaatagtgaactaagcatttaaaagttattgaccaaatttttgttctaaatacgagttttgctaagctcaactataaatgctactgttggtatcctgtagtaagaaatgagtgaatgggcctggtgggacacaagaacatgcagagggctcaaaacttcaaatgctcaactaccatgccagatattgggccagtgacagataagttgattctcaacttttcacataagaaatcatcttgctcttcttaagttccattgatgcacaaaacaagaaaggcaacaacttttttagaagactaacctttacttggatacttaacttggatcttgcatttgcaatacaatctaagttcatggtaactagcctgtcctttctttgatgtatctcaattctcaggtcacaactcacaagtacagcttggcaagcttctcatcctttggattgttcatgttggcctttacggttgttggctatcaccatccaaacccccaaaatattaaaagaagggcaattttgccatggataatgactacctgttaatttaggcggagtagtatctttcccctggtgttattgtgaaatgatgtacttcgaatgatactactctaaagtggtgaactttggacggtataggtccaatctttcattcgattaattacatgtgatacaaatcatattaataatagtttaattcgactggcaaaccacacgaaattagtttaactcctatgtttaaatataacaaagtgtttgaaaataaaatatatatagtcattttctccaagcaatccatgtattccaagattccaactactaatttgagttgtcttacttagaaatatatagaaacagcatagcccaaagaaagttgtgcaagaatgagataaattggtactagcattttagcagcatgtaaaaaattatgagtaaatttcagaaaaccccatattttgtcgtcaaagttgtggaaaaccacaggtattatgatgtgtggcacatcacaggttttatggtctgaatgtttcataaaactccgcaatttttgaaatcttgataaatttcaacatatcttaaacaaaattttggaagtagtaaaaaattaaactatcgatcttaatcaagaaattaataattaaaattttcatttgcactctatgttttaaaattttaagtaaattcgcgctcaaaatgcataaaggtggggttttgtgaaattttaaaaccataatacctagattaggtgtcacatttcataatacatgtaatttttctttaattttgaccataaaaaaattaggttttatgaaatttacttaaaaattaatgtaagtattcaaaatcaagctagtacgtaccatccaatataataccaagtacaccagatccagtaccaacggctacgaccagatgtccctttgaaggtacgctcgtcgctggctcactgcacatcgtaggctgtcttgctgtagctgggcagttgtacagcggacaaaaacgtactctcctctttcttccattcacagaaagattgaatgaatgaacacagtggtccttccatagccacagacagtacgtctgaagaaaacaagacagtcaatgagggcacactgggtagttgctggagtaaaattcatcagttcttggacccagctctgattcacaaaagcctccatgagaactggtagtacacagagctgcagaagcatccaccactgttctggaatcttggatgatcaggtccctggccacataaccaccaatgctatctcaaattccactgtgtggcttaaatggcttgctgggagaggctgttaccatcaatgaacgccggccctgctcaaccacatcgagtgagtacttcatgattagtgtcttctcaggctgtctgctaggtgctagctccctagagctcactgacatcaacatcgatcaagcctccccccctaactcgtgcatttgtgaaggaggttaggatgcagccatcagctctgagtagacggtccatttcattgggggaggggggggatcggagtcaccacctcctaactgagttgcttcattcagtgatggacaacctagctgagaggacaatggggaaatcagttttctgacgaatcacaaattgcatcctgaacatctcacttaaacattattgcaagctgcaatgcagacagatacaggtaatatttgcaccctctgggctgtcctgtgccgtgctgtggatgtatttcgaccacagcttctcctgattgttgtctacaaaataagcacagagaagagagcattcaacagcaatgtggttttaaataacatggcatcaaactattaaaaatttgtagtcatatgatcacaagagggatgcaagacacaacttcagtttaatgagttcggtttcatattttctgctcctatgttccagtgaagtacttagaatcatcaggcaagaaaattgaccagcgtcctttgtcccttttaataactatgttttaggcgaaattccgaactaaaaacgaaaaagataatcccttctttctgacgcacttttcgtaaagatttgaactgtaatacagcttgatgaggacattcaaaccaacattacagtaacaggtaatgaacaagatacacaagtaaagccaagccaaacaccatttacaagaaattcaagtccgattacgcgcagtcaggcaaagaagctacaacaacagatttacgcgctactttctgagatgcatttccatattgatgagaataatatactacctaagtcatctacacttctcttactcaggtttacgtgcgaggatcctccaaagggagtggtttacgagaagaacaaggttaccacaagctaatggaagcctctgcttccaagaataactcagctcagcctgcttcgaatgaccaagcatgaaacatatggatggaaagcctatcaagtttacttttatatgcaacaaacgaattgtcatttggacttctaaggagggagttatggccattctactgaaaacagtccagcaatcaaagagccgcgcgagaagctgaagaaacctctcgatataccactataatttgcccatttacctcccaacgtgatgagttgtgttaacactctgttgggagggttgttaccactataaatacttccttatagctaccatttcagcactttttgatcactggataaaccaatacattatattgcagctgagttgccgagtgacttactcctatattcttgtgagttcatcctgggcttgcaagaggtccctcctggatcccctaatttgtgcttttggcttccgggtctcttgtgtggattagtttcggtttgtggttctgtggtcgtttggagattaggtcggagttcaggaggcttcggatcgtccctccccatcacttggtcgcaaccaaccttaacaggtataaagctagttacccctgctgttcacggccaattacctgtcaatcgtcaacctactatcgtgaagatcgggccatcctagcatgttcgcaccacagctggtcctttgtatccatcgtcttctgaaggcttctgcttgtgccctgtgtacgtttgggggcaagttgctgacaaaaaccaaagttttcgggttccagttgtatgaatgatctggtaggttctcatggtcccctacaaatttcaagctatttaattgcatagaagaggttgagatctaccctcacataaactgagaattgtatgcactacactcagaatcttaacaggtacagtaactgtctgttacatgaaaagaaaatccaacattattaaataattctcaccaattcccttgaaagaccacaaacctcactaaactgctggggtcattcttagtctgctcacacttttcagaaaaacacatgaacaccatcgtggttgcaaaggacgaaagaacaaaacagaggatgttatgtattatagatagctgttatactccagattgttactattatagtttagttctcttcttgctggcaccaaacaattttggtagttgatgtcatggccataaatgcaagctcctctctttatgaacaccgtttcaaaggttatttggatgtctaatgacatttttttaatacacggtactttcaagttcatatcaataagttcaacaaatacggtccatccatatctatcatctttacctctgacaaattatctatcatctttacctctgacaaatacggtcctaagcttctaaacggtgcgatttttataaaagttttctagaaataagtttcttccaataatttttaaaacaacttttacaactttgtaatagataatttattcgtttgtacccccaaaatattatcacaaaatcagataatccatcatccactcagaactaaagaacaaagaacagggccaacaatgccttcatctagggtgttgacagtgttgtcatctgcgcacttaaaaattatagcgttttgtgatctgcaaacttcaaagttacaacgtgttgtgatctacgaactacaaacttataaccaactgactgactatgcaatattaccattatagtatgataatgacaacacatatgcttccggaaatattgacaatgcaatggtagtacagtaccattttctgtactatggactagagaacctagctttactagatcccagattagtttcgaacaccttttcttgtaacacatgacttaaccgatgtttatctttactagcatggaaaagggaggttaagatctgtacctttctcccgagtctctctcctgcccagacagtcattttatcagcctgaacattgtcttcctttgtaacaatctctctgattttatttgttgaaagcaacatcaatttgaggatagcgaaggtagagcaatatctcagtataaactgctgagcaacaatgctgaaaacccctgttccgccaaaatctaatttggtctaatgatgaaaacagctgatgacagcaataattgtctccagaagccctaatattagatagtgatagtaatgtggaggcgtggagctcaataactgagcgaaaagttttaacaaaattctatgcatgctcaaactttagtctcatgagtccattaagcacaagttaggacctaataaaacaatttcggttcgtcttaatagaacatgtctttttcatttttttgcacctgtcacagtcaatcaaccaagactactttcactgtattttaaactattttcacttgagtcatgagctggatctgaaatgcttatcatataacctgttttcccatgatgtttcattataaaatgtacatataaatttgttaggtccctaggaaaccgtttatgagtagtagagtataagctttctaaggcacatcttcagtgtatattctattgggattctgactaccattgcactataaatctataatataaataacaaaaatgttgcctccggcactaatgcagtccactttcatgcttttgaggacccatcctctttaacaagttttcaagcattctgaacataacgaatagaagtgcagacattaaggctttggacctttcgtactgaattggttatgcagtcaatttgaatatgatgcaaatacagaagggaagtaaataccttggctttaaactgctactccctccggtttcattttaattgacgctttggacaatgacatgctctacaagatatacctttgaccttatttttctattataatatatacaataaataaatgcatgtttacttttattatagtgttttcaaagacaaatctatatatgtttttctagtttctttaaactaaatatttttaaagttattgatggtcaaagttataaaagtttaacctcaaccttgtcgaaaacgtcaattattatagaaccagagggaagtaacccatatgggcacaaaaatagaaacattaattagagttcaaatgagagtaagaaatgacagataggcatagcatgtccttcttactattgttacatgtaatcaaggggtgatgggcatattcacagtggtttagctgtagttagttggctgatgagtccataaatctaagtagtactcgaagtttgctgcctctgcattgaatagcacttaatggtatgggtgagctctcttgaatgcatgcacacagtggcactcccaatctcacagtgctgcatctgtctacataaacgattggaatgcatttgggcaagactgtgaggcagaacagaaatcagagaactgaggacagaaggcaagtaggaagaatctgagctgtctgaatggaagggaaaaacaactagggggagaaaaggaaaggattatccaagctttcgtgtatcatccgagtgtcccttgtatgcaatgggtttgatcaatagaggggtcttcttcaagatcttggccttcctctgcttcatcagatcatctcaaggtacattcaatctatttcagttcatatgttccttaagcgtcagcatgaatcattttccttcgacttcctttccactaaaacgaattcagtaggattttatgatggtcaaaggctggtttctcagagatgctggaatttgatcactcaaatttcaataagctgcttctatcaaccatagctttcatcatgacattttcatatttttatagcaaaaatggagttcagaattttggctgacactcagaatcataaccatgccatttgcaaccaactcctgtttatattactctctgatttcactatttttcgttggccagaaatcttaggtatagagcgatgcaataagaaatttgcaggaagaggagagggcgaaaaagacataccttataatctcggcctgtagtgaatattcagaagaaacctgatgaatggcaatgcagcatttagcttaaaccgattgagattttcttatgtataaagatataaaaggaagtgataaaaaccgtacctgaaactgggtagcttcagataaaacatgaatacttgtatttgcaggaagaaatcattttaccacattggatctccctcccctactgaaggcaagcagtttctccagaatacagcatgaggcatatgactacatcattgttggaggtggcacagctggatgcccattggcagcaacgttgtcccagaagtacaaggtgctcttgctggaaagaggagggtctccttacggcaaccggaacatctcacatcttgagaacttccacatttgcttggcagatgactcgccaaattcaccatctcagggatttatctccactgatggtgtcatcaatgcccgggcaaaggttctaggtggtggaactagtgtcaatgctggtttctacagccgagctgacccaaggtaaagaatttatcatgtatatagcattctacacatggcctgtctatctgttcaaatttatttttcacttatctctatgaacttaaccattgtcgaagaagtagcttccatagcgtgcataataacctcagatgaaaaatcagctgacaacttaaggcaaaaaacagggataattctgaaatatttataagaagcttagccaatttatggtgtctttgcatgtcgcgttctctaaccagcattttatacttgtgtcttaagcaattaacataagcttccactctgaaggtctacagatagccaatcaaagaagcctaagttgtaccggagtcactctaactattaggcagtgtattggctacttctccatgttcatgaacttactagtccaaccaagctatctcagtttccatttatacccatcaaagtacaaaaatactaccttgaagacagtcataatgggcagaccaaaaggcaaatcagggaacctacccataacaaattccaacatgtaccacaacagatcccataactgtacctcactgggggaattattatagaccttatgccttttggttgagttgtgaactcaggacaagatcttgaatcaaattggagatactccagtataaggatcgcaatgttggattgagttatagaattgaatatcctatcagattctacaaacaatacattgttccaaatttgcatgcttttcaacaaggatattttcgaattgtacttcagaaggttttagttttgccccagatgtacaaataatagccgatcccatgtataaaaggtgaagccttgcaagttgcaacttaaaggtcagctgcaagtaactattgtttttctagggaagtgaatacttattttcaattactaggattggtataattgtgaccatgatccaaaataatctgctagaagcccatgaataatatgattatatcaaattaagatccttcctatgttcaaatcagttcaataactgtagggcataagacctgaattgagattacaaacaattggttaggaatggcttggcacaattcattaatatatgccccttttttgaaattttaataaagtaagaatgtaattgttaaggtaattgctgaaatcccaactataaggttagcataagatgtgctttgcgcatagcgtgagcggctctaatggactgatattctcatgtcaatattacttttagtgatacagtaatgctaataatatattaagaatagaaaaaagggttcactgatgaatgtgcttgtcctgtagctttgttcaagacgcaggctgggatgcagagttggtaaaccaatcatacccttggatcgaagagaggattgtttattggcccaatattacaccgtggcaagctgcactgcgggacgggctgcttgaagcaggggtctcaccttacaatggatacagctatgatcatctctttggaacaaaggtcgggggaacaatctttgatgaggctgggtacaggcacactgctgctgacctccttgctgctggaaatcataacaacctcagggttctccttcatgctagtgtgaccagaataattttcaacacagaacaaggtaagaattaatccaaggcaggcctagctcttataatccctatccactttaacagcagacgcgatagtaacatcatctcttgcacagagcacaggaagccaaggaccattggtgttgaattcaaggatgagaatggggggcagcagcatgccttccttacccgaaacagagacagcgagattatcatctctgctggtgcaattggcagtccccagctattgttgcttagtggaattggacccagaaaggaacttaaaaagcataacatttctgtagtccttcgcaacgaacatgtgggtaaagggatgtcagataatccaatgaattccatctttatacctaccaaggatgcccctaagcaatcactgattcagactgttggaataaccgacggcggggcgttcatagaagccagcagtggtttcagccagtcaccagatagtatccagtgccaccatggaatcatgtccgctgaggtttggcatcaatttcaaagactttacttgcataaaattttgaattctttataagcatcatggggtgttggtgtatatcatacaaaagcttgtgtagttgtgtacataaacaacatccacatcagcactctcagaaaacaacacacgctaaattagcttgtcaaaagccatctttagtttttggtaagcaacttcattaagcttatcttcaggagcccaggattaagatatcagaggaacccagaatctaccaacatgtacacagaaattcatctcaatggttttaaactagagtaaattaaggttttaaagcagagtttcttctgggattatttatggacaaaaaattgtaataataagaaacttctttgaatttgtaaaagccaaaaagaaaaaaacgttaagcttatttacttttgagaagcatgctaactttcaagcttatcatccctcatgaattttgtcactgcaatgtagattgggcagctgtcaacgattcccccaaagcaaagaaatctagatgcagtcaagaagtatgtacataaaaaatataacctacccaaagaagtattcagtgggggttttatactttcgaagattgatggtccattgtctactggtaatctagttcttgtggatactgacatcaatagcaaccccacggttaccttcaactacttccagcacccaaaggatctcagtcggtgtgtctatgggatcaagaccatagagagaatactgaagacaaaccatttcactaattttaccctcaatggtggtggatatccaatggaagtggtgctcaacatgagtgtaacagcaaacataaacttgatacccaagcacacaaatgacagcacatccatggagcagttttgcagagacacagtggtcaccatctggcattaccatggcggatgccatgtgggcaaggtggttgaccaacaataccgtgtgattggtgtctcaggccttcgtgtgatcgatgggtcgaccttatttaggtcaccaggaaccaacccgcaagccacagtcatgatgatgggcaggtaaaggcaaaaacaaactatagtactctcctttaatctacaaaattaaatttcaagggttgatctttcttttgtcatattgtctttcatggtcagatacatgggagtgaagattctaagaagaagattaggacgagctgctggagtataactgattcttggaccttattgattatgtaagaatgtgacttaggaaaagaaaagtatatagtaatttttgaagcaattcaatatcatatcaccacagaaagaaaattaggagttttcgtttgtgttctagatgtggaaatctatggcatgtaatatcatctattgacaccattgtttctgcattatgaacaagtaaattatattacattgtaattacatgaactgcaaagttctactacctctgtttcacaatgtaagtcattctagcatttcccacattcatattgatgctaatgaatctaaatagatatataatgttacattcat

SEQ ID NO: 9229 - DNA, 15862 bp, Oryza sativa
aaaccagtcacacttaaatagagccacctttagatcacgtatcactgacatattccaactctattatctcctggatagtgccatagtagtcaggcccttggttatcaaaccaatttgctgacacacaaactccactatttgtcgttgtcctcgttaatttcttttgttcatatggttgtgtacgaaaacgaaacccctgaacatcacatcccttataacacttaaccatgtatcggggcccaatggaaagagcccttacttgttcttcaactgtttcatcttttccagcctgtagaatcaattttcatgaatcatgcattaaaataaataataatccatcagatattacatcatgtattcttaccaactcacgaagccaggttggaaaatctttctcatgcatctcttgtaattgagttgtagtgatgttcctgttttgttgtttcatctccctatcaaatttcctgacatttattgcaataacataaatgtaatatgtcatattcacaaaaatagagcccaagtaataaaataggaaaacagaataatatatacttacaagacatatttgtcaacttctgcacaattgagtaatgcatataccctagcagcctgccattcttctcttgataagttacgtgatgtgctctttccaagagtgcgatatgggatagagaatatagacagccagtcagtaggtgctctgaaaccaccatcatcatgtctagggacgcgagtgtgctttgttcgcacatgatcagcaaagtacatagaaataaaattagagacctcctgtaccctatacccctctacaattgaaccttcgacacgtgctttgtttcgaaccctcttgcgagcctcatgtaactccctatgaattgagcagaaaacataattatgaaattaatatacaaattcacactttagtacttaaccaaagaaacatacctttcaaatacatacatccagcggtaagctacaggccctccaattaaagcttcataagctagatgcaccaccaagtgttccatacaatcaaaaaatccaggaggaaaaatttgttcaagtttacacacaatgactggcacttccttttgtaggtgcttcatttgttctatatccacctcttttgcacatagttgcctaaagaagtagctcagttctgctaaacacttccagatgtgcttggggaggaaatcacgaaatgccacaggtagcaacctttccatgaagacatggcaatcatgactcttcattcctatgatcttgcctcgattaatatcaacaccccgtgctaaatttgatgcataaccatcagggaatttaagattcttaacccattgcagtaccaatttcttctgtgccttatctagactataacaagcttttggtttcacccatcgacctatagatttttgttgcatatgaagttctttgtgattgcatatattggctaatcaaatcgagccttgacattatctttagtcctctttgggatatccatcaaagtattccatatattgtcaaacacattcttttcaatgtgcatcacatcaaggttgtgccgtactaacaactcacgccagtaaggcaactctcaaaagatagatctttttacccaattatgctcctttccaaaaccctcaatctcttgatttcctgccttggtaccaaatgtaatttagggagagatttaacacaatcatacacttctgaagatgatcgatgaataggtgggccatctttctcctccttattctggatgaacttgtcttttgcacgtctaaaagggtgtccctttggtaggaaacgcctatgacaatcaaaccaacatggcttgcctccaacttttagccaaaatgactttgtgtcttccatgcaaattggacaagctaatttcccgtgtgtgctccagccgcacaacatcccatatgcaggaaagtcacttactgtccccataagggcagctcgcatgacaaagttctggttttttgagcaatcatatgtcacaactccttctgtccaaagttgcaaaagttcatcaattagtggatggaagaatacatctatgttctttccagggtgcgtaggccctggtataaccatggtaaggaaaatattatgtgccttcatgcataatgctgggggcaagttatatgggacaacaaaaacaggccaacaggagtaaggggttgcagtttgattaaatggcgtgaatccatcagttgacaaccctaaacgcacatttcgaggctcctttgcaaaattagggtactttgaatcaatatgtttccatgcttcactctctgctgggtgagttaactttttctttctgctttcattgttgcacctctctgattcaagcccatccttgtggtatgtcatgtgtgttgcagtgcctcgtgacatgtagagcctctgtaggcgtggaatgattgggaggtagcgaagcaccttctgtggagtgcccttcttattctcagggagttctaacccttcaatataacgaggcccattacatgttatacatttccttttgttagcatgctccttatagtataacatgcaatcattcttacaaacatcaatcttttggacaggcatacctaaagcttcgacgactttcttgcatttgtaaaaactacatggcaaatttgcatctggaggcaacatttctttcataaccttgaccagctcatcaaagcaagctacagacatattatggtctgattttattgtcaacaaccgagagactgcagataattgagagtgttttccacacttctcccacaatggcttgtctgctgcatctaacatatcaaaaaatgaagctgcttcaacatttggaggctcttcaatattttgacaaaaattaggccctacggcatccaacaccatctcatctatatgatctgactctccataggcattacctccttcattcatctcattgtcaatactgccttctggtgtctcactggtatcagctccactttcaccatgtctactccacacatggtaattttcagtaaatcctttattgcaaaggtgcatttgaactattcttttgtcatgcagctgtccattcttgcacttcgtacaagggcatctaacccttttctctgcctgaccttgtaactttgatacagcgtgtgacataaacctcttaactcctttcaaatactcatctgaaatgtatccattcactacccttttatacatccaactacggtcctcagccattaatctcacactaaacaagctattctgacatgcaaataatggctagccctacacttgaaattatatggtaaggatgcatattttgaaagattatgtaaaggaagtttatcaaaataagaagaggaaatattagatgtagactaataggaaatcttcttttaaatacaaaaaataattgctcccagataaatcattattagtgataacttgaacatattaagtagtacatatttctctataacttgtttactctgtctacacttcaatacaccaaaagaataaacaacatgtgtcttagcttgtttaatttactgaatttttgcacacatgccaatggtttgctatcagattgcacaattattaacactcaaattccatcgtactttcaggagacctgaattttctaaccacttaaagcaatcctgagattgcacaattattaacattcaaattccaccgtactttcaggagacctgaattttctaaccacttaaagcaatcctgagatcagtaccaatcataaattaaactatgttaataattcctacctgtatattctaatccgaagaactgatgatagaatatatatctactagagatactcgtaatttttgggcaataaaaatatctagtagcgagcaactaaagaattagaaacacaaccatcgtcaggaacttgagtcatacatgtgcaagttagagagcaaattttagtgtgtattacttaaaccataaacaaattaatccaatatccaacatcctggagcaaggagagtagaagaaaccaaaaggatgatgaacattctttcaaaatcattagttgagatgctcctgggatacaatcacaaaagatgaaaatcacaggacatgacaaaattctcacaggggaattccatcgagcagctggtagacacacattaatcaagatgttacctgaggaggaaggatcggggcacggcagagcggcacactccgacgaggtaggagtgctgggcctaggtgtcaggcaccgggctacaggaggtgccgcacctgaaggctcggagtgcgacgggggtgccgacctgcgtcgaggcaagcacgcggcaggggattgttagcgatcatgcgaggaagaaaacaaatgaagaaaattgggtgctacaaactcacggaggggcaaataaatttctccaatcagatgaggaaatcacaattagaccggcaaacatggggagtgggagagatgggataatgggggtcgatgattttggggggaatgccagaaaatcgcaggaaggaaaaagatggattgggacttgggggtttttttcgtgagagctagagagcccttctttttcttttttttttgagttgacggggtttttctagagggctggcaggtttttttttttaagtacgggaaaacttcctttttttcagggagtgggatgtggctgggtcaaaacaaactccagatattccctcattaaaaaactaactcaggataaaatattgcatcaaaaatttatacatggtaatattatttataaaatatatgaaatctcgtgttttctattatacaaaaattatgtaattattttcaaagttacatgaccataagagtaaaatataccatctttaaatatagattttgcatcctttatttctagataatcaatctagaatttttttatttttttcaatttttataacgatcgttgctaagggagtagagccaccagtaatgacataagtgtggtaggcgtgtacaataataccttcgactaagtggcggtcatggagcttgacgacgaagatagaacagtggcaatgctactcaacctgtcaaccatggagacagtgtatataagacctcggcaacgacaacagtggtaatgtattgattagagggttggcgtgatggcgacaacaagtagtagctactagagtgttaggtagtagtgacaagcatgctagcatgggaaaatatccctctagagtagaggtgccaatgtactgataaatttttatacggcagatacaacggtgggagccttctctcgtttgcatgacacttgttagatatggctaaaaaaatatatcatggcgttacaccattttattaatgtaatatttaaataaaacctatactaaaatataaccttagatgtgactcggtatctctactattaaaatattcgtgttattaaaagatcatgataattaatttatgtttttctattaatggaagacaaacagttatgcatgtcacacgcacatgccctgtttttatcatttgcaggcccttccgaatagttcatttatattttttttatagtactggtaatgaggtcgcgtggtcgacattttatattaacacgtttcatacaatttttatcggttagctatactttaattagcaaactaaaacttagtaaatgtaaaagaagtttttgacagtacaggcacaatttcatttgcaattctttaattttgttttttatttagctatttatagatttttttttacagaaatcaattaaatatatttttatttttagataatgtttaatctatttataaataaaaacaagctcacaagatccatgcatggctagcgtaatactagcaattaactaactgtacaatttatattatgtaatttatattacaaagggatgctttatttcatacaatcccaaggaccatcgcctatgccttggggatgacgatattctacaagggtacgttcatgacccttgcaaataaacattattagcaaggaactagagtgatggtagcagataaggatcttctgcaaggctatactattgcaaggggaaatactcttgacaataattacatttcttgtagtgatataattagtgtgcttgtgcaggtgaatgcgcaatgtgcttcttttccaatgccactcattctcaaactaaaacacaatgacatgttttgtgttatgtaaatgttacaaaaccataaaaaaagattacaaagaggtaacatgtattgtttcggtttgactggacagatagaggaagcttattgatcaatgtaaatttatgttagtgagcaaagggagacaagcgtatcaaaacatggtaggtagtagtaataagtaattgtttgataggaatttgacaatgctaaggtttgtccaataaaacagtactaaaagtaaccctaagcctacctcatgcctagctaccagcaaaagatacacactgatagagcgggtcatcaatttaacactaggataaagccaccgctttttacccaaaaaatagtatgaatgctaatatatatacagatgatcaggctcagggtcattcattcgtggtcgactggaatttttactgtgcggttacaacattttcactgtcattctgtgcggttacaataatttcattattaatttgtgtggctataacattttcattgtcgatctgtgtatttatacaaatatcaacgaagcgaattatcgaaacaaatcctttgagaagtcaaacactcttatagcttaggtttattgtgggttggggggaggtaaatactgcctggaggatagtcggacgacgacagctgctacagatgagagagggactaaggatcacgggagactaattctgatttatttcttaactagaataatatcgatacaatccatcattagatagatggagggaagaacccaatctcatcagcactggtttgacaaaaaccaacattgatgagggtttcccaccgtaactctcgagatcgttcatgcacagtatataccaggcacagatgggaccacatcagtgccaggccttggttacaaccggcactgaaaagttgccgacccatctgtgcttggtaaggccctaacatctacactgataagtggctcatcgcgccccctccaacatacataaattggtttcggtgggaaaatgtaaaacatagacaagcagtaataaacttggagtgaaaatatttactgatgcatgaaaaacaatggccggccatctccttgtttagtttcctttgcgtttggatagttgtgaacctccttttaactttcttaaattaattaccgacaagcacctaccttgtgtcagtgtattgatactttctctgtcttcccctgccctatttatatgcttcctgatggctttgtttttctttctttttttctactattcatgatctcgatgtcatctactatatccatcgaaggaaaaaccatgcaaccctgatacattctcctctacccatctctctctatgccaaatgaaacaactgacatttttgttgttccagaatatgttcacacatactgcaccaaacaggacatgttactagatcgagttcctccattcgggaatgggtggcattggaaaagaagcatatcgaacgtcccagctctactgtatattaatcaggtcattgacgaggccagcatccaacgaccgggggcagtgtgccagagaactgggttgatcgctgtcaagttggtgttggtgtacggtatctagctgtcagtaaccttctgctaccagagctgatggtgggaacaactggaagcagaatagaccaatgtccctcagtgattgccagatggttatagaacatttggcagaatccattaggaccctgcgtaatctaattttaagcgaaatcatgatttttcgtgttaattttgattgttcgtcttatttgaagtattttttaattagttttattgttatttttttgattagtacttttattgttatttttcttgttactagaagatatagtactttatacatgacttatgtgttctaatttttttcaaaaaaaattcaaataacatcgacgattaaagttggatacggaaactcatgattgcgtttaaaatgggacagagggagtacttacatttgtcacgtcacttatgaaaaggttttactccctccgtcacaaaatataaaaacctagcatcgggtgggacattttctagttgtctagattcgaagtactagaaaatgttctatccggtactaggtacttatatttttgggacggaggaactatgtaattattggtagtagagagtgaagggatagaattatgtactacctccgttccaaaatgtagcaacctagtaataaactaagagcgtcataaaacaatgtcacattattatttctgctgtcataattaattaccattacaaaggtagccttaatgaaatatggatgtcatagtgaagatagccttattcttttgtggccaaactagcacaccactgaaagttacttaaagtcgagctatttactactggcaagaccatattcttcaagaataactagacatgacaagatgtttaatttctgaaaaattttcgtgtgccagttattagcgtggctcctgtgggcaccccacgtatagcttcattcgtcacgccaaaaacatcatacagaactcgcttaaaaacaccaatggagttagctgaactccaccgattacacgtagctcaacgctagtcgtatgctaaatcagacagcaagatcggctactgcctgctgcatggtgcaaaccagaatgcctgcctagctcgggcatgggcctcatcacctccatatagatcaaatggtagatggccggctagtgtgagcccagggcattgccctactgtgctggttcacttgggtgctggccttatcgattgcttggcaaatgttcatgattgactggttactcgatgtgtttttttcccaatgacaccaattcccaaatgaaccaaacactgctgcaaaaataaaagtaccaacagaagtgtttgttatcctagaacgcaatggatgaatagtagatgagagagagcatatatagaaaagaaaaaaaagctacccaagcatatatgctctaaatagaagaggggagggaaaacaagaagttgtcaatacaactagcctatgatgatgtgcatttgcgtgactactctacacacatgacacatccgggttatgtgatatgtgagagtaccaatacgtatctcttaggtttcttgttgctagtaaaaatttgggtcaggatgagtgatagtatgaccttgatacaataaatggctacatttgttacaatgtattaccttttatcgcccacttatttttattgatgcacatcctttatggctcatggtcacatattttataggtttttaaaaaatattttaatttgtgtgaaagtcgttcaacctttattaagtgaccatgaccttttcattggaaggaatgtgcatgtctgtgtagcaatgttttttctcaaatacattaacaattaaatgctacaaacaaaattaatcacatgaatatacattttgattatgtcctggatatctcaatcttaactaatgaatctttagttaaaggatgaggtttttttcttcctttctttctttccactcctagtagcttcatctctggaagtctcttgaatgtgttcttaattttaccttctatctaatccaacggtccaagattcattcactctcttttatcttgtagtaaatccaacagctaatatttgctaaatgatgtgggagcgtgatgtaggagagcatgctttggcaattaagcaacaaacatttcaaatcatatgtcgaatgccatatacattggtacgttacgttttttaattagatggtgagtgttgtaatctacgttacccagatacggggatatggacacggatacatgatacggtgatacagggcatacaacattttccaaaataatagtacgtaatgcatggcagtaagcgtgtgccatgtgctacaaatttttttaggcagttttgcacttttgccaactctcatctgaattctttgaggctcaggcaacaaaatgaaggctagtgagtactgacacctacataccaaaccccacctctgtccaaggtcttgggccttctacccctgctcctagctgcctagataaataagagctggttcaagattggctagccgtaagcccgagggtccaacccactgccgtcaatgacgtcatacattaaaatatggaggtagtacttaatttcttcaaagatagttcagacagatatatgtagggtatatagaggaaactaaacaaggggatagcattttgttttttcctgccttgatgagtgattcaattttgagtgttattatgagttagctaactccaaaagttggcatgcaattttgactagtattccaaaagtttcttttcttttcactcatctgtggagccttcatgcatcctttagttttgtttcatttctaattctccagtggggtccctcgccaagttcttctatcttgccaaaaattacatacggagttgcagtggtaactagcttgttggtacggcaagtctaagataaaagagatgccctgaaaggaaggcatgtctagtgacgggatgcagtgtatcctggcctgcttgcctgggcagaaacattggcctcacagcccacactaatctacctgagaggtaataaaatgcagtggtgtgtttctctcccaatgccacctactctcaaatactaaggtggtgtttggattcagggacttaactttagtccctatatttagacactaatttagagtattaaatatagactacttacaaaattaattacataaatgaaagctaatttgtgagacaaattttttaagcctaattaatctataattagagaatgtttactgtagcatcacataggctaatcatggattaattaggctcgatagattcgtctcgcgaattagtctaagattatggatgggttttattaatagtctatgtttaatatttataattagtgttcaaacattcgatgtgatagggacttaaaagttttagtcccatctaaacagggtctaactcatatgtaccaaatgtgcaactgtagtacgtgtgaaaactatggaggtacttcgttgctgtaccagatctttcattggtacctaatgaaatggaggtcgccattggaggttgctactttgagcttaagtttgaggtggaacaggctactcaagacaacaatgtggctacagactaacgtgaaattggatgatgatggctttatagatggccaaacgggccgtccggccctacatggcccatgtatggcccaataaggctcgggttgtgtcgggtcggcccgaaggtacgacagcccatggtacttcttcatagaataagtctattttcggggctgtgtcttatatgactagaacaagtttattttgtatatctcttctctttggaccttgccttatatggctgcttaagtatattttggatccctttactatttttcttcaaccgtgccgtgccgggctagcccaccgtgctaaggcatcaacctaggcacggctgtcaagccgtgccgtgcttgggctgcgccgtcgggccttgggccttatggccatttatagatggctttaaccaagatgggaaagttgatgtgcagcactgagagttttaaagataaaaaaaacacacgaatatgttgattctcgaggggacatcacctgcttgtttgcacatcatctaaataattatcaagaaatttgtagaaaatattaacaagatagattaatatctgataaatcactccaaatacatgcaaggtcaaatttaatttctacaaattgccaaaaaaataaatttgactatgaatatacctcaactagacagtatttttttgcaacttttggaagttgatcaattttcacttttatgtttatgttgagttctatcttgttgatatataaccatttggataatatgcaaataatgagggaatgttccctcgagagttgcgaatccgctctcaaaaaagacagtgagacaaccttgacatcatctctacacaatggcaaacagggacttatgaccggagatgatgcaccaatagtgcaaactaatatggaattagaagaaaaggttcttcgtagcttggcaaatgacatcttggacatggtagttgaaatgttaccacaacaacaacatgataacctctcggtccatctcgctatggtggaacagatgcagcagtggaggaggagacgacggaagaaacagaagccgccgccggaggtgtcctgcagcagcacggtgaggaagctggggtcggattgccgggtcgtgcccatcgtcgcctctagctccgggcacggccggtagtagttcgccgccccgcccagcccgtccttgcacccggcgtcgaggccgaggtaccccgcggggagacccagcgcctccgacagcagctcgaacagccattccccgagccgccgcggcgtactcctcagccacgcccctgcacggcggcgggatctcctccggcgaaggcccctccggcgccatctccatgaacagcgtgtcgcgccagttggccgccggcggccggaacaggtcgtagttggagctgaaccgaaccttgctgccgacgtccctggtgtagtatggcgcctttgcctccaggggctcctcgtggaagtaccgcaccgctgcgagcatcgcatccgtgagctccttggcgacgtcgtggttgaccacctggaagaagccgaccgtctcggtggccaccctgacctcggcaaccaccctgccacggtcgacatccgccttagcgaggtcgatgagcgggatggccgccgccgatggcgcggcgatggggaggcactactacagaaaagcatttcagtgccggttgggagaccccctattgtgtcggttttcccaaccggcactatgttagcggcactaattagggagccagcaccaatcccattttaaaaaccggcacctttgagacttctgcgagccaaaaaaaacaaaagaagctcgagcatcgaactgttccccatcacccctagacccgtcaccccgagaccatcgatccgaaacaaaatcacactgtcaccatcgattcatccaagcatatccctcgaagcaaatcacagaagtttcacacaaatcacagatgaaggaatcacaaatcaatccatccaacacatatccctcaacaatttcatagaaagaatcaccattgccgctacgtcgccggatccgtcgcgggagtcgccgctaccactgctccgcccgccgacaactgacgccggatgtggctctgcccgccgtcaccaccccagccgccgtcgaggccggatccgtcgtggggccgccatcgctccacccgtcgacaccgaccccggccgctgacgccgccaccactgctctgcccgccgtcgccacccaggccgccgccgaggccggatccatcgtggggccgccaccgctccggccgccgacgccgaccccggtcaccaccgccaccactccgcccgccgacgccgaccccggtcaccaccaccaccgccaccgctccgtccgccatcgccaccccggccgctgccgaggccgcctcgcccaccgccgcatccgccgcgggagaagctgccgacgacgacgccatatgcggggaggaggaggggaaactgagagagagagagagaggcgagagagagatcgagaagccactagctcgtccttatccttatctcgtcctgtggggcccgccggtcggctcgatttgggtgccggtctttttaaaaaatccagcacaaaatgtaataggtgtcagtttttatttggaaccgacacctattattgcttaaaggtgccggctttttgcgatttcaacccacggaggtgggaaaaggcctataggtgtctgttttagcactaccggcacctatagtggcgacacatatttgatgttttgtagtagtgagggggtcgggctggtggtggaagaagtcggggacggtggtgacgccagcatcgacgagtctcttgacgccggccttggtgtcgtcgaaggcctggaggtcgcggaggcggtcgctgctgccggtgatggtggccatagctaagcctgcagaaacaaggcttggaacgacggtaagttggtgtctgagagctccaacacttgtatatccctcaatgaccagaaaaccattccgtttaaaaaaaaataggggctttctacatatctagtgacagaaaatcccacctcctaatattcaaattttggaccattgaatatgcttcaagattcatgcagacccctttaaccctaactcctctcctcctcccgcgttcagatcacaccgccaccactcctcccgtcctcgcgcgatcccccgccaccaccgccctaccgcccacctctccaacggctccccgctaacggatctggaaccaccacctgtgacctcctaaccacacgcttgctttgcccctaccgccgacgccggctcaccaccctcctccatccctgcggcttcggcggcggcgccgccgcctcgccacctgccaaagtccaccgcccactgccggtcctccgtcgtccacggtcatccctctaagccccgaggaaacccccctcttccccttccccaacccccctcctaccttgaccccaaccccaaaccctaacccgtatgctccctgccggagttggagtgtcaccggcactggagaagaaggagagccctccagagttggaggagagaagccggtggcacgaatcttggcatggatccaatggtccaaaatctgtaagatttcatccctaaatttcattcgaatgacagatagcaatcccgaaaataataatcacaaacatagcatttttctttattctatatccgtaactgttttcaaagtgctgcatgtattttttaatatttagtcacagtttgtggtttacaacatatagttaaatattttctacccttttgataggcacacaatctaccaccgggatacatcgtcgttctcgattttgaacttttaaatggatgttacctcgttgtttatatgtaactcaaataattatgacaaaaattaaaaaaagaaaaagatatattaccatgtgatatatcagtttataaatatgaaagttcaaattcaactcctaaatattgtaacgagataaaacaaattcaactacagctagttaacgtggtgcttagtggcaagacccgacaacgacaataatgtgtcgccgaacagtcagtaccggaatattataagacccgacactaatgtcttatcatcagtaccgggtgaattagcatgtgtataacctgaacttgtttttttttttgtttttggtgtcaagtttattcaaaccggcattgatgagggacacccctcttacgtggtagtagggctgtcaacgagccgagctcaagcgatctcgtctgcctaggctcgagctcgatacaagctcgagccgaacctataaaatattcgagctttaaggcaggcttggtttgaactcgagctcgtttttagacaggctcagttcgagttctaccgaacttgatttttaagtaaaacaatatatatttcaaggataatctttaaaaaaataattaatttcctgatcaatataagaggaaataaaataaaataaatatatgacgtcaatataaggcatacaaataatatatttgatcttctaatttattgaatagcaacaaaaaaacacatattattaggcccgttaaaagctcaacatcagcccgaca

SEQ ID NO: 9230 - DNA, 63470 bp, Oryza sativa
cgcgtgggcgtgggaagagtagggaagccggcggcgcgaaggtcgtcgtcgcggccgagaggagccgtcggcgcgcggaggcgacgtcgcggtcgtcgtcgtcgccgaggagggagccggccagcggcgaaggtggggaaccggcggtgcgcggacgcgggagagaagggagtcggcggcgcgcggacgtggggagaggaggggagccggcgtcgcgaaggtcatcgtcacggccgatgggagccgtcggcgcgcagagccggcgtcgcagtcgtcgtcgtcgccgaggaggaagcccgccggcggcgaggagagggccgtccggcggcggaggtggggagccggcggcgcacggtcgtggtagaggagagattttttctaagtgagagagagagaggggggagggaaatgagtggtggagaggagaggagaggataaggatgactagattttttttggtaggtatgatttttgcaggcggaccacataaggtgcgtaggcgttgcttaagtggtcaggcgccgcttaagtggtccgcagcgaacttcaccccgatttatattttttgtaggcagttattgggctccaagggccatgtccgactgcgaatataagaccccacattagaaaaatgctttttccagtagtgtgagattcccttggcaaaagtagggatttaaagccaacattgaagaagagagagagagagagagaaatcaaacatatgctgtatatatgcacttaattagacctggtactttattcttaatttttttctcaacaaatatattttttagcctcctagctaacaccactaaccctattcccccaaactaaggggaaggatgcttataattttcgagtgaatacccagtcttaaatgtaacaagaagatgtcttggcttttgtgttttcagtacaaagataattcataaaatacctcacagagtgtctctagactgcatgtccaaattttagaatcgattttacaaccacctatagaaatgtgttgtaggatcaaatacaataactaaggcttcgttcgttccgggcgatttgagagagaaaagcatctcgttttccgcgcgcacgcttcccaaactactaaacggtgtgttttttataaaaaaattctataggaaaattgctttaaaaaatcatattaatccatttttgaagtttaaaatagttaataatcaattaatcatgtgctaatggctcacctcgttttgcgtatcttcccaatctccccaatctccttattctcaaacacaccctaagcctagtagagaggtgattgaatggtagaaacactaaaaaccaaaaaaaaaattacggaataaaaggaaccctaaaaccttatgaagatgcatcggtttgaccaaaagtattgatgagaaaactacatcccgatctcccaaaaatattgataattctcaattcggtggaaacttaacacacacgattcgacttccgactaacacgatccgagtcctgcaatcgcagcaccacgtctcatttggttaccaaccatgccgaaacccagttgatcttgccgagaaggctaatccctgcatgcgaatcgaagaacacaagcaagaacaaagtagatagcaactcaattgcatatgaataattaagcactcgactttggggcacaaaaagatctagcggcgaaattgcaatggcagaactaatctaagcaaaaccccactctgaactataacagctactgaataaatatgatttggaatgttctagggttgccctggggtgcatacccccttgggcttaggccaagcccacgacacaattacaagaccaaaaacccaaatcagattcggactgaataagatacatggctcgttttgcagattcctgacaactcggtaggaattttgacgtggaactaaaactatctgaaagtactcacaggtccagagattccttctaaatcagcggcttggtccgtttaaagttgatgctgtcaggaggcccgaatccgaatccaaaacgtgtagtcttgccttctataattcaaaagtgacgtggtgaggtaggagtggacttgaggaagatcttggtttgatccctaatcaacttttttatcatccatgtattctttacgctcagtcgcttttccttcacccaagcaagtacctctacaaacgaaaaacatacggaactcattgtgtagcaatatttcctcatcaggtatgccgccggtctgattgcctgcaagccaccggtctgaccgctctctagccaccattttgatcgcggcttcctcatctactcattgcctattcgctgctgccggtctaagtgctcgttgtactctggtcagaccattaggatccagaaaaacagaaattgatgaaacccttaaaagtagatcaacttaaattgcatgaatatgtatttacaaagtggatctaaaacactactctctcaactctcaatctagaattgaagcttaaagtagatcctaacttttctctctcgaaaagttcgtatacttctaaccacattccctcttctatttatacccgaatcatggctgctgatagctacagatcctactagaacttgggcttctaatcacataagaaacctaccaaaaaaggaaacaacatcctcatacaattccaaactccattcttaccaaacttttcaatccaattgactacattttccatacgcagacaacaccatgttaatgcagggtttaacttatcgatttgaccgattgtatcagaggtcaccgatagaccaaaatttcaaaaaaattgaaaaaaattagttaaattttaacaaaaattaccaaaattcatgaaaaaattaaaaattttggcctaaataatattgtatcggagtggtccgaaatgaccaaaatttcactccgaaattgccaaccctgcgtgtttgtcatatgcaaacgttcacctccatatgtattgtcctctaggttgaacatcccacatgatatcctttatcatctagatctcatcttctaccaagcctatactacaataaaagagtgctacggagactagctagtccagatctatcaccggctatactcccatagccttaacaacacccacacacgaacaacaatgaaactccatatccgagtaaaagttcttaccaacttaactcacatcctctcttactataaagttagagcccactaaattttaaagcttaacatgcaaagatgccacatcatccacaaacaattattacatttaaatatgatacaagcatattatattatctataattttataatgtattaaattttataatttttcaagtgcaagcatgttaaataatcatctcacataattcacatactatttcaatgtctctcaaacagtttttataatatcttatatacctatatagtttatcctaactcctaacttagttaaaatatgctctctctctctctctctctctatctctaatgtcattaagccatatcacatcaattgttttgtccttaaatgattatctatggtctaaattgtctcccctattttcttcttttattaagtcgtatcacctcaattgttattagcccttatatgatttatccaatctatctcttcattttgttttctcataaagtcacatcaacttacttttacttttgaattatcaacttatgtaagtttatattatctagctatctttaaaattatttttacttagtattataatactaaactctctcagcagcgcgcggggtttcacctagttaacacaataacaatatcacatatgtatagaaaccatttagaagtcataaacatgaagcaatctataacattcaccaaactgactctctccaccgatctaaccgtcgggctgcctggtcagaccgcaataacacttccgatctgaccgactgcacctgcttggtttgaccccggccatgtccagagactattcaccgtatttttataaactcttatcacatgattttacaagtgtctccaaatgtttttttttgtttagttacattacatgattgcgatgtataacatcttgcatgtgctaacttctccgcaaaatacagtggtacgtatacagccatacaggtacgtcaatagtgacgatagatcatcaaatgcatggtttaaattttaaaactgaactcaaccagtcgatgatcgatctctctctcagagacagacagacaggctgtcgtatactgtgctcgcaacagctgcagggaagttgcttctgcgaatagcgcttatatggattatatataaaaactaacaatttaactaatacagaatataccgataaacttctcacattcgtcactcactgtgtatcttcctgatgaagctagattatgagcacatatcgatccaaccaaacgaaccgcctataaattgagcagatcatgctaccccttttgtcacaaacttccaaacatttcctaaacaaaacctgacaaacttccaaaactatacatccaacaacaaaggaaagcatcaaaaagcaagccaccatgactaacctgttcccagatactccggcaacgatctccttccaccctgctcaccggccgggtcacaaactgaagcttgtgcgaaccggcggccagaagttcaagtgcgacggatgcatggagcacggcgacggcccgaggtatcggtgcgagcgcgagacgtgcaacttcgacctgcacacgtgctgcgccctcgcgccggcgaccagagagcaccgcctcttcccgggctgcacgttcgtcctcctcccggagcctccgccgccgaccgccgctggtgaacggaggatctgcgacgcgtgcggcgagggcgtgcatgcgcgcggcctggtgtaccactgctccggccgaggcgacggcggcctcggcctcgacctccacccgacgtgcgcgtccctgccggcgcggttcgccgtcggcggcggccgcgtcttcgagctccggaaggaggcgtcgaggcggtgcgccgagtgcggggagatgaggtgcggcggcggccgcaggttctggttctaccggtcgtactcgtacgccgacggcgacggcgaggcgctgtacctgcacgtcgcgtgcctcaagcgcatgcagacgcagtacggcgccgccgccgacgtccggagcgtgcaggtgatgagctcgccggtgatggagggcgtgctgcggagcctgccgccggccaggaggagggcgacggcggcggacggtggcggtggcttgaccggttcttgacgatcgttgccggtgtcatacgtgccatcatcggggtcatcttcggtgatccgacgttcttgattgaactggcagtaggcgcgatccttaattcctaaggttgaagtatatatatgaaattattggcgaacctaagccatggatatgagttcgctttacaataaagaacatttcagttaatttgaagcagtttgtaaccaaagtcacaatgttacaagttaatgtttggggagtgtgcgagaatatggagagtttttgttgtagtaggtgagtgcaaatctatctattatataataaaaatgaaaaaggctatatgtgctaactttttcttactaaattcttatcaacactgatgtgtcacgctataagtgcatctaaatttttcataacttccaactatctaaatcaaatggttgagatgattcttagtaaagatttagtaaaaaaaacttagtatgtgtagaataaaaattcattgaacttcctgtaaacgcttctaacatatcacgtggcactcctgcgaacactcatatgccatcacgtgtcattacaatcttcactattgaaaagtaaaactcaaaatgagacaagaatgtgcgacaatcatctatgaaataatagccgttggattggttaagaaaaaaaaacatggaatcaatgttaaccgttcgatcgaacttaaatactagccgtaaaaagcagagggttctagacccttcaagcagcaggcaggggatgcatgaatgagaaaggaaataaagtgtgggaaagaatgatgagttgtcattagcaagagaaggtgacgtgtatactgatagaattaacagtagtaattcatgtgcccattcaaatattcaatcacattatcacactgttcacgtgttctcataacaacaatttattctaccctgacacacctaacctctctttgttacagtagaaatattttttaaaaatattctcacttagatcaggggtggatctacagttataggaccggtatcagacgacatcgacgactttcggtaaaatctatagcgatctgcttattcatatactatagcaccataatctaaatataataagcatactatgacaccgatagatgcgttttgataccaacgaatcaattttttagatccgccaccgactgagatcacacaaaaagagtggagtggcgtggatgttttgtttcttataaactgatacattttggaggtttataaaacacaaaatgccaaccaattgtatttgaaaaatatattgtgaaaggaatatctttttacgtacagttaaattccataactttggtttttacgctaaatttcataaatttatcataatgataacaaattatttattgtcatgataatacttactccccccgtttcggttataagatgttttgactttggtcacagtaaaactgcttcaagtctgtttgaccaagtttgtagaaaaaaatagtaatatttttgacccaagataaatttattataaaaatatatttaattaataatttaataaaactaatttaataatgtaaatattagtaacttagtcaaatttgaaatagtttgacttacttagtcaaatttgaaatagtttgactttgaccaagtcaaaacatcttataacctaaaacggaggagagaatagttattaaagatcaagaaaaatttatttgcgttggaactagatttcatctatatatgaacaccaattcaagtacataatacatatatgtacgagtaggaataagcaaaatatgagaggagcataagactcatgcaccagcggagatagcgagactcatgcacctgcggagatagcgagaagactgtaactcaagcaacaacgaataaggcggaacagaacacatggaaaggggaaatggtaatacagaagatgaatagaaatcctaaccctaagcactgcactcaccattttgttcagccaatcatgaattgggcatttcaatttacaagtctatttacaatattcaataaagatagacaattgttggggtaattattgtatggaaactatttgatgttattaattgccaattttatgccgctaatacctgcataaacagaagaaataaaacatccaacatagtgatagggtttaattctaatgtattccacaagtgttggtgtttatttgaatgcaggtaatataccgccaatgttgggatgaaatccagatctatgtgaaggaggaatcctatccatataaagagtaggccttgaactacatcaaaacatcatcaaatgggccaaatgctcggagaaatggataaagtagagcagggaggggaaccagaccaaaattggaggtcacctggcccagaccaggttcggccaaaccctggtgagagtcgtttaatccaggttttcgtatggacgctcctgatttgctctactcctgatggtgattggaggtcactttcgtcaattcacatcagataaccgttattacctgcctataaatagagctcacttcactcatttcaacacacactccaagcttaagctaaattataagaggctatattgtactttattgtatactagaataagggagagagtagagtagaggaagtccgaggaattcccgagctgtcggtaatcctcttcttatttcttttactatgttaattactctgctttaatccaaatactattctgagtaattaagatttattttgtgagacttatctcttggttagttcctaatcaacgtacgagatcattgataactataatccagtaaaatatagtggttgctctagttttagctaacgctaaagtagtttttaactgcgtagacgtggtgtctgggtagttaatttctggtggttgcttcatattctacagtaggtttgaggtgggtgtagaggtggtgacatccctcaattacactaaagtccttcctgtccgggtacgcagtagagccatatctaggagcagcgggctggccagtgcccgaagtatcgcattaggattaaattgaactttccgtagacactgtctctcactagtaattcctccctaccatttgcctatttttgcttcgtgtccttggatgaacctggtgaagagctgatacatatgttccctgtggaaattgataccttagaatactcccgggtgaagtgctacatcggtatctttcatgtgtttgcggattctatctataacattaagaaataccaacagtaacatgttcggcgaacgactagttaacgaccagtcttcctaatctaacgcaaagggcaatattctataagaagggacaaaaattcaaatccagtgccaatggatagttcttgattttagaagaattttgatgaaagtttcattgaaatctgatttaaaatgagagagttatggcctcccaaaatttcaaatttgaattaaatcaaattaatagagaagccttcctgttcagccatttactcatattttggaataaattttgtatagcaaaatatcttgtataactgactggtgggacccacaaccttttctcttttacaatacacttgctttccaataggaaagtccctgattcaacgacttgcgggccagggtcaaccttgacctggtcaaattaaccatttaaagcggcctgtgggcccacatgtaagtgacacaggttttaaacatcattttatttaagttttaataatagatgtggcccatatgacaaactaatatgttaaacacttatttatcttaatcaccttttgtcgacgggagatacccatagaccggatatagatggtattggagtacgctggtacgaggatctacgtagtacgacatcaagcaaacagaaaacagggattatactggttcaggtcccttggtaggtaatagccctaatccagttgatatgagattatacgatggaaatcacagattacaaagggaatagtggaactcgatgataccgacgagatcgtagtcgagttggttcaactagatcacccagcgacttggctcctgtaggctccggcttcgtaggctgtggtggttgtcttagctgtgagattcgatgccttaggtccttccgggggtcctatttataccgcaggtcagttagtcaccaagtaaaactcagagatatcggaccctacacgatacaatgacgacccagttctgtccgagtaggactccttccatctgtggactccgtgatggatttccttaatgtgtacagaaagcgtccgtatacgcgcaggtataccatatcaatacacgacgtatatccaaaggtagagggtataccttatccgtaaccctgacacctttattaattataacacacaatagtttttaagtggtgcctggctgtcagctctcctccatctttttctcccttctctctgcttagagcagatacaatagcaggctatcagccagctacaaatactccatccatttcaaaatataaggcacaaccacccataacccaaagaccaacaaataattattctcatcttgttgttcggatcatcctaataaatataatgcatgcatccaatagaattagataacatgagagtagatgatttaaaaaagtagtaatttaatagagaagatgtcacagttaattgtatgcttgtacatgccttatattatggaacatctaagaaaagtgattgtgtcttatattatggaatggagggagtatattttaaggagataaaagaggagagagaagagcagcgagctatagatttatagccagctgtagcacggactccaagacacaatatgtgtatgatatatgggaccagttattaatagtgtagtatgtaactattgtatgaattgattatatatgatttggagtcagtagttgactatactattaaaattgattatatactattgattatagatgatttaaagaacttctactatcgattgccagtacttattagtcggaccagattctaggtgatctgccaaaaaccgcctcgtcgtattccattctttttctttgaatggagccttaccgtgatccgttgcagccagagacagtaggcctcccaaactcgctacaaggcaaaaaccaacctctataagtcaactccaataaagaagcatggtggaaagaaggggtgtttaagatccccaagcaaaatttttcaccatgtcacatcgaatgtttggacatatgcatatagtattaaatataaacgaaaaaataactaattacacagattgcgtgtaaattataagtcgagtcttttaagcctaattgctctatgatttgacaatgtggtgctacaataaacatttgctaataacggattaattaggcttaataaattcatctcgcagtttacaggtggaatatgtaatttgttttgttattagtctatgtttaatacttcaaatgtatatccatatatcagatgtaacacgccaaaactttacaacatgaatctaaacacccccgtacgtctcttagatccgttatccttcctaaaataataggttttgcctctatactatttatctaggctggggttaggtttggcctggtttagttaccaatttttttccctaaaacatcacggtgaatctttggacacatgcatggagctttaaataaataattgcactgtttgaatggaaatcacgagacgaatcttttaagcctaattagtctatgattagcaataagtgctatagtaacccacctgtgctaatgatggcttaattaggctcaaaagattcgtctcgcggtttccaggcgagttatgaaattagttttttcattcgggtacgaaaacaccttccgacatccagtcaaacatccgatatgacctccaaaaaatttctttcacgaactaaacagggccattgctattggtcgggtttctcaattataggtggaagactttctaggaaagtaagctttatagcctggcttactttcttgtgctttctctcaagcgcgcgagcacgccggcggcatgcgccaccaaagtaggggcggccggggatggtaggttctagggtttccccaccgtccgtggacagcagcacgcagcctggaaaagcccaaaacagctaggtggcttgggtgaggcggcagactatgtgcggacaccatggacgccggcccggtgacgatggcgaaggcatgggggatgcgaagttggagctctagggtggccatgggttcaccaggacatgcgcacgaaggggcgggggtcggggatggccggaatagcttttcccccaattgctcccatagcggcggcgaccggagttgattccggtgaaatccgccggctcaggtggtccaccgcccaaggcatcactaggcgtagaatcgtaagggttacagggctgtaacccctaagtattgcggccagagatggtgcggtgggggttcagcaccggcagggaacacggcgaacgaggtaccgcggtgagaatgctggtgaggtcccaaattggacgtcgagagggaaggggttctctacggtaatccataggcatggtcagcttggaggggaagacgaggccgcagcggtcgggtgagctcggcgcatatggacgcacatttacggtcgaccaggcgggcactggactaggagcggggaaagaacgggggcaccgggcggcgggcaaggcgcggggccacgggtatagatagccatctaggccgcctgacacggcacgacccggcccaagctcggccgtgcctgggccgagacttgttgggtcggcacagcccgaccgacataccgggccgtgtcagcccacgggcggcatacatggcccaatactactcgggccgtgccgggccggcccgaaggcacgacggcccatcgtgcttcctctcagaaaaagtctacttttggtccctcaactctgtgggctgtgtttaaatggctggaaaataagtctattttgtatacctcttgtcttgggccttgcgttatacgattatttaagtctattttacatcccaatatttttttatttgatcgggccgtgccgggctggcccactgtgccgagggtgtagcccaggcacggctcggctatcgggccgtgccatgctttggccaggccaaaattgcgggctttggggtgggccgtgggcctcaggccatatggctatctatagccgcgggcagtgttgatggaccacttgccacctgcccggccattaatgcgccgccctcaagctcccgggttttcttgcggtgaggacgtggcggctggtctcacggccgccgtcgcgcgcgcgcgcgatggagttgggcgcggtgcggtgcgggcgggccgacgctgcgcctgtgtctcgacatctcgtgcgcgacgcacgagatgcgggtcatagtgtggtgcacggtagagtggtgccatagtgcgttggcgcctgtgccgcatacgtcttgtcatgcggctccggtcaggtggccgcgcgccgcacgaggaaagtagagcagggcacagcgcacgacataggggatgaagatgcacttaaaccccctggtgggttttggtgatcaataacaaggtggttaaaggggactaacgtgtttatcaagtttattcataggagttcagtcctaaagcaagttttgatgactaagaatgcaaggagacccccccccccaatttgaatcttcctaagtgcgaaaaacaccgaaggtgattagactaggtttttctctttcgaaattgagtttaggaaaaaccgtactattaagaggggtttcaagtgtggttctagggtatacaaagtgctcttagtcatatccataagtcaaaagatttttggaatcatttttgaaaaatgattttctccccgggacagaaagggctacccggaggttctggccggaacttccgggcaccgtttatttgcaaaaaatttcctaagtgttgcccggaagttcctggcacttttgctcggaacctcctggcaggtttccagttcaaacttgtgagtaacggctagatgacgtcacctagccgttatatatatgaatttcgtccccaggtcaccttttggccattccacttctgttcattcatgttctagggttttctagccactcccaagcttcctttgcttcctccactcaaatctagagactatcttgtgagattgagagattagatgagagtgtaggagtgttttggagatggcttgaagattaggtttgattgagaactttggataccttgtgggctgtcacttgggcttattactcttggagatcttctcctagatggttaggcgtcgcccgtgagcttccaaagatcttgtggatgtcccgggaaagtttgtgaaggttttcctcacctccacaagcaaacgaggtaagtgagtaaagtttcttgtgctgagttttcagaggttgtcctaggtagagcaacttgcacttgtggtcttttctagaaggaattgtgagttggatcttggtggtcactcaattctagaaaacaacctagaagtgttgagttgaagactgtggacctcttctgggatgaagcataagtgaggcaaggggttaatcgagacccggctctttggagcacctcaacggagagtaggatccgtgtgatccgaacttcggaaaaaactcgcctttgtctctcgtgtgcttgatctgtgtttgaatctgctggtatcttgtgattttcatcttgtgcaaccctgtgcctgattttcactagctaggacctgttatacttctcatatttcgtttttctctgttgcccggaagttcctggctcaagaactccggaagttccgggctgctcatcactgctaggatgttccggtgttcatcactaggaggttctgggccctgtcaatttaaccgctgcgtttgttgagaaaattgcaggaaagcctattcaccccccccccctctaggctacatctctgcacgttcaggggagagcggcatcggcttgacggctcgctaggtttggcgatagcgcagtggtccctggctgcatcgaggcatggcgagaggagcggaaggcgcgcgacggttggcttgccggcgaagggcggccatgcgggcctatatgggtgggcggcggcgatcgaacggcgctgcacgctgcgaggagcggctggtggctctacttgctaggctggcttgaccggctgggccaaggcaggcccggtggcttgggccggataggagagacagaaggagagaaaaggaaggccagacgaaagaataggaggtgaagtcaacttctagcagatggggttagggtttggatgggctaggctggcctgaagtggaaagaaaaaggtcaaagagggaaaactgggggccaaaaacagacttttcctagaaaggtttttcaacaaaagatggtttggaatttatttcataaattggactttttgataaatactttattaatagtatttgcttacgaaaataatcagggaatcaacccttataagggatttttagaaactaaataatttgaaattttcatttgtaaaataatcgcttaaagagatattaattcataaaagagtttttttaaggaacatacatagcatttacttttatttgaaaataaatcattaattaatattatttcataatcatggttctttaatgaacattattctaaattcaaaattgaatttagaatttgaaaataaccttaaactttatttaattgaggcactggcacaacaagaaaagaaaagaaaataaaatccaacaaataccaatatgaacgaactttgacaaacatttctttattattcccattttttgtttctggattttaaaacttgaaaatttcagggtgctacaaacacctcgagcacctggtccacaaaccccgtgaggcgaggtgttcaatgacaacggtgtatgtgccggtgttcggaagtgcaccttcatggaccatggaggaggttgtgtgcagcatgcccaggatggcagaggcaagtgagaggcagtgagggaaggggaaaggaggcaaggagggaccgaaggttggggaacactacaaaggaggcaagggtctggaagagttggagccggttgtggcaggagggtcgtctccgccaacgagtccatggccgcctaagctagctccacttctcatataactgctaccatcaatcctccaccatgagctcggtgacgctgtggctaccacccttgacgacctaggggaaatatgggaagacaagggagaaggaagcgagaaggaagaagactgagacattgattccgggaaagaggcgacagagggcgggagaagggtattcaggacgagcggcttgcgacctgtgggcgataggtgcagctctagcgatgacccccagcagcaccaacaccccaagtacgagagagacactatgcatggacatgtggcagtgggtggtgccaccagtcctccttggcttcctcttactctgtcctctctgtcgcctttggggcattccctgcggcttctccttctcgttcctctccggtagttcctcctggactaccgcggtgtccacctcctactcttccgcaaccatggcaccaccgtgaagctcgccgtcactgacccatcgagacgcgcctgctaccctatcaatgtgcccaccaccgacatccttgtcggcctcctctcctgccaccggcgcagtctggttcacgcactagcgcaccacaccccttgtataagagggagcagtagtcgtggccggatgggagcggtacaaaattctaccttcgagtacttgggatattagtgatacacaattttacataaagaatatgataccttctagtatctcctcaagaaaattttattagagatgcaaataaacttacatatactaaagtacaattagcaatcacttggtagctagaaacaagttcaaaatatggcaccaaatcttcatagcaaaactattgtgtttttctcttcgataatggaattaaactcagcctctacatcacatattatccgcccaccatagtattaatctagtttagttcatgaaccgattgctaatggttcgatcgagatgatagatatatgttggttcacatgacggcgcaggcgttggggttgtcgtcgctgaagagggtggcgaggcgctcctcctggctgggggtgaccggcagcacggcgtccacccggcggatgtgcccgttcggcgccttcttgtcgtacgccgccggcggcgccacgtacgggttggtgtaggggacgtacggccacagctcggtgcgcttccccgtcgactgcgcccgccgcagcacccgctgcgtgtccaccatcccctgcaccgtcaccttctgctgcttcctgtttatctccaccgactgcacccctgcgtccatatatatacgtactccataataaactcaccgcctcagctagcgtacataacctgacatctctgtgacgggttatagtttgaaaccttacattggaattgttacatatgtcggttccaaaccaaaacccgtcacagaaattaaatccccatttgtagaagtgtttcgaacactttttttcttggattgaaacaaattaacctagtcgatcgttttggctttcgcaaacggtggtttttgactaattaaatttggcttgtgtggagaccattatatattgtgtcagagagttcacgtcgtagtacctttcatgttggcaagggtgttcctgaccttgagctcgcagccgtcgcagtccatcctcaccttcagctccaccgtgttgaactgcctcttcttcttgtggctagtcttgccgctgctgccacccagcagcagatcagacaggtagtgcagcgtgcctcccatgcttctcaactttgcctctaatgaaagttactaatcaagtgcaaactctactaattaattatagaagaaacttttccctggaaagagataagagatcaagtactgtaatctctagctagcttgggtaatttggtgacatgctatttgtaatggctgcttatatatagacagaggatgcagggagagaatcagagaaggcaatttgtgcacatcaaggtcaggatgcagtgatgcagctaaggattagtgtgtgggagttgctggcaaagagctttctctgagatgcctttgttccttcctacctttgctttgctttcctttgcttcctcctacacagctcactgcacacgctgacctgattacacattttgccacacatgattgttcttatataggagagttccagctctcaaatgatataaagccatggccgaccactgttgataaagtagagatgatatattcgccccctgtacctgctcattaatttgaaaggcttaacaacataaaacaaacaaaaagaaaaatagaagtactccgtccagtcaaatatcaaatatttttactagagggagtatctcctcatccatgcttaccttgttttgtagtacagactggaatggccgaaaaacaacatgcccacatgcacgtgcaaaatatcttatttcaatacattattgtgcagtttgaaaacattattgactggattattctagtggattatatgtctacgtaattacaggaataaatatattaacaaaataacaagtaaaaataaaaaatagcttaaacaattaaaaaaaaagaattcagggcttcttttgaaacacatgattgagaaaacgaatgcaaaacaaagtattataaaacataagagaaaaaaaatacaagaatgatcgtttcagtaaaacacagggaaaaatagaggaataggatgaaacacatatactcaaaataaaattttagatagattgaagttcttgccaactttcttccaaaatatgtataagattgatcattttataagaatattaaaaaaatcaatcatttgtttcaaagacattccaaggaatttatcttacgattaaaatcctccaaattttatttgtttttcctaaaaatcaaagagtgcctcggtatgaaactcagaactgaaacataaatattccctgagctggtgaagttctttcggccggccttcacctaactcgatcacccatcaaaaacaaaatctcacttttctcgtgatgcaaaaatctttagaaagaacagtgacagggaatggtgaattttgggtatagctaggatgaccattccacaattgttcaagatattggattaatgtgtagacgtatatagaacgacattccgacacttttagtaaaatatcttcaagtggttaattaattcgtgagatgcatgggatattacatatatatactagtttctaaaattgcgactttgatatagtccattcattcagtaaataaggggagacctgaaagtgttgctctagttcctctagcacttaggtgcttggtgctgcctaaccctctttgaacggcagccggtcagtcatcttttcctaattaacttcattcgtcttttcgtccaccttaatttgcagaaaaagcgtgcaaaattgtgatgtcgtcagtcttcgtcctgccctaagtggatgcatgatcgtatagtatatacaaattaaagtactctaagtgctactccctccgtcccaaaatataagtatttttgtaccctgacacggtctccgagatactattttgaccaacaatatctataaaaatagtttgtttaatgataaatctagtaacatcaattttatataattgatttttttattttttattaatagtcaaagttaaaaatgtttttttgcgatgaaagttaaaaatgttgacttgtcactatgctaaaaatgcttatattttcggaaggagggagtagctaatacatgaattccaatagttaacaacaaggaaactacgaaaataaatagtttttacatctccttaattaatcgactatagcaaaactaacacagagagatggctggctagctctagtggccatgccatcgttagttttcacttaccaatgagcaaacaaaaagtatataatggcaaaatttgctctaaagtgtttgattgcaatttgttaaattacaatttgcggctaatattttattttattttattttgctcaaatggagacagaagattttagaaatgacacttttaccctgtggtaacttaggccagggttctatattttgaactgcaatttcgaaacaaagggtatttttccctactaggatatcatcatcacaaaacgtattaaatttctgagtttataaaaatttgtttagatttaaccaatatttatttattgttgctttacattttgaaattttcagaaaattcctttctattgccccctaaaaaaagaaattaaaaaaattttatctctgtaatttgggacaagttttcatgtttgccaaatttctttaaattcagccaatttttgtttagcttgatgctacatcatgcgaaacaactctaaatattgaccaaagatacatatatatatcttaaaaattgaatagcttccaatttggagatcaagcacggtcgctttaaaacttttgtaaaagcttaattagggttgcaaaatatactcctaccatccattcaaaaatatactccttccacttctcaacctggtctttcaagtcaaaattgtgcgcaaagttttgttcgtcatatttacgagagaaaattgcacgcaacaaggtgcttatatatgtccagtgagattccaaggagaagactttgcagtgtgttgagcgcgaaatttggcattgaagaagagaaaagaaggaacaaagaatatatatcaactcagcttttctcttttgttctaatttgactatatatgatgtattagtaagatcttgaccatctaaacgtagatgataagatcgaactagcttgtctagatgggacttatctccttaatgcctggctgaagatactccgaaataatggatggccaaaaatttatgcgtagctgaaaggccaccaaagaatatattgaccctagaggtgctacgaagcatgacaaaatgttggaaaatcatatgaactttaaaggaatcactgtccttatataacatggctcattgtcttggggttccttacatttgtcgattgagggaaatcaaaatataaccacgcgtaaattttcactcatatcctaattaaatgttttgaattaaatagttattgtgattacactattcatttactctctccgtctaaaaataaatcaacttttctaaagcatgacaaaatgtttgaaagtcaaatgaaccaaaggaatcactactcgtgcattatcttgggattcaaaacatttgtctattgataagaaatgaaaacataactattgcaagttttcattcgtttcctaattaaatgttatgaattaaatagttgtagtgattacatcaaacaattattctcttcatccgaaaataagtaaacttttgtatttgaatctgaacataattgatttatatacaaaagttaaattattttaggacggatggactaccaaagtatacaaggtctgtttccattaattttcttgttaattttcacgcgcttccttgtgttgttaagttcatatgcaccctaagcttcattctcattttatacaaaagagttaataataaatactcctacgttggagtatatggacatgtggaaccaatccacaacacacaccatatataccaattatatggttgtgaggtactacaaaccatgtacgactgcaaataacgaacccagggaatgatcaatgatgaacgtggaatatgacaatcgaccacttttacgagaggagaatatgaggctagcttaattggtgacgcactgtagatcgagctggaaattaaacagtgacctactacctaacttggaacaagtaccttccgattattaggccccacacacatcacaatctatagtcatgctaactaaggaattcgtacgtgtctagaattaaccattcgaattttgtgattgtgattgatcaacacacttgacacatccaattagttatgtactgcatgtgatttctgcatgcttaattttttttattttggggtttgatctatatacatttataatagaaaactctcaagttgaattaaagttcttctcatgaacagcacattattgtcaatctatccaatttttttcagctttccccccttattaaaaggtaaataaaagctcttttttggcaattgacttttgcttgaagttggttgtttttcatcccaaaactttcaaaaatcgaaaaattaacactttacaacatactgtattatttttagcggtttttgtttgaaaacaaagcgagttttttaagttcatattctttctgtgcacattttgttgatgtatatgttgcttttagggccacaactatgaaatggaagtagtagctaaaaaatattcgatggtttttctcccccaaacttttgaatttgtgaccaccggattgtcttgagatttgggcggcatacaaggaaaaaaactgcaagtcatccttgggagggagtcaaacccacaacatgtggcttcaaagcttgtgaaggtagccacaacttccgggggtaaattttgacaagttatgtataaactagattgcaattatagtaattattgtgtagttataatttaattacatttcaaatatgctatatacttatatttggtttaatgttgtttggctgatcttcaagtaaattatcgaatgttgtatggctgatcccctatgaaattacctaattgaagttcatggtagggataaaccactttcataccgattaaaagtttaaaacaccataaaatatattatggatgttattatttttttaaaaaagctaaggatgaaaaaaaaattggttctgtgttggaagtgaaaaatatattttgagcaaattcaattaccaaacatagacttttttccaataaggataaaatgtgattatatatttctgacctctggatactgtgcacacacaaaccaaccaacaaaaaccattgtcccctgtttgatcaggatgatgacttgcatattgtagcatccatcttgacatcgaatccatgataggtaggaaccacagctgcatgtatctcactactactccactcatcaacggctggcttttgacaattaagcgacgatccatggagcgcgaaaatagaaccgctcttttggaaaaaaaagaaagagagatcgagatcgcgtactgcgggtctgtttggttgttgcctaacattgccataactcagtttgccataggtgtggcatggcaaacaaagtgtggccaacaatttgttggccacaagtgtggcaatgtttggctagaaaatgagtatatgacatgtagacccatgaaataagaaagtgtggcttgccacaactgaaacaagcaaccaaacgctaagctaacaatctgtagcatgcctaacatgtggtgtggcaatgtgtggcaccaaaccaaacagcccctgcatgcatccggtggcaacgacggctctgacgacgactcgagaggatattaatattagtaaagccggtggctatatagcagcgcattatggctgtccctcttgcccatgatcaatcattgtgcatgcatggcttggcttcttatatactccctccgtttcaaaatgtaagactttctaacattgtccacatacatatagatattaatgaatctaaacacacacacacatatatatatatatagattcattaacatctaaatgaatatgggtaatgctaaaaagttttacattgtgaaatagaggtagtactagcttaactggtgccctgaaaaaaggttgatgcttttccacagaaaaaggagagcttggatcgatcctttgaggcatctggccaatcttgttctggcttatgcaacaatcagggtgtacacagacacaataattaactttggagctttctctaaaaacacatataaacgcatacactcaaatacacgcacacatcctatatatctataaagtttatcctcactaagtgtagtcaatactatttctccattctctcatacaaccacatcaattcatttgtttttaaccattggatgattgatctattatcttcattttttctcttatgaattttgttggatgacctacatatctataaagctcattcacactaagtgtagttaatgatatttctcttttatctcattaagtcacattacttcaattgtttttagccgttggatgattgatctatgattcaaattatcttcattcgtttcttctcctatgaagtcatatcactttaattttgcttttggatgatcaatctatattatcttccttcgttttccttagttattgagccatatcacattatttctgcttttgaatgatttaaattatcataaactatgtcatcttaattatttatattttttttcaatggtcaatcaaagatgaaaattatataaagttgatgaagttatgtcatccagttatcttatatactccttccgtcctaaaatataacaacatttacccctcaaaatttgtcctaaaatataacaacttctccaccaacattctcttcccaaccaatcacagctctccaccattcacttttcccacctacctccactactcaaccaatcacaacactccactattcacttctatctactttcttaataaccatgttcaactctaaaaatacttatattctgggatgaaggaagtattatttatactattattatatagaactctcacagcaacacgcagggtttcatctagtttactgaagggtgtcgagtctacaatttaattaaatccgagtagacagattctaccataagaaatttaatcagttgagatacgctcactcatacatttaattttttcgatgcaatgttgtgttgggggattatgcccaagattgtcataattaaggatattactagagcggctgtaaataaaagatattttggcaaaatgcatgaaaatcgattccgtgaattggatcctgagataagccttcaaattgagccattgaggtaacaaaataagtccaattttcatttatgatatttggatatatgcaattaagttcaattgaattggggatacgtctatcacgagtcttgatagtactagataacagatttagttataatttaacgacgtattttgagaagctgggaaccatcacatgaaagatattaaaccttcattcacaaatgtgcagcaaaatcaaattaatcccacatctaataacacatgttttgtcttttaggtttaaaacctaattctcctttttggacagcaaggcaccagtggtctagtggtagaatagtaccctgccacggtacagacccgggttcgattcccggctggtgcatgaacttctatttttttgggttctagcttttctttagcgaaaattttgacgaaaacaaacaaacagccacagtttcagtttttaacagaaataattccggcgaaaattccgaaagacatctccagcccaagctctacataatcgtaccaaatatttgtgaaaagaagtagatgagtgagaattgaacactgtgggctggttacagatgagcgtacgagtctatcttgctagcttgcatctttggttatattaatggaacttataattatctagtatcatattatgtgataatataatattatgacattattcggttatatatatatgtgctaaataaactataaatgatatgaagtaatataatcatgtattataattaagtatgtgatattataatactttatttctgatacgaattttcaccttaacattatatttctttttcgacaatcccatctccaatatccaatagatctgttcagattatattctcgagaaaaaagtaatgataaaaatggaagatagatttgttcgaccattctcatatatatctagccagtcttctctttctttttctttcactctcgtaatctattattctaaagctggcagtgcttgctgccatttgattggtccgattggaaacacatttatacgtcgacacgtgtccagctaaaattaatgcttagtcgcgattcgtggggaagcagcgcgaggaatcgcacggagcaccgagcggcccatcagttcaaccacagatgtcgaaggctgcaactgcaaagatggttggcaggctgtcgcaggcctatcgagtctaactgggcacctggatgcccaataaccacacatgcacatgtagtccagtccaaataggtgaatgcttttgtgtctatgcttgtggtatatataaaaatatttaatttagatgatcacaagattttattcacataccaaacttattggtgtgtatatattagttattatgcaccctaggcttgtgcacacatatttcctttttaaaaaccaaaattattgatgagtcaatcaattgataatttatttttcaaaatatcaaataacaaatgcaagtaaatgtcacatcatgccaaacgtatatatgtgcactcaccgtacatactatgtgctgccctcggttacactcatttttaatttgtaatattaagggtacttgttttggtaacataaaaacatgagataacacatggaataagtgtccaattgcttggttttcataataagctgaataaaaatatacaaggtaacaaaaatatttgcctaaggaaaaaatggatttatcagcttttagcgaggctaaaaataggtataggtgattcagaaaagaattggcattgtgccacacaaaaacactatatttggattctaattggacaacattagtagtttcggctcaatttggagcacttaaaacgtaagagtttatagattatgtttgcacaacgccatatctcagacaaaagttaaatttgaagtttgtatgataaataatagtgatttaaaattatatattttatctaggatgggaacaaaataattcatcgaaagataatcttaaatctgaagtagtgccaaacaaaggccataatatacgtgggctaaaattagctagcgcgtcaaaggacgcgcctattttctagtgttgtactgaagaggatgcccaaattaatgagcataggaagtccatgccctttttgtcccgctctcgcgagcttatcaagggatacaataataaacttgttatatcttataatacaaattccatgcaaacaattgaaagaagaattgtgccacgtggcaacaccggtttcacgggatggctcgatcctgctaattgcgcgcgtgcaagctatgtgatttctcgcgttgctgccgtacggctggcaaagctcaggcagctattgcttcctcctaccaccggatattgaggattaaagaagtaatgatacatattttggttagagactaaaagaggattaacaagatgtaatcaaatcacccactaaaattcctacgttgcaaacatccatccttttacagttattgtgtttccttattttgtatccgtattcatgtgatttatattatttctttcctgtgttttcctctatggaaatcatataaccttttctctttggggcaatttcattcttacccctactttaatgtttaatattgatgttgcccagtattttagggttatttttttgcccatagttttttgaaataaagataaatttagtccctacttttgatggacagattaacgatgttaaatctttagcgagaaggcattcaatacccttactcatgttgcaaacttcccctgtttttgttcatgattgagaatttgcccacatttagcacatgaaccttgcaaattcgataaacttttacccaatatgataattttaacataaatatcaacaaaaatttgcttcaaaatttgacatcttgaaaaaaacaaacaagtcaagcaaatctattgcctacctatgccaagctgtcgtcgtcgtcgcctcctctcataaaccgccgccacctttgttgcctcctcttcccaccgagccgccgccacctcctccccacgtcgagccgccaccatcacctccccgcgctaagccgccgttgttgcctcctccgatcatcgagccaccaccgccatcgttgacctgacctgttgtcctcctccccgtcgcctcctcgacacgtcgagcagccgcacctcctccctacgctgagctacagcagccgccattgtcctcctctctaccatggcctcttgtgcaatgcctagcctcctcctacacgttgcaactgggttgggtggcctacacttgctcgggtcgtccccgttgcctggccggcccacggacactgccgccactgtttcacaacggggattcgggtttaggaagggaagagttgatgccaagtgcccaagcttggagggacaccaagcggtacatgcatattttctaggggtaaaagggtcaatcaataatttaaaaaatcattatctctttctttctctaattctttaccgcactaagtccaatcccactcacttccatcaaaaacaggggtaaacgcctcattcattgaaaaaaatagggcaaaaaacaacaaccctaaaatgtaggcaaaaaacaacaaccctaaaatgtagggtaaaatcggtattggacatcaaagtaggggtacaattgtacaaacaaaattgtccctttctctgttctccctcggtccaatgcaacctatatatgtcttgtgagggctactttgaaacgaagattgagggatgaataggaaaaactagaattctcacaaaaaatcaagcgcaaaacaaagaattataaaacacataaaaatatatgaaataatcgtttgattggaccgtacgaaaaatgcaagaattagatgagagagataaactcataagagacttcgcatgatattgaacctcatgttaaaaatactccaaaacttgtatgaattggggcattccttagaaatttgataagactcaatagttttcaataatcctttggttcaaagaatcatatagaaaaatttcctatagcaaagtttatcgtttctatacagaataaaagttcatatatttttctttcaagtaaagggaccctaattagttactccactaaagtcgaatgagctgggttcactttaccatgcgtggcgaagccacgtggtttttctagtttttctagtgaataccgtattcctcgtttggtgcggtctgtaatacaaatagctttagaactttaattactacctcatagtgttttgtatatgtttagttgttggcttttcggactaacaattgatatgaaaccttacgatctattaggaacggccatttattatggctatgctgaacgacatggtatttgacaaaaaaaaaagttgggttgatgggatttggttgctatggcatgtcaacatttggagcggatggtcaaagaatgttttacatagagcataaatgtaacactccgggtatcttttacctataatgctacacactacggaacaaaaaccactaagttctaaattcattaaaattttgacagtctcccctgtaaatatggacatccacgacaggcagttacatattaaataattaataatatcattcccacagtacgatccatccttataatccacagaaagaaacaaatagatatctgaaagattattataataccaaacgaggatatagtttaaatgtcattatagacctaagcaatatagtttgatagtgtgcagataaatgtgtatataagggtgctacttcccgcccaagcatgcccatctcaatgtgtatctaaaaccaaataaacacaaaagtgagtacataaatactcagcaagtacaatataacacatacacatattggaaataaagaatgagcagaaagttttctttctttgaaaaagaaattgcaaggttaaagaaaatagtagttcccatttcgggcatacatgaaatgaagtagtagtttctatcccggacaattgtgaatacagccgcgcttacccataggaacataaataaaaaccagatagcacatcaatgactcgcatggaacatgaataattgaaaacggaacaaagaaccaaattgaaaccatatcgcacatccatggcaaacataaaacttgaattatttaccaagaaccaaaatacagattattaaaataagaataacatcgtaaacataagataaacttaaaatctaaatggcatgaacaacagtctgcacataagcagccacatatcacatatagaaatacaacagaaataaatagatagagcaaacaattcatgaatcacacaactagttcgtcacgcacttgcctttaaccttgacgataacccgatgaaccaccttccacaccagatctctccacacctatggagcaaaactacgaataaatccttatattcaactaatgatagttacgagatatttactaaaatcgaaacttagaacatataaactttttactgatttgtattaaacaacctatagtagtttcattactgttttatgcgtaactcgcaaaccatctaatgaaatctggcaaccaatataacttcggtcatctagacaaaattttctacaactttcatgttgggcgaaaaatcagtttactacttttctaggtctcagattaaggaaaaaagaattggtgtcactattttcatacccggcagcagtactgcttttgttgtttctcctaagccgtttaccggaatcgagcaaaactagcaccgttagaaagatatcgatgatgaatacaaactttatttaggacaactaacctgaatcccgatgttttaatacctttcaaaatatattttccagcctgcaatcaagaacctcaaaaattgcacgagcggctatcgaatcaatttatatttgaatcttatacttctaaggagtaaacaaaagtaccgttgcagcgaggacactagaatttgagaataaacccactagttacgaaatcaccgaaatccccaaaattgctcggcctttaccttcccttcttcctcctgttctcttgcttcctctgcactatgcacccttctcctctctgtccgatgcagtagcagcagccccacgaaaccattagtagcagcaagaaacaaccaaagccacagccatagatcagatcgacagcagcaggagctcaccgggaagaagcaaaacggaaaggagccaccagttgcgatggatgacgatggctgcggatctccagcaatggccgtggtggcggcgcaaagacggcggtggcaaccgggacgacagcagcggcagcaacagctagcgcaggagtggtggcggctagggctggctgtagtgatctctcgtttttacctttttctttttttttttgttatataaagagactaaacaggagatctaatggcccacatcgtttcaatccttgggacttcgttcgaactccaattactatgaacttatattctattttgcactactcaatgagctctacgcatccatggttcctaatcgcctattcgaacaacggtttcatagttgaacttttgcatttttgttgtaatatttcctgaaatacactaattcaaaactcaggatattacaataagcgacaatctagtctacggattgatggtccctagcatttcttattcgtcctggtttaaaaaactattgtgtgggtgaggtcgggagcatttgcagtacacttttatctattggaattaaaaatatatgactcccacatgtaaaaagtgtacgataaataatagccatgatcacgagttgaattggcaatgaggttttggtcttctaaacaatagatagatctaattttctccaactagtaacgagacatagtggattggtacgtaaccttctttgaggacagaatcctatatttatgggagaactaagttgctggatttctattgcagatctaggtgccaagcggcagtggcctggtgaagacgggtgcccttgaccagtagtggacacgcaattgggtggaggaagccgttaggtggccatcccggtggtggggtgcaagggagtaagtgaagatggatcctaacatggcgtggatctagaagtgctggcagaggatgttggagttttcaggcgggtttcgaggttgtcacataggtagcgctcaacgccgtcatgatcatcgctaacctatcactctactcgctagcgttatgcgcggtgccatgctggtagatagtgggtgtgtcatcttcggctgtcacctataggtattaagcctgataccccctaggtatcacggctgttacccacatatattaggcttggaacctgggtctgatataagggtttgataccttcaatattaggtccggtacacaagcacctattggtacccatagatatactagcttggtactacgttttgtacaatacatgctattatcatatcttgtatcttagactagccaaaaaatatcagagggtagtgataaatgagattattggatttatcggaattcatcggtgatagacaaaaaattttggacaaaatttggaaaaaaaattgaagaaaatttgttaggaaataacatagattttatccaatccattttttattaaaaaacaacacatatatattctgtaaatgagataatatcaacattttatagtgcacacacagcaagcaaatggaaccgaaaaaaaaaagagagaacaaaaatcgtggcttcgcttgaagcaaactcgaaacctgttggttgagagctaccgcttgtaaccaaggcatcaaagcaacttctatagcaactatcgaggctgtcttttatattatagcaggaaattcaagatagaagattttctcggagggtagtgataaaagatgtggcttccctctacgtggtgtacgcctatttgcttccctttcaccggtggccctatttcctgccttcctgggccttgcccctagtcttctgatcatctccatcgtagaagagtttcagactccattactccgttctctcggtgacaaaaatgaaacaccacggctaagaacatcaatcctcacgcagttgtgaatggccattgtttcctggtgatttatgtattcaacttagaagctactctctccgtttcaagttacaaaatgttttgattttgatcaaaatcaaactatttcaagtttaactaaatttatagacaaatatagtaatatttataatactaaattagtgtcatcaaatcaataattgaatatattttcataataaatttgttttgtgttgaaaatattactattttttctataatcttggtcaaacctaaagcagtttgactttgaccaaagttaaaacatcttataacctgaaatggagggagtacttgatttataccatctcaatcaactttgcttactgatagatgaacacagggataaaggtcagcaagtttttctttcctgaatgtgtagcagttaatctgctagggattcgtttcaatttttacgggaataattaagactagaaattaagaacggtaagaataaataaaataacgcaaggaggcatatatcatggtgtctcatattgtaatcaattaatgatctatccagctgcttcaacctaattaagtcatcctctttgatgccatccatgtcttcgatcgtaagcaagagttatcaattaatgtttgggaaggtttagggggcgatggcactcactggtgaagaacccatcttcactcccgatttacaacctcattaagtctcgggttacaaaccggaactatgaactccagaactaaagatgtccatctttaatcccaattgaaataactggatctttagttctggttggtaatcattagtaccggatggtgttaccaactgggacttttttttttttgctattttgcatatcttgcgtccgatatccccaacaacaaaatatcatctcccgacactccaaatcatccacaataacataatcataacaaatcatccacaacaacataatcccaaatcatccacaacaacataatcattctcaaatcacagatcaaatgaacaaattatcctcaacaaacaatcattcacaaattaagagggaaaaaggaaaaaaagaaagaaaataattcccacggcgaccaccacggccgccatccgtgccgaccgctgccctcctcgtgtgacggctccaccggccgccgccgtctgccactgctaggcacggccctccgcgccggtcgcccgcggaagggagtggaggaggaggaggaggagaggggataaggaggatgcgctggaagagataagatcgaggttgggagaggaggcacacaactcgatttttttaatcttggtcccagttgttataaccaaccgggactaaatatggatctttagtcccgtttggtaacacaccaattgagactaaagatcatctaagttccgtggtagttttaaaccggggcaaaaaagatatttagtcctggttaatattggaacgggactaatgtgatttttggccaacccatcagttctctactcaagaggatctccttgtaccttgctattgcgatcgtatcctgattcctgaagagcttgcacctgcagcagcagacagacgctgtgcatccatgcctccatgacggctatgagaggcgagggtccaaccgattatcagcgaaaaagttcaggcagaaactattttggaaggctggagactcgattttatatttatgtttttcttcggtggaggagggccaccagtagaacgataacaaatgggcgtatgccacgtagcgggaacagggatgggaacacaaaggcacagcccgagagaggcgtttttgttggaccaattttgcacctatccgataacagcgagaaatccgttcgttttcgcagcaaatcggccagtctggactctggaggctctcgctcgctcttatcgatcgatacgaccagaccggaggccatctcactccagagctcgcgggattttttgacttgaaaatagcgtgatcgcctctcatgtcatgcagatatcgtgatgcgtgagaagaaaccgtctatcctcctataaactctcgagcatgcagtccgttgtgcattcgtgcaacgcggttaagttagttgttgttgcgatccatagatagagctaaacccctaactagtaactacccagagagaactgataaggccagtgtcgagctagccagctgacggccgccacagtttgcttgatcaaggctgatcgatcgatcgatggacatcaccggcgcgggcgctatgggaggaggatccacggccgccaccgccgccgcggcggcgggggccgggtggaagacgccggtgtcgatggtgctggtgcagctgttcatcacggggcagatcctgctgtccaaggtgtccatcggcggtggcatgttgatcttcgtgctgcttgcgtacaacagcttcttcgccgtcgtcttcctcctccccttcgcgctcatcttcgagaggttttaatcttctccggtttttatttgtgtgtgttttaaagaaattttacgtttcttaataaagtacctcgaggtacctaaatattacactaaatattacctaaatccgaaggtatcaaattttacaccagaaaatatgtacatcctgataatttctcaggatgatgaaattatccgtgtttttatgatcagcttgccgtgaatatttgcagatttcgcatcttcagaatatttttttctcttcggacaaacattttacaaaactaggatatcggaatgagataatttatggtcatccattagtgactcttttctaaatttattgaaaaatcattttgtaatgtcaataattataaaatgtatgtctagtttaagttgcgaatcaattgattcaataatgaataacaccacatgtatacttctgatcgaataaatggataaccctggaattaatcacccgctaagaatactgaatgtgattgtaattaagaaaagtaattagcagcggctgtatgcattctaaaatcgggtttcatggtgaaaatttaatatgctgctaatttggttttgtgtagaggcaagtggagggacatggattggggtgcattcggatggatctttctcaatgcgttcattgggtatgtacgacatgtgtatctgaaccttcaaattcagtcaaactgtccataattatacttattatttaggaacaagtccaaataacccctaaacttggaactgaagttcgtttagcaccctaaactttaaaaccggacattcaacccccctaaactttataataccgtttatataacccctaagatggttttgcatagtagggtttttatctaatttatatataagttggatgagtttgatcacatatcatactctttggagtaaaattttgacttaaatatttatttttctacttatgagctctcacttacaaacaagtacgtacatgataatagtatgatattactgaataagaataaattgatgagttgcaactgatgatatgcaaatgtgttatattacttatttaaaattgttcgtttaagcttccaaaatatacaaaaccatcatccaaaaccaccttagggggtgatatggatggtatggcaaagttcggggggttggataactgattttaaagtttagggtgctagacggatttccgtctaaagtttatggatgtatttggactttttcctattatttatttattgtgtgtgttgattcgatcgatagtacatgaagatccattcgttgacacgtctcacctctattattactcttcctatcgttttttcataaaaagagagtatggtttgaatactattcgtaacagtgagttaacgtcgaaaaatacctgtcctttgtacggcttgtaggttgcaactcacctacgtgagagaaaattgtaaaatataccaataagctagctgtgtagaccagacaattttagataattagttatttggaggatttttttaaaaaaaaataattggtttgagactactgaggaagcaccgcagcatgatattaatatatgatgatatttcaaaaacatgcatgattgtataaatatgccagctccacctcctaacaactctagatatgaaattttctccaatgcaacgatagcaaacccaagtaaattgggagggagaaggataaatttacactaacttagcattagaacagagtgctcacttcttggttcttaacttcatcacttcccttatggaaaagattgatttcacttgtccttccagttccaggtctgtgttggacttcggattgccctctatttccatctaaccatgtgcattcagacaggcttttgcacataggattcaattttacagaacaattatgtaacactaaaagcatatataaatttttagatttttgtttgtttccctctgtctgtgcatccaggcagcctattgcacatgtaattcatctttgcaaaaccattatgtaacacaaaagcatatattttaaagcagaggttgataatattcttgattatatatactctgatatttctctcaaaatagttctggcaaagcacagaagaaaataattacacatttattaacattaaaatgttttgactatacaccttctgattttggttgtattcgctccttcttaaaatagttaccttactacaaatgttactatattttaaaacagagggagtacacaagcacataatttgttagaaggatttgttgcacaaagctgcaaactctagatatgtgcttcaacaacaaaaatgaactcataaatctgctaagagcttccttagaaggataacagcataaactttgatgaaagatttttttttcaaaaacaatgatacaaatatagaccattagtctgttcagagttgttgtgataaataaaaacttagcctccaataataagatatttatttactgataatagtagcaatttggtgaaagactctactgcatatagagccacctttatttaaaataaatagaaaaggcaaagatgaagacattgccttatttattgatagagaaggggaaataacatcaacccaagcaaggataaacactaaaaaaccatcaatttgattatactcaataaccaatttcttgatggctatttattacttcctgagacaaattatttttagtttttcttctgacatgccaaaatatgcaggtactctgtgccaatgagcctctactactatggcctcaaggataccacatcatcctattccgttatctttcttaatataactcccctgttcaccttcatcctctcacttatgttcaggtaagagtctcactcaactagttgttgtatacgatgtactacttggtaactataggttccaacaacaacagttccatatcatgcaaaaaaaaaaaaagtcatacgggtaaaattcaaatcgtgtcgcaaaattaatgttccatctcattgaaacatatgtatgaacatgattataggttggaggcattcaaacttagaagcatacctggagtactgaaaatagcgagcatactgctttccattggagggacaatgcttataagcctttacaaaggcaagtcattgcatctctgggattctatcatacaacaccaaaatgaacacaagtcagcaaccaatcagctaagaggaacaattctattggttggcagcagcttcacctttgcttgctggtttcttattcaggtaatcataaacattgcttctaataaagtatatatatttagggtaatttttacttctttgagaaggtattttctagtgtaaaactcggtaccttgagttacttaatttcttaatgcccataaaaattctcatatatctatatattacagtaaattttatccccatacaatgacatcttataactattgtcacagtcaaagattctcaaagtgtatccatacaaatattggtcgtccatggtgacatgcttggttggagtatttcaaaccgcattggtcggaatcatattaaggagagacaagagtgcatgggagctaggatggaatctcaaccttgttaccatcgtgtacacggtataccttcaaccttcctaacccttgaaattaatttagtgagctagaacaataaatatattttataaaataagtttttttttctcggtgttcagtgatgcttaaaataagaaatccatttgcaaagaacattttgttttctgttttttggtgtccactaaaacttgaattgtattaactaacaagtttagagttatggtattattttgggaaagatgaaattttagggaatgcgtaggggactgtcttagggatttgacatgaaaaatattttggtgtagggggcacttgcaacagccgggaaatatatattgaattcatgggcaataactaagcgaggcccaacctatcccacaatgttcagtccattatcagtcgtcttcactgttgtgttggattcagtccttctaggaaatgatattacaattggaaggtcagttgctttcatttgtgtctatcatgcatgtttaatgttgcaaaaggaaaatatatttgatcagttaatgtggcaaatgtaatcctttgccaaactgaataagactaagtttacatagcaaaaggaaagtaaaccttggaaatttcttatgcatatttccaagaaatattatacataataatcagtacaaacaacggcaaaatggagaatcaaagaagtcggtgatgtgaatagtgcaagcactttcaacaattgcagcttgtccttttcaattcacttttacgtttacaaaaattgtgaagcacacaaaagatactagtataacatagatgactcttggaataatttcacacaaccacatgtgttatggtgcaagttatgaaaaaccacaagagtttaggactgcacataaccacaacaattatggtattaatgatttacaaaaccaaactcttacacaaatttagccattcttatgtgaactattccaccaatgattagccacactgaccatgtgcataagaatagctaagtttattaatagtgtgcttttatgaaaaactaatatcataactgctatggttaagtgccaaatgtcaaacatctatggttttttataatgcagaccataaagcatgtggttttgtgaaatttactgttttactttgtattcctcgaaactatatgaagtgtatttgcagtacagtttattttttgaccattggcagcaatagatgtaattgttctcctattctcaatgtgcagtcttctaggcacagcattggtgattgtcgggctctacctttttctctgggccaaagcacgagaaatacctaagaagtcaacatagtatattctacacaagtcctggtagctaaacaacacataggagttatttatgtacacaatgagatgtatacagcacagttatttaaatgcgaaagtatcatatacttgagacggatagcttataatgtttgtttatttgttgttaatggatactattgtatttcataacactgttaaaagaaaatattgttgatcagcccctgtcctcttactactatttctttacacctataaaagaacatgttggtggccatgaactcgtgatttcctggccatgtccaatattacattcgttcacttaggccatctttggaaactacgaatagcaaaacaaagttagaaaaagacaagatttaggtagtttgcacatgcaaaacataggttaaatccaaatttaaccgtttggacaggctatagaaaaaacacatgcataagagaggtaaaactaaagaaaattttctatgagaatgaacatcaattgaataagagggtggtgaactatgaatccaccaccaagtttcaataaaatgatctcaaaggttgaagccaccacacttagacatcatggcaacatgacttgaaggagcgatgagccatccgtgtcaactgcgcccgctaagcaatggtgattacttccgtatttcatagtcgatgttacaaaatatggatacacaaataactaataatgcagtattatatatttatagtatgcaccatcattattcacaactcataatcaagtgtaaaagaagcttagaaaataaattaaaaactaaattatacttgtaacattaaatagaattaatgattgctttccgtagcctaaaatccaagaaagatgtgaatcaagatttaatttagtattgtgcaagactggcacactttaaccatagcaactttgatcatgtttgatcgtcgcatttcactacatgcgacaccataacggacagccagagtccaaaactattcccctatttctattttggcaaaatttgccacatgacatctaaaaatcatgtaatttgttagaagacataaaaaaacgcgacactgccaatggacactacaaaatttgtgtaattagctttaggacacccgaggcaatattttattattttcggtgaaaaagaggagagagaaatttcaaaaggacggaaatgccctcagcctcagtacctgaaatccccatccaacttcaactgcggcggcggcttcggctggttgcggcgttgggaagcgacggcggtggtgatggctcggccggtcatggcgcaccaggagctcgccgcgctgcaggaccagcaagaccatgagttccgcgctgcaagagctcgccgcgcacgccgcgaactccggcgaaggcgccacgctgccgccgtggtgcgtctcgaagctgagccccacggcgccgtcgccgccgccgcaggccgcggtctgcaggtcctgttctccacagacccgtcgccatggatccagctcaaacctgcacacacatcaacaagaaaccaatcaacggcaacaaatcgatcaaatgcaatgcacaaatcacaatggcgatggagccgctcgccaccaccacccgctgctgcagccgctctgcaacgccgccaccgcagccacggcgcagagctcggccaagtccgcaccaccgacgctgcagccgcactagcagctgcccgctgccgccacgcatctgtccgccacaatgcacctgtccgtcgcgcctcgccgtcaccggcggtgagaccctggcggagcgccgcctctttttccgcagcgcgccgagccatcccggctcgggccgtcgcgccgttcctccgctccgccgcgtgcgtgaggaagaagaggataggagagagatgtggactccacttatgattaccaaatagtaatcaccctactaattacaaataaattagtccatgactcgtagacccatgtggttaaaaacctattaaaaattagattaaagataggttgtcgatgacatgtgggacccaccagtatttaaagaaggaaagagaaagagcaatccgggcatttagataaatatctcacttttttttttacctaaaaataataaaataatacgaccggtgtcctacggccaattacacgtattttacgtgtcctgtggcaaattttgccgtctattttctatgctccacatttcattaggcctaacagttgtccacaccacaccaccgccacgtgtatatatgagtgtggaatgctcaatcgtccctgataattgtgccaaacaagaaatgtttttgttcgtgtggttacacttggatgagggctatccaaggacactgtacgtctttgtaatgtagggcaattgagaagagaggtgcttcttgtcacgtattaatgcctggcagtttttaacattaatactaaaaatctcgcaatatgtgaatcttcttttcccgattcgtcatgcggtgcgtgagtttatgaccccagtgacccttcatcaccctagtgaccccaatgacccgtccgaaaataagcgcagccatgagtttccgtgttcaactttgatcgttcgtcttatttgaaattttttttatgattagtatttttatttttactagattataaaacatgaataatactttatgcgtgactcatgtttttaagtttttttaaaaaaaaattcaaataagacaaataattaaagtttaacacagaaatttatggttatgcttattttgggatggagggagtataactatgtcatgggctcatggctgcccctaccctagaacatgtctgacaaactgcccatgaacaaaacaatgtaatatcagtattgacaccgtgtttagttgcaaacttttgtttcaaacttccaacttttccatcacatcaaaactttcctacacacataaatttctaacttttccggtcacatctttccaatttcaaccaaacttttaattttagcatgaactaaacacaccctgagtttccttgcaatcatgtaacttttggaagagcgaacaacaaagcagtgctaagagcatctccaagagactctccaagctaaattttggccattttagcaaaaaatctcactccaacagtctcataaaaatctcactccaacagtctctctactagaatggctaagccaaatagctggctaaattcctcccctcaatggccaaacttggccagcccaaacagcatagctattcgtgggtcccacgcgtagagttttctctcaccctgcactacccgtgtcctgaggttaggatgcggtggtgggacggcacgacggcgagcattgccaaggcctcccgctcgccggccgccggcatcgagggcatgaagggagcagcggcagcgagatgttgtcatcgcccctcttccttgccgacgccgtcgcctccgccctcgaccgcatccgacgtcgccacccgcagccctcccatcgtcggccatccagcgccgctgtctccatccacgccatccagcgttgcccccaccgcctccactccacgggtcgtcgtagagagccaccaccgccgttgctggcctagagaagaggaaaagggagagagaggaggaagaaagtgtagtagaggctgacgtatgggtcacagtgtcataggctcataatggagagtccgagagtgtaaatggagaggctgttggagcgaggaatgagtttggcttgataaatcaactggagagctagctatataggtgtttgaagagtccgatttgaagaggttgttagagatgctcttagaccatgataatattagcagcatggataaaatgttgtcgattgaaaacctaatcaaaagattctcagaaaataaatatcacaggagagaacttgtacataagcatcccagtttaacgcaacttcaccataccaccacaacttaatgctcaaggcaaattccatgataaaaggtaacaaatggagattaatatttaccagttagcaaaacaatgaatatcagcacctagaaatagcaacaatccctgcccagctctctgggtagccaaatttcttttttgaaatatgcttccatcaccataaacaaaataaaccggtaatctgaaattaatcaaaaacatcggaattctgttcagtttgagagtagtctcgtagccaaattcagatgaagcacaacgctaacagagtaacaggtaatgaacaaatgaagtctaattttagtattactgattcagaagagaacagagagagagagagagagtcataatcagacactacaggggcaaacaatgattctttttcattgccttcgcatttaaagataaactggacaggaggataaacagtgagattatgcattaccttcatgcacacaaatattctcttgacagaagcctactcatatctacaatttccaacctctgcaacatgccatttctcaaaggtacacatgaaaactgaaagcagttcatcaaaatgaaaattgtagaaatataacttacggttacctgccccacttttctatacattgacatccattatgtgtatcatcagctttcatgttgcttggatgatttagtaaacatcatatatgctattctagctccattttggatttgtgggacaaaaaatagaatatggtattcgacaattcaatccttcaatggttcacaaagataaggcaaacaatcaaactaatccactctaacattggctcattatgatcaacatcaaaagtttcatgttggacttgctatacagctattcgtctcaccattatttttctcatgtgtcatcatggttgttccttttctgtaacatttccttcctcagatcttctgccttaatttcatttccatattttgagtaggcctcaaccatgatattatgtattgcattactgggtacaacattattttgcatcattttctgatacagatattccatttcatttaatctccctgcaccacctaatccgctaataagttgatggtatgttctcaccgtagatttgatgccatacttatgcattctttgctgaagatccaaggctttatcaatattgcctctgtaacagcatgctgatattaaagtattatagctgacagcatcaggtatcaacctgtgattacttaagctgttaataatttcctcagcttcagatatctgcgactggttgcaaaggccttttataagcaaattgtaggttactatacttggagatattccgttactcttcatcttctcaactaaaataaaagcctgatcattgggaccatgctctacgtatgcatctatgatagcattgtacacctgggcatttggtaaaacatctttatgaaacatatcatccaatatagctacagcttctgggatttttccattcttacaaaaagcattgacaattgaaccataggagacaacatttggttttagcccattctcttgcatttcggaaagaacaatgaaacatttctcaagttgcccagtccttccataagcatcaatcagcgtattgaaagtttccacagttggattcactccattgtcctgcatctccattaacagatcttgtgcattggtgattctttcagccttacacaaaccattgattagtgcattgtaggtaatgtgatctggcttgatatgccgcgacttcatctgtccaaaggttgagaaggccccttcaagctctccagtctggcaatatccattgatcagagtgttatagatcacccttgttgggactaaccctgcatttaccagtgactgaagaacctcttcagcaattgaaactttgccatccttacacaggccattcaacaagatactacaagtgtaatctccaattgtcactccattcttcaaatattttccaaacaatgaaagcattgcctttgagtcaccatttcttgagagaccatcaaataaaatgctatatgtgaagccatcgggcaccatcttttgtgatgccatttcatccaacaaggctgacgtctctcccatcctgccagcacggcacagaccggacaggagcacattatacgtaatcgcattcggcttcaagccatgacacaccatctgatcccgcagcctgaaaccagcctccaggtcgccgcccttgatgtgcccatcaatcatcgtattgtatgtgatatgattcggcagcacggccctctccgtcatttcatcgaacacctcaacggcgtcaccacccctccctgccctccacatccccgcgatgaccacgttgtacgagaacgcgttgggcggcggcgcgccgtcgcgtcccatccgccggagcatcccgacggcctcgccgaggtcgcccgccgcgacgcacgcctggacggccttgttccacgcgaacgtgtccgggcgcgccccggcggacgcgaggatcccaaacgcgcggcgcacgtcggcgtggcggccgagcgagaggagggcctcgaggaggaggttgcaggaggagagggatggcagcggcgcgcgggcttcgtcggcgaggtcggacagaagccggagcgcgccgtcggggaggcggagccgcgcggacgcgacgacgagggcggaggcggcgtcgcagaggaaggaggaggccggatgagggtctccaggcgaggcggatgcggatgcggatgcggcggcggcggcgacggcggcgagggcgtggtagaggtcggggacgacggaggcggcgggcggctgcgcggtgaggaggagagacttggcgaggtcgacggaggcgtggaagcggccggcggcgaggagggaggcgagctcgtggaggtgggtggcggcggccgccgcggaggtggagcagagggagcggcgtgggaggaggaggcggcgagacatttgggaggagcggccttcttcttcctcatcagttcctctctctccccaaaggtttttttggagtttggtggggtataggctgtgttatcttcaaactttcaaaaattgcgtgacatcaaatgttttaactttcgaaaattagtctacgtttaatactgtatctgtatacgtaaaaaaagtttgatggagaaactaaacacggccttaggccgggggttctgcagtgtagtgtccgacttttatggcttttttgaaattcaaaaaattgataggatttgttggacgtagtttgtcatttcttgacgtttttattgtttagtaatatcgccaccatcaccacttcattaacaccacttcggtgggagatggggaactagggattggtgtgctagcagagcaaaagagggcagcgaggcgattttgccttatgctggctagggagattgggatgggtagaagatggatgggggaatttaggggcggcatgagtggcttcgaccttacgggagctccgaggcattttcgcgtgcattgggcaagatttggcggctaggagagggaggcggtgcacaaagctgtatgcggacggaagaggaagacaaggcgttgggtgcggcgttttcgtgcaggagatcgaaaggggtagaggtatttttgcacaggggcggagctagagaaaaaatgagggaggtttcctgactttctctgtgtaataccggtatgtataattctaaagtgatattgtactaaatagttgcgtacccaatacttataaacatcatctctctaattgatggcgatatacaacaagaaaatgcatagaaaaattaaaaatatgtgtatcataatgaagaaaccatcttataacttgccacttgcccctccgttgaatgcaagcaacaaacgctaacttaatcaataatcatgggttatgggtagtccagcaaaactgaaagaggggaacaacgtgacttgacttaccgattagattttgaggctgcggcctgcggaggtggtccaggtggagtaggtggcaaacgacgaactgctggccgacgtcgggcatggtaggggtaggcgataccggcggctggcacaagggcactagggcaggttgcactgccacaggcatccagggctgatccaggtgatacggacgtctccgtgtcgggcaagatcagcggtagatcgagacggcgagagattgagaggcgagggatgagtcacgcgttttgatttttggaagatggaacgatgccgccctgatttctggtcgccgattcgccgccctggctccctgatgagttgtcgcgcgcgcatggatcgatcaaaacacgtgcagtgcgactcctcatctcctctcggctaggccttctccaccaatatagaatctatgggctggccggctgggccttatcgagtagaagttttgggctagacaaatggaggggttcctcagtttgggctagaggggtgcccatgtggtggaggtataggggttacaagctatttcgaattttaggtcgggttcctgggcacccccctgggtctgttgggctccgcccctatttttgcatgcgagagaagaaagaaaaccgagcgaggcggcagtgtttgcttcggcgcgcgagggctgagaggagaataggggatccatgtgtggcgaggtgggcggaggggatcgagagggttctatgtgggacccatataaacatattttttttatcatatcttatggctgcacgcgagcgatacagttttgggagctgtgcacgcgtcggtgctaaaacaagcgcccacttgtttctttctctatgattttctttccttaatcccagattaagctgattaacaagttttggagctggcttaataatgctattttactgctctaagggcctgtagcctagtggttacaagagcctcagtagcaccttagatcctgggttcgactccccgtggaagcgaattttccaggatttaacggctttgtgctttcagtggtaggcaacgtacccgtcgacagcgaggcgcccatggtgacttcgtcaatctccaagatggatttgccggcccagtcttcgaaaatgctcacaggggtagggtttgcgtgcgttcataggggtgagtgtgcgtacgttgtattgtgtaattctaaaaaaataaaataaaaactaatgatagtcatactagcaaaagtgatgaggtggcaaataaatacgtggacaaaagtagcgtgtgactaaatagtgaccaagtatacataatcttctatactactccctccgtcctaaaatataagaacccatctgatcctacgttcttatattttaggatggagggagcaataagcagcacctgcttcttccgatcgaagtagtatccaagtattttcaggatttttcttgaaatcatttgagcattggaagtatttttaacaattcaaagatcatttcagtgattattttaattggaaaaggtttttaaatcctctcctaagccgttgggttgatttcagcccaacatctctctccctcgcgcgcgtgctgtgcagcccaagccaagtcgagctgctctgatctgttctaagccatccgaaagtctaatttgcctccctccttcaatcgggccgaggaaatgaagcccggcaggaagtctgttttgcatccctctgctacagtgtcgcccctaacctccagccggtcgatctcctccctgccgtgcccgtgtacagcgccgcctccccaccaaattcgtcctctccgttgctcctctttccaaattagttgtgggaatatattcctctcgatctcctctatcttgtccccaagaaacccccttaaattccatggtatatcgcgtggattcgacgcggttttgagttcctattttccggcgaaccctaactaatccgtcgccgattccatccgttcccaagccgatctctccctcttccggctataaatagcatcccctaaccgtcctcttccatttgcctctagtcccaagttgagccgtcgcccgtagcgccgccgccacgttgtcttagccgccgccgtcgctggcgatcctccggtcgcatcgcgccgccgctagcgccgtcgccgttgccgtccgtcgccgccttcgggtgcgcacggagaaggagtacctcgtccgccccttcgcagccgccgaagaccgccggagcgccgtcgtcgttgttgagccgaaccgtgccgccgttgaacctcgtcgccggtcgtcgttcgtcgtcgttcgtcgtagtttcttgcaccggtgagttcgcgtcgtcgtcctcttcgcgtaggtgtcctcggatagcccaaccgagctctcttttgccggtggtcgcgtggaagcagtgccatggccggcgatgacgtcagcgatgacgtcataaatccatttttcttagtttctttattagatgaaaatcgattagacttcggaaattcataactaaatcatcgtaactcggatttgagtggttcaaattgctaaattcatctaaaatctagatctacatgttaaaaatatccacatgtactgtttatgcttgttttttttactgttttgttgattttgttcttttgctttagtttccgacgttccggaggagagcgttttcgttgaggaaggttcggaagtgtttgcggaagatcaaggcaagtcacacagatcccaaacaaccctttgagcatgttgaacctgtttaaagctattgtttatttcaacttatgcattattttcgaatgtcaccgggtggtgagcctttcccaattaattaatagccgaagatgactttattttcctatgggttataatttgattagctagaaccttatatattggtttggttcagttaaatgctatatatatatatatatataattgcttagccatgcttagaaacattagctcattaatgggatgaatcatatatactacattattattcatgattatatttaatggtagctcacgatggttaaccgtgttatgataattaattgataattaaaacttgataatggtgggttgtgagcacatggttttgaaggtcgtgttcatggcaattaaggaccggttcgcgagctactattgtgagacattaaccgtgccaactacaagccagcgtgggcaacgactttaccttttgtataacatgattcattgcggggtgccagactgtgaagcggtaagaagtccgtgggggtcgccggggagtccatgcctctggttatatttatagagggggtgattatgatctaggaatggtgcactgtggtgagttgtgttgtgcaggggtattgtcacagcctctattcgggtactttccagtatcgcgacgcatggtagacataatgttgaggctgtgtcttgtgggtacagtggtacacctctggccagagtaaaactattcgaatagccgtgcccgcggttatgggcgagttgagcaatgtttttcgtgattagtctcacatctctcacaataattattgatgctataactggtaataatttgcttagctcctggtttggagttagatctatgcagccgggtttggttgttcaggatggttgggcctgagcagcatgggtgtgctgttcagtgttgattaaaattgatgattactctattgttttactactcttaaatctttgctaaatgctgcttttgcaaatgagactatattatgccatcatttggtatccttgtgcacttgtatatttgctgtgtggcttgttgagtatgtcatatgctcatttttgtaataatcaatcaacctcagttgaagaaaaatgatctagaaggagaagacatttggcttataccccagttgagttgcctgtgggagtggagctgaagccatcgctagaccgttaattccgctgttgtttttcttttcttctgtaattatgtaacgttattattatgatggattcgtatattaaattgtcagtttgtgtacctcggctaatttctggacgagggttttatgcacaaataagttcgggaattactagtgaatttccgggcgtgacataacctcctcctactaaataagtacatcttctgtcccaaaataagttcattagtaaatttatatatccaacgtttaaccatccgtcttatttaaaatatttttattgttattagattattaaacatgaatagtactttatgcatgccttagtttttttttataatttttcatttttttttaaataagacataaacccacaaatattttgagacgggggtgctgacaggaagaaagatgcaaagaaaatgataaacgaaaaacatacacaaatatgtgtatagataatctaatagtaatagctaactattgtacacaatacctcttcttaagttaactctattgctgatgtggatgtttttagctaattactgattacagtacactattaactttgctctaagagcactccaatacagtgacgacctcatatgtcacgtggaatatactactatcatatatgagccattcattgagacaacaaaggctactttacgccttgtctagattcaaagtttgatcttcaaattttcaattttttgtcacatcgaaattttctatacatacaaacttccaactttttcgtcacaccgttccaatttctttaaacttctaattttgacgtggaactaaacacacacttaatgtgttttctttccatatatcattacttgtacgtcagccctttcaatgttccttttttttttgacaggaaacaataggagaggctcctactgtgctaataaatatattaataatataaggagtttatgtacagagaaatatttacaatggaaatagagaatttacagaagaattagaaaatagagtcaatccatgattgataggaaggtttatcctcctccagtcctccttcactctttgcataagaagagtgaaatcctctctgaaagcatacttctggttattgaaagatgaatgaatattgtcaaagatgagcgtatttctttcggtcgatatctgccagcaggccgtgcccaccacttcaacaaaaaacggcttgttaaaattaatataagctgtttcctcatcccagttgataccaatgaaattgcagcacaccttggcataaggacaaccaaaaaacaaatgaaccatatcttccaaaacccctggcatgcacattctacaggatggaccatcttataatcaaataagttttagacctatggactttgaaaaaaccacggatgtacatgtcagccactctttcactctcttttcacccctcacctctaatcccctccctatataggtcccgttctaagattttaattttcgtggcacgcttttcagattgctaaatggtgtatttcgcacgaaaactttctatatgaaagtcgcactaaaatatcatattaatttattttttaagtttgtaataactaaaactcaataaatcatacgttaataccatctcgttttgcgtaaaaaaaacttaatcttcattttcatcttgagaagaaaagaacaccaccatagttcacgtcctttcccctctgctatcatttcctcctcaccactgccccgctgccccctcgaatgaggtggtagagcccgcaccatcctcttcttcatctggtgctgcaaatcaatgttatctctttaatccccttctccttcaagtactctagacaagtcgacgagtcccccgcctccatcgccaccaacctccaggaccgatgagcggatctagcgatgtggttggtgagctctgggaccaacaaacggcatgactactcaatccaagcagcgaggcgagctgatgctcgtcagagttggccgcaccagaggtggtcgaggacaacctccaacttctaaattaggcgcaaatgaggggatgagctcgccggcttatgagtggcaataggctcctctccctcctctgttgccctcgttctcttctcctatcatgttcaccgtgtcattgctgttcgggtagggttaaggtggagataagggtgtggaccacactacgggagcatgacctcacctaatacggtgtcccgatgcgttcgtcccctaaggccttgttcggttaatcctcataagggagggatttggaattattatatggtgtgtaattattccccctcaatcccctacaaaccgaacaacacctaacagggacatggatcattctcgaaatagggttcgactcctacgtggcgagcctatgcctcgtcttgtaggagcattgggcaaggcgtatgaaagcacaaattgcctgacaaatcggcatgttgcaatttgcaaatatttgcccacaatttccgttccgcagttatttagcgaatccgcttaaaaaatagccagctcaacacatctcgcggtactgacatcttagacactttcgccatccctttccactactgctactattgcacagccgcacaacccgacatcccctgctggcacaagaacagattaattttcggctcgatcgacgccatcttctattcattcgatcttgcaatcacaaataataaaagcagctcaacgagcctagatccaagatcgaaaatccttcggatggatcgcaaactgagtcaccaaacgcttctgatcttgagctacgagacatgtcccagcatttgaatcatatttgaatcacaaattttgtagtagtatgtactacaagtataagtaaacaatccaaaattgttgtgtgttgtagcgttgatccgtcacaatgaacaaacaaatcccctatctaaccaagcgaaaccacgcgacaaggatcgtgtagagtggatcggagcggcagcgaaacgcgggcggctaccgtgccggcgccggcgcggtcgccgcgacgccgccggcgccgcggcggcgcagcgcgttggtgtagttgatgatggagttgatgcgctgcagcttgaggtcctccctgaactgcttgatgaaccgctcggcccgcgcgttcacctccgccttcccttcctctacctcctctgcccgcgcccgccgcggcttggcgtccgccgccttcgccgccgccgcggcatctggtgcggaacgcggcgagcgcgcctgcgcctgctgggccagcgcgtacgcctcgtccaagctgatggactcctcctcctcctctgcttccgcctcttcttcctcgttcttgatcgccgccgctgttgcggcggccacaggcgagctccgtggcgccgccatggacggcgtcgtcgccgccacgacctccctcaccggcgccggcggctccggccggaacggcgccgccgcgacggcctccaccaactcctcctctgcctcacgcgggtagtagaagtaatcggaccccgacgagacgtcgccgtggacgtggagcggcgtggcgctgtagtcgccggagaggtactggaaggggaagttggcgacggaccggagcctctccatcacaacggtcgacgcggtgcgcgccagcctccgccgcgccgccgacgacggcgtcgaggtcgtcccgcccacgccctgccccagccacgacacgacggcgatggcgccgacgatgacgttcaggaacacgaaccacgccgccccggagctgagccacgacagcatctgcaccaccgccatagacgacgacgacgatcgatgatccaatccaagaaactcacctcacagctgagtgagctcgatctgttcgaccggtgaatcgaatcggaggaaaggcgatgatgagatgagatgggtgggtgggtagcgagctcaggtgagctgggcacatggttatataggcaggtgagtgtgtgtctgttcgtggagaggtgggtgagaacggcaggagaagaaaggcggcaccgcgtcgcgtcgcgcgccgccgcgtccacggttggcatcgcgtggctcgtagcggcaagttggcaaccgctttctgctattctatcagcggcagagagcaaagctgcggaccatgcagcagcagcggcagcggcaggaagattcatgtgcgtgtacaggtgaaagtagatagtactagcgtgcaaggcttgttctgctctaggagttaatgaactggatcatgcagagtcttgaagaaaaaatgaacttgatatcaagccagacgtgacagccagcgacatgtcggtatttagctggtttgatggagtatttaggctctgttcgtttcgtggagttcccaactcccccatctcattttccgcgcgcacgcttttcaaactgctaaacggtgtattttttgcaaaaagtttatatacgaaagttgcttaaaaaaattatattgatccatttttgaaaaaaaattagcaaataattaattaatcacatgctaatggactgcttcgttttccgtaccggagggatgggtacccaactcaaccaaaagaacagagcctagggtgtgtttagttggccaaagaaaatttggggtgccacatcggatgaccagatgtcggaaagcgttttcggacacaaatgaaaaaaattaattttataactcgcctggaaaccgcgagacaaatttattaagctaattaatctatcattagtatatgtaggttactgtagcatttatggctaatcatagactaattagactcaaaagattcgtctcgtgatttccatacaaactgtgcaattagttttttctttttatctatatataatgttctatacatgtgttcaaagattcgatataatgtttttgaaaaaaaaaattggaaactaaatcaagccatactagttttgactctgagttgtcgaggctttgaccatttggaaaatctaattagatacatatcattagatttgtaatcaattgaactcaactgattatattaattgtctagtagtattaaatttaaattaaatttgtctactagtaattagcaagagggagataactaatagagattgagtaaagctggtgagttttcaggagcggagggagcaatttgcaggtttttttggctgttcttgtgaaactactgaatttgtttttacgcgagtcaaacaactcaattagtattcaacatggaaccgtgttagtactcaacagggaaccgtgttaatatataggtggcgtttagcgtagtagcgtactactgtacactattactctctcgttatcatctacggagtacagctgcatggccatccaggtggaaatcgttgggaatcgttatcttgcaaacaacttcacctgacatgtaaatttaaaattaattgttacctactcgtaggttcttctgttcctcatttgactcgtgacctgcaaagttcaaagctatcatgcattgtatatgcccaataccaagatcatgatggccggtgaacccctgtagattatttgcaaagttaatccgtgtctatcgagtgaaacatatactattctgctacacgctattcgcctgtcaattagctagtaacttttccccgcaaaaaaaaaaaaggtactaaccttgatactttatgctactcgtctgcttgatgctaaactggtgccttcgtgcgaggaaaacgtgagttgtctaatatgctacttgctacactactttattctaagtatcatgcttaaattagctagagcgatcatcgatgggctcgccttgtggacgtccacacacaccaccccagcgaagatccccatgttcctaatcaattaattcctgattaattaattttcccattttttctttctcttcatttcggacggcctttcggttcaaagtagagtcctccactgcagcaaatgatcggctatcgcctctccacttaaatcaaatccctttaatttctctttacaggaaagatacgttgttgagaccagcagctagcggaaccggccggacttttgcgatcggatctagttacaaatattgtttgattaatgtattacacgtgtgttgatctgtctatttgggtatcgattaaaatcttaatggccaaagatatatttggatcattgggtatatatgttgttgtaatcatatcattattaattgagacgacatatattattttcttgtaaatatatatggaatattctgcatccccgcactttcaggttataaaattgtactggatttcataatcagctgttagccatatagttacatgtatcatttacatgttcatgctccgtaagttttctaatattcaaattagaggagaaaaaacagaaatggtagaaattctgagaaaaaaaacaacgatatctaacttttaatctgcctaaagtttcttacttatccagaatcttaatactagagcactccgtataaatactaagcaacggacccacaatgataagaatatatcttacttaaataagaaaaataaataccaaagaaatcataaatactgatacttatataaaagaagtatccatcgagttacaagatcggagagaatgccaacaactctaacactcatccgagattccaatggagagagtgccaacatcttcagcacttctccagaactcccctagaaggaattccgacatatggtgcattccttccagcgcttcccctcactctcatcctatactctaaattctaactctactagagtgtaatctaaatatgaaagtgagttgtactccacttgagttgtgttgtgctttgagaatgaagtgataactccttttataagctctaacgacggttactatggcgatagtgaggtcggttcacccacaaccatcatagggaaccaatcaacatcctccacgtggaaggtgggggatgagtggctgcaagggtggtttagccgaaccatggttcggccgaccccctagctccaccatatcccctctcctttggcctggtcactatccagtcccctctcctttggcctgttcactatccagtaggaccttatgacagtgcccattggttgacccattttgaggtgatttggtcagcttgtaggccttccattccgtatacatgcgtctgattggctggagctgtgtttcttcgcatggcgagtggtaattttcatacaaaatccatgcattcacatatttcaccaatatttgtggaaatgatatttcaccactaccactaagtgtgatattttatttcaattgcttttatgcaggaattggtgatcagatttgacatttaaggatcgtcaacaggttttcctcacttccacaagggaagaagtaagtcagtgaaacccgagctagtttctaggagtttgcttgatagagcaagcttctccaaaggaaggtctaggtgttttatccttggaccttggtggttgggagatacctattagcctttggtcgttccttggagactaaagttttttcctggttattagcttggtgaggcaagggaacaatcgagatcctgctccttggagttccttgacatagagtatctcttataccgaattccatgcggattcacgtgcaaatagcccctccacgtggcattgtgggatttcagctttcgtccctctccttagccgtcacatcgcggatctcgatggatggatatcgctgcggtggacctcattctaaaaaatgaagtttgagggggtttttatgcaaaagcgcttaattcctacccttcccgtggccatcctcggtggggctcctcctcctggttggctggtcctcgccgccagcctcctcacctctcctccccggtccggtgcccccctctcctgttcccctctccgccgacggtaatagctcggtagggtgacgagcgaggaaaatctcgacggcggcaacctttcctccaccactacctctcccaactcgccggtgaggagctctcctccctccctccctcccatctaccggcgaggccctctcctcccacgcgctggcgcgccgccctcttccctcccgtgtcctcctcctcgtctctggatggggcgaagagctcggtggcggcgcgcgtggattgggagtagctcggtgtcggtgacgagctccggtgatgccgccacctctaccctcaagctcggcggcgtctgcgcatcgccgcccatccacctccctccttgccgatgcattcgaccctgtgggccagcggtcgagcttggcgccacgctcgactgggagggccgggcgcgggggcttggcttcgatgttgaggtgctcaatccactggcgtagccgtcctgtgcctcacgccctcaccaccaccacctccattctccccactgtcgcgcgatgatgacctgtgcaatcaagaaaggtggtagggatgcgactagctcaaaccacaacaacgagaaggaagtagtagaggtgaggtagctctgcttgtcatagtgtccttgaagaaaccaagatgaatggaataggaggctgctgcttgtcgtccaatgtccatccgcaacctgcttgcttggagcagccaccgccgccgctacgatatgctcgctgtgtgtcattaccgccttaccagcaagcagttctgtaaggtagtgtttggttggatggtttcggtgggtcgggtcggggccatccctttttttttttggagctgtttggtttgaggattaggtgggttgggttggttaaaaaaggaagagtaaatttcatagaactacagatactttgcacaatctatcacaaaactacagatttaagaacttgtttcacaaaactacagattcattgtattcatttaacataaaactacatgtactttgcacaatatatcacaaaactacagatttaagaacttgtttcataaaactacagatttaatatcctcatttatcataaaactacaagtttagtgtctctattatcacaaaactacaggttgtagcattgtaaaaatctatagttttgtgataatggatacactaaatttgtagttttatgataaatgaagacactaaatgtatagttctgtgatatacactaaatctatagttttatgaaacaagtttttaaatctatagttttatgatagattgtacaaagtacttgtagttttgtgataaacggagacactaaatctgtagttttgtgaaacaagctcttaattctatagttttgtgataatttgtgtcaaatacctatagttttgtaaaatttacttaaaaaaagaatattccaccaatattcgggatgaactgaccacccaaaaaagaccggaccgatcgaacccacctctctcccgtcgcgcacgtgagttgcacgcgcccgcgcgcacgagcaggcggtggcagctcgcatcctccctccatcctccatcctccatccccctcctctctgaatctctactggtcaacatctcgcccttggctgctgcagcaacaagaggaagaagaaccggcgcccccacctggcctcctgtgtagagtaaggtgatagaggtttcagatgttttgagaatattctctgctcatgaacgcatccagtaactgctggaggagtgtggagaaggcaagcgattgatgaatccggtggctgggaggaccgatctactgcagaagatgtggacctgacactgggagcaggactactgagctgggaatttgtctatgttggtagccttaaggtatttttacttctgcagttaaatactaccaatatgatggcatgccaatccatgaacaaaaacattaacatgtaaatgattgaagcacctgtgtttggttgccctgcttgtttaattgtgcttctccctcagttttgtgcttgccctgggctacttgctgttcctaatgctactgcttttaggtactttactgctgctatattgctcatcttaaagatcacaaaagtaacaaaagcaagtactttttagttcttaacaatacagcactctgcatgtaaaatggcattggatttttcccgttcccctaatttttttgttcggaactgttgatgcatgcacttttcttccaattgctttcctgttctgacatagagaactggccttgcaagctgcggtgctggtttacaattcgttaatactacgttggacggttggagtaagaaactggtggttcacatcaatgtcaatgggggagaacactttatttgattttaggaatactttctttcctgtttttatttaagtgagtacaaatcaggcaacatgtatttattctgaaaacccaacaactaaacatatataaaacactatgaggtggtagaagtactgaagctatttgtagaccacaccaaatgaggaagatggtattcgtagaacaagtttattattgttccaaggagatcaatatatgacacttgcccacaagccttgttcccctggccttggcctaggttgataagctcgcgagagcgggacaacagggcatggactttctatgcttgtttgagcatatccttcagtactacattattttttttgagaaggaaagaaaaaacaaaaataagtctggctaatatatatgagaatggtccgaaaaatctatcttccattatcatcattacttttttctcggaaacataatctgaacagacctattagatattggagatgggactgtcgaaaaagaaatataccggtatcggttggaaggtgaaaattcgtatcagaaacagtaaatgtcagttctgcaacaaagaggaaagtgtagagcatcttttctttcattgtagcattgctaggtttgtatttggaacgctttcaatagtgtttttgactgtaggatgctgaaggcatacaaaattcgtatcacaaaaaagcatccggggcctttttgtgattgatgcttttttgtgattgttgctgaaaataaattactaacaaaataaattatagacatgtggagggataaaatgaagataagtactttcattactttggttcattggaatttagaatttgtgtgcacatattcgactttcaacttatgtccatgaactcattttcttgcagccttcaattgatctgaataaagcttatgcccgaaactatgtcatattttagagcaattagatattgtaagtaaattaaattcacattacagatagcagaaattggtactgatttgttatgtcgttagcattatttactctacttacggattgtttctgcattttctcagcacacaagtggaaaattaaatctggaaatgcatgcatcgttttgtaattttaataaatttgtaaactaataattaacctatggagagcttcctcgtacatttgtaaactaataattaacctatgtagtgccgtcaaaagtcaaaactcaagtacggttgaattagtaccatgcttaatcgtagcttcatgcactttttttattaattttggcaatggtctctatgcgtactcttcaaatcatgcaatgccatgatactaaataggaaaaagtacgaattaccctcccccgaactatcgtagttgtccgaattaccccctaaaccacaaaaccggacattcttcaccaccaactatgcaaaccggacgaattacccctctcgaccaaatccgcggtggttttggtctacgtagtatatgtgtggcagtccagccagcattctatttataaaaaaatgtaggacccacctgccatatcctctctctctcattctcagtctcactcttcccctctctctcatgtgcatggcagcaggcgggggcggcggcacgcacgcacacggacggggggctagaggcggcggcgtggccgagacgcacacaacggcgacggcgcgtggcgcaggcgaggctcgaggggagatggcgacggcgcgcagcgcgagtgacgccgacaggcgacacgacggcacggggacaggggccggaggcggcggcgaggaatgacgcaagaacaccccctccctccggggatacgatggcgatggcggccgcttccgccttagccatgcaaggcaggccgcctctgccgccacagcggggccggcggcgccgaagcgggcgctcgtgctggtcgcggatggcacagtgctggtggaggcggtcgccactgccgatgtgctcaaccgcgccggcgcgtcgaggaggacgagcgcgctgggcggagggaagtcaaggccttgagcttgcaaccgc

SEQ ID NO: 9231 - DNA, 17509 bp, Oryza sativa
ttaaattttttgaataagacgaacggtcaaacatgtgctaaaaagtcaacggcgtcaaacatttcgaaacggaggtagtagtaaatttattttgttcgtgccctcaaatagttataaatagattaagaatcatccatcatctacagagaaaacagtagaatcattacaaggatatcgtctgtcgttctgcaaaaaaatatttagataaggcgagaatattaattaacaagccaactaaaagacaaattataagtgatggtcacagaacgcaattaacattctagttttgaaatggttaaatcaacaattatattacaataatccatgtaatttagggtgtatactaattaacaaggaactttaacagggagtaatgcccactggagaagagattgcggtgaagaagctatatgttatacctggtcttgatgatgtgcagtttaaaaaggagtttaataaccttatgaaagtccaccatcagaatgtcgtaaggctagttggctactgctatgaaacaaagaagaaacatattgaacgcaacggagaatttgtattttctaacgttgaagaaagagctctctgctttgaacatgtgcagcttggaagccttgacaaacatatttctggtacgattttgctcaatctgcttaaaagtggtttcgaccatgctgtctcagacaattgagttatcttcagtgactttgtgcagatgaatcatgtgggcttgactgggacacacgctacaagataattaaggggatttgcgagggtttaaattaccttcacaatgggtccagcaatcctatttatcatctggatttgaaaccatctaacatattgttagataaaagcatgataccaaaaattgcagatttgggcctgtcaagattctttgcgacaacaaaaacccatatcacaagccaaattaaagggacactgtaagttgcaacctcatgattcatatttgttgacgtctcaatagaattatgtggacctttcacccggaaatgctacctagcgattgatcgctaggggtagctaacagcgatcagattagatttcctcccctccacctggtttccttttttagcaccgcattactttcctattctagtaaatttatgcaactaaagtttatacaccttaagtttacacacctaaagtttagagattcaaagtttataaattaaaagtttatatatccgatttaaatttaaatttgaattcaaatatttatatatatatagtatttctatacatctaaaatttatacacctaaagtttatagacccaaagtttataaatcaaaagtttatatacccgattcaaatttgaatttgaaatatatctgattcaaatttgaatttgaattcaaatatccgattcaaatttgaatttgaattcaaatattctttttatatatagtatttctatacatctaaagtttatacacctaatgtttatagacctaaagtttatagacctaaagtttatatatctgattcaaatttgaagttgaattatatctgattcaaatttgaatttgaattcaaatatttttcatatatagtatttctatacatctaaagtttatacaccaaaggtttatagacctaaagtttataagtcaaatattaaatttaaatatttatggtgtagtaggaagagaaaaaggggaggaggaaggggggagaggagggagcgttggagtataggggagggcccccagcgattacccgtccattagttgtcccccctttcacctcacccataagacaatatctatttatactaagcggtgtggatctagaaaattaaataagacatattggaacctcaaaaaaagggaaaataaaacattggtatcataacatgttattttactggtgccatagcatgttaatcatacttaaatcacagtgttaataattctatgtataataactttagctattgagtttcctaaaattaagtcatcgctggatcatcctttctccaatagatttccacgtgcttatactaccacctaagcgactgataataaaatatgttattctaatagtagttgatctcttcagtaatggcttagatcacgtctaccggtggtaatactagctagtagtagaaaacacacacacacacactatcagtagaaacaaccgtttaagtattcggttcattttgttttgtgtgttttttttataacgatatataatttgtgtttatatactatgcagcggatacatgccaccagaatacattgaaagacgccaaatcaccaagaagtttgatgtattcagtttaggtgttataatcatagatataattgctggaccttcgggctactctaaatgtgctgaaatgacttcccaacagtttattgaacttgtaagaaaagttccattttatcttatatcgtgaacaatagttattttagtataattaatttgtactgtatgcacgcatgcttacataccttctctactgtattgttcaattttgaaggtacaaggaaactggaagaaaagactgcatgcagcaacatcgaggtatgcatcgcaggaagcagatagcctacaagtgaagacatgccttgaaatagcattaagatgtattgataaagaccgagcaaaaagacctactataagcgatattgttgataaaatgaatgagatcgataccctaaaaatgtcacttctaagcaaggtatattatctccaaacttgtttggtttcgtactacaccaaaataatgccaaaatttgataatgctaagttttaattatttttttgactgaaaagttctaataattttgatacagtaatggtagaattggttattattgtgtttagtaatttgttaccaaaatattataatgtgatttaggtgtatatggtattaaaaaccaaaccaatgtttattcatagtacgatacccctccatcccaaagtaaactcttagtttttcctgaggagattcaggatagaggaaaaagactataatacccctcattaaatgtgatatttggggagttacatggcagctggggataattaagactaagtgaaaattaaatgagaggtggttggtgagggatgtactctctccggttctataataattgacgtttttgacaagattgaggtgaaacttgtataactttaaccatcaataagttttaaaatatttagtttaaagaaactagaacaacatatatagatttgcctttcaaagcactataacagaattaaacatgtatttatttattatatatattataatagaaaaataaggtcaaaaatatattttgtaaaccgtgtcattgtccaaaacatcaattaaaataaaactagagggagtagtgatctattgagacaaatttcagatgctaaaagtggccttttattttgggacgaactagaaaattttgaattgtttaattaatgcattatatatggtaccataaccacattttatagtcctacaacattagtaatatctctatggatcttcgttgcagagacctgagcctagggagtttcttgggttcgaccctctagagctacgcttcccattcgagactaacaaggcgatatcctgcgtactgcagctaacaaacaagtcagatgacatcgtcgagttctatgcaaacacaaacaagaagaagtaccaaatacacagggaccaaggagttatggcaccatggtctaggtgctatgtcatcgtaacgctgcaaccacaggggagcgcaccaccgaacatgcagtgcgacgatatgttctttgtacggagcactagggtgagggagacagacatcggctcacttgacattaatgtcactgagcagcacttggaaaaacagatgggtgaggttaagtcattgccgattgtctttgttccaattcctcagcctccaacaagtattgcggattaaacggcatggtttgaggcatcatggagtaacatcatcaatttgtgtcggcatttgatatgcttacaaatatttaagttgttcgatgagttacttttttggaatttcaaattcactactcgatgtgatgttcaaaatctcgtaaatttgtgagaacatatgtatcatgtttatctatgtaaaatcaaagtgttttttattcttattctgtgataaataaattggtatatatgattattggttctgatatttggagattactgttgtttgctaacaataagtcaagttggagataacttgtgctcaaaatatggtttctttgtttgattcatgtgtaggtgacttgatgcctcgggagagtattgccggtgatggatcgagagtcgacttggacataagacgacgtccggacggtcagatatcatgcgggatacttaggctagagttcaatgcgcgtggttggtgaagatttcatatggcatacaatggagatattgtgtacgtatgggatgcagagtcgaatttggaaggaatccaaatttggtacaattggagtttgtgaagtttatttcttgtatgggaaggtttcttatgaggattaagacttcttgtatgagtttggttcgtaggtatagactgtctacctcatatataaatagagagggagcatgaggcttcttggtatcgcttttgaaagcattgagtttagagtaagagagttagtgtttcgagtttagtcgagattttcatgaagagtgctgttgttgcaccttgttaacacggagagaagtaataaagttgtcatctacatatagagttcttcgatttgtgtttgctcgggttcggcggtctaaccggcgagacaccagcgatcagaccggcggtatcgcagcggtcagaccggcggattcaaggcagtcagaccggcaatggcaacagggagcagaggcgacttcagggcggtcgaatcgagcgttctacatcggtcagaccgacggcttccaggcggtcagaccagcacgactacttcggtcagaccgcgatctgtcaaatttgagggtaacttttaatttcgctaaaagttttggtttttcggtacaccaaccattcacccccctcgggttggcttagttcttgctattcgatcctataagtggtatcagagccttgttttcttctttggattttaaccgatctagagttttagccatggctaacaagttgtcacgcccagaaatttaacccaaatttccagactattttgcgtattaaatccctgtccaggaccagccagggtacacaaaacgacaagtaatatacagttccaaacgtaaataaagcgtaaaatacttacggaagaggcacttagtcctcacaccgaaacagaacgacagcagcggaaaaaggcgatcctagcggggcttcagctccactccacaggcaaaactcaactggggtctgagccttggtcttctaactttgtcttcagctcagaagcactactcttctgaaaagggggaataaaagcaaggctgagtacagccaccgtactcagcaagccacaccaacgatgcagacatgcaaggggatacaaggaggggtttgtggctatttgcataaaggcagttgtaaaacactttattgagcaaaacagtaaaacggttgagtaattaaagtaacattaaatctccactgatcaacgctacaccacgttgaacaggcccaaccaacccacctgaactacagtgtattgggtcgatttattaagatgggactaatcacggtgaatctggtcgaccgcccataaccgcgggcacggctattcgaatagttctactctgatcagaggtgtacaactgtacccacaagacacagccccacgacacgtttccgtgcgccgacatgccaccacgacataccggaaagaggccgtgacaggacccttcgcataaccccctctaactaagcacaccacacctcaggtttcacccccactcctcgcaaggcagcgagcagtcccctctcgtgcctaggtgaatccagaagccgcatagaccgtcgcagggcccatccgaactccatcacgcccacccttgcctggatgcgtcagctagaggaaagctacactacaagcccagccgttgcccacgctggcttgtggtaagtacgataagtttttccagggcatcccgcgaactggtccttaactgccatgggtgcgaccagcaaaaccatgcacccacagcccaccattcagttgcattttagttggataattacgaccatgaagcatggccagatgtctcgagcacgcagctcattctgatactaaaaaggtctaatactataattatcccatcaactgagctagtggtaattaagcatggctaagcatatagttctagctaggtcacataagtaacatgagctagtcgattcattacccaaggttgacaaagaacagatatcaagtaaacatggcacaagcgagcagataggtaataccctgaccccatgtaattagcaaaacatgcatatttatttgtaaacggtaaaacatttataaattgggatcaacatgctcaaggggagtgtgtgacttgccttgcttcttcaaacaatcttccgaactcttatccttgcgaacgcgatcttccgaaacgacgggaactacacgctggcacgcaaaatgaggaaaaactctaataaaaaccaaggtaacagtacatataaactaaacaaacatgtagagctcaattttagatgaattttgcaagttgaacggctcaattcggagttcgaatgaattagatatgaattttagaagttttgagccatttatatgaatttctagaattattcacgaattattgcgcaattattatttatttttacaaaggaaaaggacctcgctgacgtcagcaaggggcggccggcgccgacacgcgggccccacacgtcagcgagtcaaagggggagggcgcacggtggacatggtccacacgtggcctcgggtgcgcgtccaccacgtggacggcccagatcggcctgagccgattgggcggccgaggggagcggcagccaggggcacaggcgcggcacgaagccggcccggccgagccaaggcgcggcggcggcagggaccaaagcgacggcggcacacgggctgggcggccaccggcggcggcggcacggcgcgcgcaagcacgggaagcggccggccaaggggagaaagagggaagagggggtggagtgctcacctagggcggcgacgaggggcggggaaaggagggggagctcggcgtcggcgctcctcgggacgaaggcggaacggcgacccggcggcgttccgcgaacgggaaccggcggacggcggccggaaggacctggggaggatgggggagaggttaagagggggagagagggctcccagcggcatgaatcgctggtcggaggtgagaacgggcggcggatgcgcaccggcgcaaggggaaccgtgttccggcgggatcctggccgtgaaaagcggcggccgaggtgctcctcggcgctgcgaagcgagcggcggcgacagcgcgacttggggtggctaggagcggcgccaagcggcggctggagtcggcggcggcggtggaaggaggtggtgcgcgtggcgacggtgcttcggaggcggggaggggaaatggagcggacgccggggtgcggcacgacgcggcgaagccgcttgtggcggtcgcgcggaacgacggtggtgggagcggctgtggcgaccggctggagggtcgtcggcgagcggcggcgggaggtgcgacggtggcggggtggttttcgtgcacgggagggctcgggagagaggggaaaagggagagggaggtgcggggaatgtttttataggggaggggaggccggattgagcccgagagaggtagaaaccggccggcgacgtgggaggagagagagatgcgggaggcggcgacgtggccggattttgcggggagagtggggggaaacggcgcggacgtgggcgacgaccgcgtccacgcacgcgcgggagagggagtcgcgcgggagaggcggcgacgtgggaggatttggcggccatggcggcggttggggatggagctggaggtaggagatgacatgtggggcccacctgtcggagagagggggaggggaaaataggctagggaggaaatgtagacttgaggaagagagagagccgagcgggccgaggaagggaagcccagcctaggaaggaggaggggaggaatttgggccaagcccgaaaggaaggaaggggaagattattttcttttctttttattctaattggttaaatgaactttgtgctatttaaaattatttcttgagctccgaaaattcacgggaaatttcagagagtattttagggaacaaagaatattgcaaaatattcccggccaatgatttttaagggaaaattttaattctcccattaattcactcgaataaattgcttaaatttttatttaatttctaggaaatgcattattaaatgatttttaatcccgaacgaaaatcggggcgttacacaagtttactactaagccccatgttttcgatggttcggattttgcttattggtgtaataagatgcaatcttacattatggctgaggatcttgatatttggagaaaagtttctaatccttatgtgattcctgatcaaattaatactgctgctttaaaaactgaatttgaaaataattgcaaagctcgcaatattcttttgagtgggatttttcgttcagattttgatcgtgtttcacatcctcaaaccgccaatgagataaactttcaagaaacttcaaatattaaagaacttcatcgagatcttttcaaaaaggaatacataaaattttagatgaaacctgaagaagctttggatgacaatcattctaggttcaacaagattttgagtgatcttagatctgtagattctgcttatgatattaactactcacaatctaagatttctcgacactttttgattggtcttgacatgtatatttgggagatgaaagttacatctattcatgagtctattgatatgtccactctgactttggattcgctttacacaaaactcaaaactcatgagataaacattctttctcataaagttgattctaaatctagtgctttgatttcttcctcatcttctttggatgttggtgcttcttcatcaaattctactactcttactttgattaatgccatgtccgatgagcaacttgaacggttcgaggaggagaacttggttttagctgctaacaagatttctcgagctatgaacaatgtcaggaacaggaaaagaggaggtccaacttgttgcttcgagtatggagcacttgatcacatacgttcgcattgtcctaagcttgggagaggcaagaaggttaccaaggaagatgaaatcaacaagaaggagaagaagaagagtctcaagcagaggttaatccgagaactcatagaagcttttgatactgatgagtcggagaatgaagaagagagcaaaggtaagcaagttgttgatctagcttttatttctcgtaatgcaaattcagatgtggatgaatctgatagtgatagtgaagaaaagcttagttatcatcaattagaacatgctgctttcaaatttgctaaaatacttaaaacatgttctaatatgcttgatgagaaggatcatactattgagattctaaatgctgaaattgatagattaaaatcttcgattcctaatgatgatgattgcaaatattgtgaagttttattttctgaaattaatgttttgcgagatgtcaattctgttagtcataagaaattggaatctgagattgaaaagtctaaaaaattggagtcttcttttgctcttggatttgctttgcatgctcgtgttgttgatgaattggttttcacaaagggctttttgacaaaatacaaagttgctttttgtgcaagtactttgttaaatttttatgtccaaaaagggctaaacaaaataaagatgttttggtttctcaaaattgttctaagtgctttttgaatgagatgaaattgaaagatgctttaggacgtgctgagcatatggaaaacattgtgaaatctgatgaagtgctttcttgtcccaaatgtcgtaaaagcaaaggtgacatggtagattgtgaaaattgtgctaatttggaaaaagaagtttcttgtttgaaaagttctttgcaaatattttcttatagtaataaacaacttaacatgattttggatcaatctaaagtgactagttccaataggggtgttggttttgatgttcatgaccatttcaccaaaaatcaacctattgttttgagtgtgactgaacatggtgaaattttgacaaaaccaagtgctaagaaaacagtttttaagtctgctggaattttgccctctctttctgcaaatttaaaagaaacaaaaacaaatctttcaaaaccatctacttcacaaacttgtcgtgagaagtatacatgttctttttttttggaaaagatggacatttggttgtttttgtttttgacttgcttttgcgaaacgacgatggcaaaaattgggttttcatgcgaggagcacggccagaccgacactgaccagtcggtcagaccggctgccaggtctagttagaccatagggacactggcggtcagatcagcctcggggtgattttgcgtgtaattcaaatcggaattttgaaagcgacaaggtaagttttcagataagtctggtcctgattttgttagtgcttttgtacctactggttctactggtcgtgtgactcagtgttggattccaaagtttcttattcctaaccccaacacggaggccttgatatcttctcgttcataggtattttgatggcatactccccatgagcattcaatgttgagatgacaattgcttttcaaggtaacatcaacttacttttgaattgacataattttgttccactttcctcattattagcttttcatatgctagtgtttgaggtagtagttttggttaatttgagtgaatgtatgttaattcatgagaactttggtggtatcgttggcaattggatgtctttttcaaaatctttgatttcttcttgatttttcttcagggagaattgaggttaatttcagggagagttagtgctttttcatttatctttttggcatggtttgagggggagtttttgtacctcatggttttatcaagcaaaattagcaataagaaaaattgagaaaagagagctttattttatatatatggtatattcttgtgcatgctagcaatatattatgaagctttacttgtctctagtatagcttgtatgtattctagtctttttatgaggcttagatattgcttttaagggaaatgatgcatgacacttaaattctatacttgaattaagagaatttgcgaaattgatgctagcatatggtttgatttataaatgcttatatatgctttattgaattgttatttctcaaatagctttgtaattgctcattgttcaatagaataaaaatatctatgagagaaaaaaatgaataccgaatccttggaaacagtcttgacgacaaggacgtattcgatgtgagcaaaaataatgggtgccgaatccttggaaacagtcttgatgacaaggacgtaccaggaataattgagggaaaaaatgagcaaaaaggctcaagtaaaagttaaaaattctcttggttgttttgtgctaaagttaatttgagaaagtgtgataattgcaataggtatatatgtataatgtttattttttcaacctatgtgcttgtaaagatgttgcattataaatcatatgaaatcatgaaatttgattgttgatttgaacttaattgtaaaatatttggttcatgattatactttaatgcatgcttgctatattatagatgggttcatcttctttttataacacaacttgacgtgatgtgccatatgtatgctaagctcatgaacataaatgaacataattcgtatgcttgatgaaatcattgtcaaaagggaggagaagagaagagattgtgcatgtttttcgatcaaggggaaatttctttcttttcaaaagtaagagaagtcttcttttggattttgagcacgatgtgtgcttttgcacgaagtgtgtttttttaccacttttgtttttatttttccaaacaccaaaatatttttggatggatttgccaatgtgttcatcaagggggagattgtaaaatcaaagtgtttttcattcttattctgtgatgaacaaattggcatatgtgattattggttttgatatttggatattactgttatttgctaacaatgagtcaagttggagatagcttgagctcggaatatggtttttttgtttgattcatgtgtaggtgacttgatgcctcgtgagagtattgccgatgatggaccgggagttgacttggagataaggcgacgtctggacggtcagatatcatgcgggatacttaggctagagttcaatgcacgtagttggtgaagatttcatatggcatacgatggagatattgtgtacgtatgggatacggagtcgaatttggaaggagtccaaatttggtacaattggagtatgtgaagtttgtttcttgtacgggaaggtttactagttggattaggacttcttgtatgaatttggttcgtggttttaggctgcctacctcatgtataaatagagagggagtgtgagacttcttggtatcgcttttaagagcattgagtctagagtaaagttagggtttcgagtttagtcgagattttcgtgaggagtgctgttgttgcactttgtaaacacagagataagtaataaagttgtcatctacatctagagttcttcgatttgtgtttgctcaggttcggtggtctaatagtcgagacaccagcggtcataccggcggcatcgcggcggtcagaccgcgacggattcaaggcggtcagaccggtgacggcaacagggagcaggggcgacttcaaggcggtcggactgagcattctacttcggtcagaccggcacgactgcttcggtcagaccgtgatctgtcgaatttgagggtaacttttaattccgttaaaagttttggtttttgggtacactaaccattcaatcccctctggttggcttagttcgtgctattcgatcctacaatctcaatgtgttgatcatgattggacagctctattctacaccccccttagaataactattctacactccctcctatcctacccaaccacctcagcccaccccagccagctggatgcggcaacggtttccattgactgtgagcagtccgggagacggcgcggggactagctgagttctttcccccactttcccaactcacatctctcgttttccacgcatacgcttttcaaactattaaacagtgcgttttttaaaaaaaaattctatacaaaagttgcttttaaaaatcaaattaatctatttttttaaaaaaattgctaatacttaattaatcacgcgctaatggaccgctccgttttccacgtggagttgggttcccaacccgaagcagcgaacacaaccttagagcaagtttaatagtatagtcaactagtagctccaattcatctatagctaatctaatagctcgtccatacaatagttacatactacactattaatattcggtcctacctgtcatacacacactgcgtcttggagtccgtgctagagaagctgaccggatggatgggctgctgggctgaagagtacgtgtgggctgtgctaaccagatccaaaccattgagagtggactgcactgaccaggatcttgatcattaggataggatccaacggctattgtttatttgatgatgtagatgaaccggaaattgctaatatctacactaaagtggggatgatttgtataggtatataggatgttggaattttggttctgcatatacatcaagtggaaccaaaaacatatctagaccctacccagtgagacaaacaagagaagcaaagcagaacacataaaacaaaaaagaaactatggttctgtttgttttattgcataaaccagctctaccaaaatttctgcattgctaattttcaggggtgttgaaatatgtttggtctgaaacttcaacatattttcgtatatttttaacggaaacttttgaatctacgaatataagtatgcttggtttgttatcttagcaaaagttagtaatgacaaaaatttacagggttgaaagtgaagacaaaccaaacaggcattatgtatgtatgatggtgcacctaccaattccagtatgtcaacagagtagttcctagcaaccggtgctcagcatttcatttgggtagtgaatgttcaatatattcaaacgaacagcagctaaaatatactccctccatatatgtatgacactgttgacttttcgatcaacgtttgaccattcgttttattcaaatattttgtgcaaatatgaaaatatttatatcatgcttaaagaaatttgatgatgaatcaagtcacaataaaataaatgataattacataaattttttttaataaaacgaatggtcaaacgttaaaaaaaagtcaacggcttcatacattaaaatgaaggtagtattatatatgtagtttcttaatgaacaatacaacagtcagcaggagtacgcgacaatcttatgataaacaaagcaatatcaagaagtagaaaggggaggcatatgcacacaaactaatgcctcaacagcatttggccaatctcaggttagaatttgcgaatgtagatcccaaatgtttcgaggcactgctctgcacggccaaagaaaccaacgatgttgctactatactccaacggatcaactttaaacggagtccctcctccttgtccaaaaggtccataggtaccaccatttgtgaagaacttaagcgatgtaataacattcggcattgaattaaacggacctactgttccagaaacttcccttagaaagtcgtgagagccaagccgaatctacaaggaaaggagaaccgttagcaaactatttatgtataaaaagaaataattaattggcaccctatattactggacaggtattttaagattcagttattacttaccatttggctactttcactactagcacttccccaaggacctgaagtgtgattgtccccattaacttcactataggaaaattcgagggaatcaacaacaacagaactataaattgttatgctttctagacggtgaggaactgtctccatgacatattcgattcctccatttccaccccaaggaccaatcttgttgaacccagcctcatgagaacaaaccacaaaaaaaaattagaaatgaagaagaaaattaatcgagaacagacatacaaaaataacaaattaacttcttgcagtaagttagtaccatctccatctcctctcctcttcctccaattgtttgcacatcagtggtcaattcctcttcatcaagtactgtgggttgtttcggatgaaggtagacgccgattgcatcaatataccagcccgcacgcccaaagaagccaacaatactgtcagtactctttgttggtgcacagaattcagttcctcctccttgtccgaaaggcccgtatatatgtgttttgaggtattgaggaggaagtatatgaggggtagtttctttcagagttttgacgtggatggctcacagttttggaagggattacatcaatgtaagaattacttgcagaggttggtgaccaagaaagtgcatgatggtagtaaggttgatttctggggtgatacatggtgtggtgaggttcctttcaaagtggcctttaataagctgtttgagataagtttacatcagaaagctactatcaaggagatttggaataatggggattggaatacggtactcagcaaaccattgctctatataaataatcccccccagttgctgaagaagatgaagcggatcctgctgatgaggagttcttccaggagcaagccggctacgatgagttttagggtttcggcctagttcccaagtcgcgcctgtgatgtttggtccaagacctggcttccgcttcccttttgtaatgcagttgtgagctcgggatctgtccgcagcccaacatgactgtacctctactctataataaagagacctctgttgctgtgataatctgtcttcctgtgataccagcactgtttcctgggactggtatcgattaacaggttaatttggagcgtcacggggtagttccggtcggtactagttcggggcgtgacaatatataactctagatattgactcccttataaggcccaattccaatatattacagtgcaaagataattctcagcagccagtactcaatgtttccatttattaaatttcttttgagaaacgagacaggaaataataatgcaacaattataccattatacatacgaataagaatactctaaatcatgcaacaacatgtgtgtgaagatcaagcaatatgcataatcaatatgtgcgaacgtagaccccaagtgcctcgacatatgaccttgcgtgaccaaagaagccaacaatttttccgttgctctgcattggaacgtcaaatggagtccctcctccttgaccaaaaggtccatagctacgaacatttgtaacaaatgtaacagatgttacaacacatcgtgatgcacgaaatggacctattgttccaaaaactcgcaccaagaactcagaagagccgaacttaacctgaaaaggagcaaatgaagagatcatcgatcaagaagctagtacgtattttccacaagatagggaataattgatgagcaacatataaagattagcaaaatgggaaaaggttggatcactgactgtatggctcatcccaccaggaccaccccatgggcctatatcgtatttttgcccgttggatttactgtacgaaaatgcaagtgaatcaatgacaacagcactgcagatcgtcacgctttctaaatggtgaggtgccactgccacattgatgtccttaacaattccttcgcttccgccccatggcccaatctttgcaagccgatcctggattacaatccagtaaaccaaaaattaggaaaatattacacaatatatataactgaaaaaattaatactatctccgtttcaggttataagactttcttgctaaaaagtcttataacctgaaacagaggaagtagaacataagtagacatggatgggattttacgttctcgtccactcctgcatccacgttgacgcctatcgcatgcatgtatctacctgcatacccaaaaaatccaacaatgctactgttgcctttcactggggtactgaaaggaacccctcctcctgttccataaggtccatatgtatccttgctggtgacaaatgtaattgacgttataacatcagaacgtgaatcgacgtaggggccaattgttccataaacatccaacagagattctgaaggatc

SEQ ID NO: 9232 - DNA, 25426 bp, Oryza sativa
atagaaattcatatatattttaaggaattagaagagcgtatatattttagtccctcaaccatggctagggtcttattgtgatttcttaactacaaaactatttacttttggccccacatatctcaaatcatccacattacatccctagccttatgtccaaagtagggtggttttcaatgacttaaaaggtttattagggtctatatgtgctaatagtagaagacatgcatcatcatactaataaataacaaaaaaagcaaaataaataaaaaatgaagacaatatacatcatacataacctgtttctcctatatcttagatatggtttagctttaattcacaaactagaatgactcgtggtcacgacaaaccaccaataagctcagggatgaaatatggatggtttcatgagtcaagagaccaatagtgatcactttcatagttgagggaccaaatttcaatacagtctactctgcgttggaactatatccaaggtaaaacagtagagttcttttattaagttcaatctgttttcttcattaattggttcaaattaaactaacatattataagcataaaatatatagtgatcttgtaagctcatacaaattaaaagctaaacataacagcatgaaaagaaaatgaatgaaactaaacaggtaagaaaactccactaaaatgtgcttgaagtatgactacatattctatgacttaggctatgcatatgtaagttcagactctcggtgagtgaaaataagaaattttcataagaataatcagtaaatattaataaaaagaaaacaattgttgatgtattatgtaaaagtattacctccgtctcaaaataagtagatatcttgctatatataagcctatatattttgggacagagaaaacacttactacaatcaactacacgtactatgtattgatacttcctatcttggttcccgcttcaatttataaccttataagatagacacatttttttccctccaatccatgatttgtatatctacttcatacgatccgttgcagcaaaccgactatcatgccctccaatcaagctgggtttgctttctcctatcgtaaaatctaattcgagagccctttcgttttagcgctattgcgcgacactggcagagccgtccgatcacttgcgtcatcatggagtccatctgcgtgggccttgcagtcgcaggcgtggctttctggataaggatcgagatgaaaccaccccaaccacacatcacacgcaattcctgcttcatagagagtcacagagagagagggggtacagtttctcccccatgtcctttttctcttcaacaaagttttctctcaaattacttatccgatctacaatccgattacaccattgtatttgttacaattaaatcttcacaacaagatcttacatgattatattacgatgaaaaaatatttctatttgtaaattacttttattatatacataagttacttttatcatatatataagttacttttagatttgactaaattacttcttagacatataacagtaaattcaataaagtctaaaagtaatttacatatattataaaagtaacttaaaacaaaactgaagtaactttgtcatgacattagaagtaaattcgttgtagggataaaataggactttatctagaaattaaatttaatcaaaataaatcaacacacgtaagtttaacaatttttaaaagtaacttcaatgttaattggaagtaacttttgcatggttcaagttgaaaggagatactagatggagtacaaactagctaccactagctgtgtagtcacgtccgatgaaaaaaggcattaattaaagttactttctttttgttaaaagttacttctagaatacatgtaaattacttttaggctttattgaatttacttttatatgtctaagaagtaatttagtgaaatctaaaagtaatttagatttattataaaagtaatttattattttttatcaaaatataatcatgtgagatcttgttataaatatttaattgttatgaacacaatagtgtaatcggatcgtagatcggatgagtagtttaagagaaaaatgtatttgaagtataagtggatagtgtctctcatagatggagtggtagctgatttagacaaactagctaccactagccgtgtagtcacatccttctcctatgtctacctatctgtctgccagataaaatcaaaacatgcaacctttctatttggcattgttcctttttgcacgcaaaatctaaaccgagagcgctctcgatttaatgttaatgagcgacgcactcattcgtgagagaaggttcagtgctactagtacgtgagagaagggtcctgtgctgctagtacagctatgtgagaaaatgtcccgttgttacctgtgcacataatgcatatctatttgttttctttttatagaattttctctcaaattatttatccaatctacaatcagattacaccattatgtttgttgcaattaaatctttacaacaagatcttacatgattatattatgatgaaaaaatatttatatttttaaattacttttattatcggaaacgctatatttgtgatgccacaaatttgtttgttttgcagtcagatattttgactgttgatgttgctttaagatctgtgttatatattgccgtggcaacttacgttgcggctgtgattaattaaaacttagcatcttcattagttcaagctttaaagctattctttatataaatttataatgtagttacacaccacttatatcctacttacacgccacttacacatgtaattactatataattttgagacttacatatgtatttttgaaacttacattataaatacactaaatttacatatgtaatttatggacttacaatgtaaataaatgctgactattttttaataaaaaatatggtgctataaatatagctattccctttattatatatgtaagttacttttatcatatatataagttacttttagatttgactaaattacttctattcattcataatgcttttagttgattatttttattattgtttttagttaattctatattttgtggactttataaatcttatctacactttacttgcgaatttactctacatagttcttatttcagctcactcacaatataattatttctactacagagagttactccccccgttttataatgtaagtcattttagcattgtccacattcatatagatgttaatgaatctagatatagttctaaattaaagttactttccttttgttataagttacttctataatatatgtaaattacttttaagctttactgatcttaacttagtgaaatctagaagtaatttagacatatcataaaagtaatttatgatttttcaatgtaatatcttgttgtaaagatttaattgttacgaacacaacggtgtaatcggattataaatcggatgagtaatttaagagaaacttctctaagaagaaaaaaatacatagatatttagggtactagtagctttttttttttggaaagaagggtatctctctttagcagtatccagctacatgttaacccgtactacacacatcgtagataagttcgctggtgggagtgggtggcattggaatatatagaaacacaccggcatatttccctctaaagtagattagccaaaccaatgtctctgcccgggcaaattggctgggctagctactgccagtcttgtcagggcatctctttagcttagacttgccataccaacaaagctagatagttgctgctacaactagcaataaaaacggagcggatagtttccgtccactctagataaaaacggatacgtatacctttcagatcggataattcttggatagttcggatatgtatatgaatacggtattttctcccgaatacaaatatggatatggtatcgaggttttcatcggatacggataataattcggatattcggtgaatagtgttattcgggtatccgcagaagccttgaggtataccccatttctttctaactctataaccttcaatatacctttataaattttaatagtagtttatctcttaacacaagaccatactattaatattgtttaaattttaaaaaatatttataaattatatttcattttatataaaatgagctaattatatatgttgatatttgtttctattagaagttgagttggttttcgtgttccgaaaaaaaattgttttcgtatttgtgtccgatcatattcgattcttattcgtattcaatataatccgtatttgtttccgtattcaagctatccgtattcgttttcgtatctggtaaaaaatatgaaagcgaatatggtatgagcattatccgtctgtatccgctccgttttcatccctagctaaaacagcacctggccagcaaagctaattgatatggtgtggcaaaaagggcccttctgtagcgttcttttgtctttacagagcaaagccacaactctgtttgtgatttttaacaaggcagaagttgggcacgggacgccaccagagtcacactagcaatcactacttgaattaacagaccggtagcaagggcacggtcagagcagaggaatcacgctggtccggccgatctccatcgttttcgaggataacttttcactgtgctaaaagtttcttttttttttttttgtccttcaacctttcacccctgggttagtttttactatacaatcctacatttataatggtatttcattaccaccaatagatatgatgtattgatttacgatgctcttactttatttcacaatttctgtcacttcattctactatcagtaattacataaaagcttttcgtaagtgacatgacaaatgtaagttgttgttgctttaattagatggcgaggggtcctaatagatatgccagttctgcaaatgtcgtataactgtccaatgccaaattgcttatctgtattataaatgaccatttttccacgacatgatccattggaggtggtcaactacaagtccttgcatacccataaaaaataaaatatggcaaaggtttttgaaaaccacaaattcacatatttctagcactatacttggatataaaaaattgacacgatacaattatctttgatattaactttcataagcaacaaacatatatttatgatcaaaattacagagaatatgttgcctcaaactcactgatggcaccaattgtttaacatagagtacgaaagaaatgcagcatgtgtgtacatatctggaaacaaaatgcatcacatcctgttcacttagagcaaaatggtattgtataatgtatttgtcggtgtctactcctaccgcgcgtgcacactcgatcaacttggaaacactgaaagcaaaagatcgaacacctcacagagctaacacacacgaacagaggttattggcgctgcttgataagccacagattatcttgtttctctaaatttattcatagcaagaacatgtaaacgcgcagcgactggactcctaaaatggagaacacgatcagacgtgcgcttagcacgacgcaaggacacgaccacacgatcacacataaacagagaaattgctaaagactctgcaaaataatgagctatgctatgtacaacgatacaaccatggggttaactaacagtattctcgggcacataaggaacaaacaacaaatatcagtatagaggggcaatacagggagagagaattttacgaggacaaacaaaataagctataaactcctaggagcaaataaagagtttactcgttaagttttttttattgtactactttttcatgaatagttatatacattattttgttactgacaatactgcagccatcgactctggggctgtttagaacccaccccaaaattttaaaccctgtcacatagaacgtttgaatacctgcataaagtattaaatgtaggctaaaaaatgactaattacacagatatatatggattcttttttcacttctgtaacaagtaccctacacataacatgcaagaagattttattttgagaatgagcggcatctgaaaagaagcacatcgcagcatgcactagcgttgcgaccatcctgcaactctgagaggtttgggacaccttgctcattgacaatcggccatggacagtctaaattgtgatcgaggtcaaatccaagcaagagggagcggggctgcacgtatctgtgctaccaacctgtccaatgctcttgccccaaatttggcctattccacagcagagggtagcatttcgcaccctaattaaggtgagacatgaatcccatacaaagctagtggcacgccaagttcagatttgtgcagacacgagttttgccagataattcacgtagtccctctctggatttgggccaagacttcggccgggggttcctttcgtacatggagttttacatgttatttttatgacttgtggtttgattcctgccaattcctttaagtcctaaatataaatcatactgtggaggaattatatccaacaaagaatggctgatttctttcatcgaaaagcgaattattttcaacaatcatatcaacattcaacaattcacgtattactttctaagagtgaacccaccactaggagagagattatttctgattgtagcaaccaagatgaagaaaactccactgaaatttgcttcaagtacagactaactattatgcgagttacgttaggcatgtgtaagttcagtgattgataaatagcaaaaatctagaacagtgataaataatctaccctataattgaacaaatggttttacttatttactcattcatcatgtcacacatctaacggtgtaaaatcatcttatgagctagatcgaacgtgccagatgcacacgcgtgtcgctcctaatgccgcaatcacgggctcaccgcgcctcctccgcatcggcctctctcgagcagcacctcgcgcgcccctctcccgcaaccgccggacaccctcattggctccacaaatcacactgccatcgcggcgtcgccgtcccgctgctcgcacccctccgcccatcgcgccgaaccgcgccggagtcgccctccccagccctcagcgcatctcaccgatccacgccgccaggccagagtcgccgtctccgcccctgatctacgcctgggcgctcgcctccgcgcccccagatcatcttcggtcggagtcgccgggcttgtcgccaagccaatcccctccgccaccgataggaggtacagaaacctctgtccacccctgcctggcctctgtcaccgactctgccgtgtgggctctctgctcgcgcgtgctcctccacacatcccagcaccccgccgcggctcttgcccccgtcgcgtcggcgcactcctccggttattcccctccgccaccactgcctcctccgtcgggcctgacctctccgacgtgttgaggcactacataaggtgtccgatttgcttcctttttcatgtttgctatggttatctagatgctaattttgcagtagacatggggttgagctcacctctgttggcacggtatataagtcaatggaatgtccaatgacttatgaatcttcacttgtaattctggattgctttgggttttgggacttgcatttgccaaccaatgcataaatgcttcttccagcgttaaaatcagaccttagatgcaaatccactgtatccatactatcgagtacattatggttgcctataacccaatttggttcaccgatatatttctcaatgtcaatcctgtttgcatttttgggttcagcactctgtacttttcagttttcactactgctcgatggaaagaagccttcaactgcctgttagctgttagtttttacattctacggtgcaaggatccttggacacttaattagagcagcgtaaagaaattggattttgaagttcttttttgtgatgacaaatactaacatcttctctgaacttttgatttttgtattgcccttaatacaggcaggtaaaaaaacaaggagaagaactagcttttgtatagatatgttcatcacaattagctaacacatctgttaatcaaaatattttaactcttgccggtttaaccttacctcttgcatggagtccatggcataattcacatgattctaatatgtttgattcgaaaccatggcatggtgatttcagatatcaaagaaaactttaccatgttcatcgcttgctttgattccaatatgtttgattcaaaactgtggcatggcgatttcagacatcaaagtaaactttaccatgttatatccagctctggaatgacctgtgttcttatctcaaacagaagcataatatgtcgttacagctcagacctatatactatggttcatcggcagtgactcaatgtcatggatgtgaaaattgagaaagcttgacacgtgcttacaagaagaagatcccagttaaataagacattaccattgatctccggtgggcattttgtagaattgtgtccttactactatgatttgtaatgatgaagcgtgtacgatttgaaattaacttgttataaataagataaatgaggcgcaaaaagcaaggttgttttttctgcagaagccatttcaaaaggacttggattctgcagaaggacaatttgttgcccaacttagggagttatctgaggaaaaccagctctacagaattgattgctatctttttttttagtgcaagctaagaaaatggcttacacccaggtaagaactacaactaatatttgagctgattcttttttgttggtactcatgggggtaagtggataatatggacttcaggctcactatggtttggcatttttcaacacgagcaatttggaaaggattttatcagcatattttttattcaatccaatatatgttgttgatatatagttggagaagcatcgaatgactgatcatgaactgtaggaggtactaaaatggccttagaagaatagtttgttgtgccactgccatccaattttttatcatgagctgtaggaggtatactaaaatagccttagaagaatagtttgttgtgccactgccatccaattttttttttaccatgacaaattttagatatccgtacagatttaataaaggcatgcttcatgaacctgcactggaagcaattgtagcgcacaaacgaaagtgcttgttcaagaaaactaatttcatattctctatgtgggttctgccgatatgtgtgccgaaaccatgataagatggcaaaataaaggtggcaagaaatgaagtatgaactaaaaatttgaacttggattcctatatgcagtaacgcttcttcaagcagaacttctaggggaggctcttagatctaccgtatgttcctactgcaaatgggggagcaaagagatgaagcaccggcaaagctagctttgatttattattgtttattgagccgctttgtgaagtagctccttgcgttctaattgtgcttatgcccttcacaaattccatgataaggaaaatctcagtttcatgtaatttggcacatgtgcgtggatatagctaaaactgatgatttagatgacaaatcaagatgtattatggtaaacctttttgtgaagtttgttttccttgagtaaataggaaactttttttaaaatttgatgtatgttgttttgaaatttaagtcagaaatgtaattcaagtctgactccatttgcactaagaatatatgctcttaatcatcttattcttttacatcttgaatataattatttttctaatatgtatttgtacataatgtgcgttgcacgtgcatggttagtataatttttgtaattattttatctcattctatgcttgacaaaacatatatcttattttcgttgtttgatttgtattaccaaatatttccgttgcgttagcacgggcagaatactagttaatattagttgaaaagaaagaaaacatttgctgaggcatgaaatagacagataatctccttatttagattccattcaagcctcgttattattagtattagtgttgacaaccaaattatgcaatacaacaaattataacaatgtttagccagatttggaaaggacctcagcatactatcatgggtcggtcagacggtaggtatacgatcgtttagaccggcggccctcaatccgagtacgattaaggcagtttgtacgtttctttgcttgggcatgaggtttcttgagttctaattgatctataaacttaataggacatagagaaatatgcctatggaagaaagaccaatccctttatacgagctatgcctggttcgattctaacccctaaccacaatcccagctacacaatcgaatcgttattttgccttcaccattacttttaagtcatgtttctaccttatcttcaacctagcattagtctgcctatctttatcgatttgcaccacaaatcatccaccttgccacaaatcattcgccttagctacgagcagtgttgcattggggctgggtctgctattttgattttttatactcggttttataccaggagggatgggtctcactgcacagaatgggtgggaggggaggacaaaggaaactctgcttttccatccaatcggtactttgttggctggtccttgattggcgtgtacaattattttgtatctatagctacgagagtctgctaccgtttgtatatatgtttgccccgtaaatcttccgattacctacgaggcaggtggttatttccgtatcgatctaaatcagcctagagactagttttatgtctaaatcggttccgctagccggtttaatctgttaaacccatcttggtttagagttttctagattaagatgattggcgactctattaacacagtaaatctttaggtgagtccgtgttattagctagaaaggatgccaaccgttagtctattactttcttgaattaaaaggaaggcgctactcccttgattcatttatatatagtgtattttaatttaaaaagtgccccttaaaagattttcaccagtgattagtttgaatacaagtatgtgtaagattttcaccagtgattagtttgaatacaagtatgtgtattgcacaaaagttatacggttaaatttagtactttcacacaatgtaggttttagtgtttttatatggagatttactccggtccttatggtaccaaatcgttagatcaaactatcggaaacgatttggtactgtgaggtataccggtacctcggctcgagatacttttatatgtattaggaatgtactttaatttgtgaaaaaatagtggtcaaattttagttttcaaaactttcttaaaaaataaaatacgccatataaaagtaaacagaggaaatacttattaccaccacgacttaccatgcattgattcttgtatgctgtctcttgtaatatttataagctgcctggactgattttcctttctgtgcacgtccggtttgtcttactacctcatgatcttcatccatacctggaaaccaactatcacgtcatccaaagtaaagcaaggatatgcttagcttccaatcccccgtctgtgagtgaatctatcttccaaatgaaacaatgcatgctttgtatgtggcattgttcgccccgttcttttcttcaacaagagttatattaagattaagattttcgtagcacgtttttcaaactactaaacggtatgttttgtgcgaaaattttctatattaaagttgctctaaaatatcatattaatctatttttcaagtttgcaataattaaaactcaaccaatcatacgttaatatcacattgttttgcgtaaaaaacttaatctttatcttcatcttcagaagaaaaagaaaaagaacaccaagaatggttggcattggaaaacaaatacactgcacattcagaatctctcttactgttgtccagtcagcgtcggaggtatgggccgatgaccctgcgctgcaggccgtatgtcacccatatttttgggttctcgtatggaatctgcggtcagtagttgatttccgtggcctgggcttatgtaggaaagaagtagtagactgagctagaacctacgggcatgtgtaggacctagcagaggttccctgcagtttggaccgtcggccgtcttctatatctgtagcttgagatatgtatcgccgtgttcagttccaaaatatttcactaaacttttaactttttcatcacatcaaaattttttcacacatataaatttttaactttttcgtcacatcgttttaatttcaattaaacttctaattttggcgtgaacaaaacacagcctatgtatgtggctaggacaagagcgctagttgttgtcactacatgtcacgttaatttagaaaacaaaaaaaaattgggaatggaccgcatgtcatgtgtgatagtatctcattttacgtggttcatattgtggatttgttcaccatcctcattggaaacgattgttattcagatgagtttagattagtttccatgtggatgcatcactttaaatcttatatcttatagtttctaaatatgtagttctctgatcgataatagacaacctcaaaactgtagttttacgtacaacagtttgatatatgtagttgagtaaaatacacggccggtccctaaatttgtgtggtgttgtcacttagatccgtgaacttgaaaattgcacgtttaggttcataaacttggtttaatataccaccccggtccaaacgtcctttgattgcgtttgaccgccaacgtggcatgccacgtagataacacttttgctctcagcccctccgtatcacaacacgtcgcaaatatctccttgtagctatgtactgacaccagaataaaaaaaaatcctcaaattgttcttccatcttatttttctccttgcatgtatagagactgtggtcccaattatcaattgccattgctctgcgctccaaaatgaccttatccttgcacaacgggcacttgatcaacaacacctttttccggtgacttcaagatggggacgagcttggagaatccatggggatgcctagcgtgcaagacgcattgtgctgccttccgctgctaatccgaccgcactgtgccactgctaaccccgctgcaatgcgctgcctcctgttgctaatctcattgccgaggccgccacaaccgctacctctcggcctccttccgctaacctcactgtcgaaacactagccgatctaggaatattttggaggatttgggttgaaatacactggtcaagacaagttatgtgtgaaggtatatgtggagctgtggagggggctgcgcacaaaaatgttgccaacgtggcatgccacgttgacggtcaaatgtggtcaaaggatgataggaccggggtgcaggtacattaaactaagttcacataccaaaacatgcaattttcaagttcgcggacctaagtgacaccacaccacaagtttaaggaccggtcatgtatttcactctacgtagttttactaaatttacacatgtttgatttttcttcctctgtccaaaggttagttttgagtgatgtaccttctttatttacttccgaactgactttctatttaaaacatcttgtgacaaccaccaacccctattattatacttgtatatattattcatttttctcactttcccacctatatatactgatcgatcacagtgcaaggcctgcttcctctttccatttatctgccaaatgaaataattaaccactgctatctcttcattttattcaatttaattcctaacatgcacactacacagatcatgcaagagttttttatcttgggagtgggtggcattagggtcttgcatattgatgtgtatgttgctacaaccaacattacagtcattatgcgcgccaaaccggtgcggtcgcccagggccctgggcacatcggcagcaggccaagctaggcagcattgcattttcgtcgagttcaatggaggctacacggagtattggaggctcagaacactggtggagaaaccctttttcctcttggttcgtaaccccctttagtcccggttatccaaccgggactacgaatccgggactaaagacaccaaccgggactaaagatcgatctactaattttttttatttgcatggccctgttcgttgctgcatggttaattttatatatatatatatatatatatatatatatatatatgtattccatatatatatatatatatatacatatgtatatgtataaatacatatattataaattacacatgtataatttaaagcacttaacattttatgtgcatatatattaccaaaatatatatttacactaaagtaaatgtgtacatctataaacatatacatgcatgtatagtacaattcatttgctcgctagctagctagctatgacttcgacgccggcgttatgtcagaagaagaaggaccgatgttatgaattgtcgatccgtcgtagtagaattcacccttgggattatggacttcttcgttgatgaatcccatcagttgttcttgaacagccgtgataaaatccttgtgtgggagattgtctcttatgtgaatacgctatcattcgaaaaataatgacatatcaatatatgaaattaataaagagcaaatcgatacacaatgaaattttgaatggtttatatatacgtacatcgagctctcgtgtggtgtagatttgggttgataggcagtgggcatactcgcatacgtagtagctgcacaagttagttccttggtcctgctttgcacactacatgagaaacgacgagagatttaatataatatacacttatattaattgtaattagagattcaattcaatataattttggagcatgcatgtacttactggaaaattaaacctccgtccaagtttttctttccaagtcccgcggaccaattgacggaaccgatcccaagccctacatgcagtttcaagctatgattaattattatccgagatccgcataatagcaacaggaaaaatccccgtgacttagcaatagatggcattatattacctgtctatcagttgaaaaaacttgtcaaaagtcttgtcctctttattcattgagtcatacacattgactttgcatgcgtccaagtcgaaaagtaacaggacccagtggaatctgcaatatgcgagagatgatatatgaaaatgtacatgttatatgtatgggaaagaaatttgttcgaacgacagtaaaaactcactctgtgttgtacggcagtagtatgaatgtcttgaaatgctgctgcgtcaggagatggacgagattgtcctctgtgtctttctcatacttgtcgatcatttcgacgttgattttccgacggtcgatgaacccagtatcgtacaccccccaccatcaggccctttgaatctccattctacaatgataaaaggaaattattattgtttacatatatgcaaggagctaattattgaacgaaacaaattaatcgaactcaacgatacttacaaaatccatgcgctcagaagagagacgtcgagggcgtccagatggtatagttcgaagacatccttgaattcgatccagagaacatcttctctttgcaagaagtcggagtttctgatccttgctctttaacatctctctacccttggcgctcatttccatgtaccgttcatggaacttgtacatctatatcggtagggactgaagctgctcaggcgtgacaagcggtttaccgagttcaaacttgtatgccacttctgccttcaggattggtgcgcctctaatcaactgatccacagttagaccagtgtcagaaatgaattatgttatgccaatttcttcgccggtcaccaatggctcgagctcttggtttggttgttctccaagctgagggactggtttggacttcttgtaataggctttctcaagtgttcggtaatagtccaatagctttaaggcctccttgtttgttgtggacattttaatgaacaagttcttcacgcttgggtcaacaggtatcttcttttcaggtctccgaggcttgagttgcctcttcactttggaagccacgtaagcgtcaagctcctcttgactgcaatcgtgaggcggctccttgtttttggtggcgtcaactttcgccttcttcgttgcccttgtgtgggcaggtggtggagcttggtgagaccttgtcttgggaggtgtaggcggacacgatggaggcgaaggaggcggaggagccggaggtgatggtgcaggaggaggtggcggaggagatggcggagccggaggtgatggtgcaggagacgctgcttgttgcctaggaaggatgatgtagcgcttgcgccatagtataatggtgtggcttgtgtctcgtagatgcgtctcaccgtctcctctagggtagtccaactcgaggtcctcgtacgctcttcctgacgacgggaaaatcgggacggtcgtagcactaggtccgttatccgcaaatcgttagagacaatttaatttaaatacaataaataaataaaaatcagaaattgttagtccattacttccagaattcatacatttacatagaaattctgttaattacatctccgtagagaaaacccctgattaggaattccaacataaaagaaaataaaattacatgaccgctaaaaggctaaaaaggaaaatctatcctaaagctccagatgtcgcagccgtagaatcttctgtagattttcatttatatgtttcattttgggcgtccaattattttagatgcccactaatttgttggtttttgatatcactgcgtgtatggtggcagatttgcatatagcttaccttttttggcattgtgacggtaccttttttttatatgtagcacgcatatataaattgataaattttcttgagcactcgcggggcgtagccaaacgagtatttattttagtgccattattatcaacgtgtcatgggattttgatgcggcgcattgcattgcctattttaattttcaccacacctgtattactactagcatggccctgtaccatgaagcataaccgaagtgggcatttgtttgatttatggtcgactatcacgatgtcaccacttgttgtgcgtacatggattaatttgcaattggaaggaaaatgcacggccagagtatatggatgcatgcatgtgcgaacatcagattattttttatactgcactttatatatggtgcagcgagtatacactgttttaagcaaatatatgtatgcagatgattttgagattataattttcactccacttgtattactactagtatggctcgaagccgtgaagcgtaaccgaagcgagtgttggttaattttatagccggctgtcatgactcagcgtagttcgtgatttatccatcattttgtagataaacagatggaaggagaaaatatatgcatccgtacatctatttcctatctctgaccatggaaagaaaataaacgccattttattttaattcttgttagggaaatatggctgaacatatgtcaaaactagcaaatatgcgtgctaattaattagtatgttcaattaatttgtttatcactatgcctgtatcactactagcacggctcgaagtcatggagcatgaccgaagcgagtgcttatttaatttatggtgaagtatgcaaaatttatgtttagtttatgaaagtgctcaggggaattaaacgaatgcaaccatgcatctatttcttgttcctgatcatggaaaagtgaatggcgccctattttaatttaaagaaatatggccgaacacatgtcagaattagcaaatatgcatgctaattaatatgctcaattgattttatgcatcactattcctgtatcactactaacacggctcgaagccgtgagcgtgaccgaagcaagtgcttgtttaatttatggtgaattatgcaaaatttatgtttatatctgtgatttgtatccgctcgtagaggaccgaacctgagagcaagaatctcgcctaggcttgtatgcgctaacgggaccaaaacaaagggtatggtagaatgacatgaaaagagtatgcatgaaaaccactcctaggcccgtactcatctggccggaccataggaaaaagtgtgaaatcatgttaaaagccatcaaatgaaacgaacttccttgtctcatacgcattggctaagacgaaggacacaacaaagagaaaaaatttctttggttgtactcatgatggccaagcctaggaacatggcaagaacataattccttggttcgtactcattggccgaaccgaaggacacagcaaaagaatacattaacacgagcagagaaaggagaattgagagattcctcgactcgtacacaatggccgagcctaagaattaggaaggagcatgattcccaccttgcagcactcgtgttcttccagcgccgcaaagcgaatttcctggtgaagcagaagaactagtgctagcaaatttgccgtagcagactaacagcacttgggcgtagcgaactagcaatctcacagcctcaccaacctttctggaacctctcccccgcgaactctgcctctagccttgatcctctatttatagaggaggattagaaggggttaatttgctttatgtgattttgaacaggatcccgcgcgcccgcagagagatcgtggggtgtggttgtgggcaatggcttgactgcatgcacatccctttggctgacatgtgggcccgttcagtttgacgggacgaatgtgctggtatttgctgcatgcttgcatgattagtggtgatcgtgggtaggctaagggcttgaccacttgtctctttgctttcactgccgtgtgggccctttggacttgactgatttgttttctttagatttcagttgttagtaaatacatgcgtgtctctttttttatttcaaattttattttattattattttttttgcatgcatgactattctgtatgtcctatatttttactgcatatactcccatttaattgggcacctcaatttatttacttttatacacaccttggatatgagtcttttctttttttaaagaggcacacatatatattctagtgcaccattttctatcgagtggactgtcgctgccgcaaatttattttatacgacactcatcgcgtcctgacgtgcatattatcacggtggcttcctcgagccaacatctagacgtcgagataaaaatattggataatgtcatacacgaccccccctttaattgggcgcacatgtaacatgcatttttattgtaagtcgcgactatttggagtataattttttcactagctagctaaacatctattttggcttacattttaatttttttttgctattttatatggtgggtacgccttttctgaaaatattcggggcgtgactatttcgggtcagtgagaaaatcccacttcatggccatatgttttaggccaaatttcgtatgcggatatgatgagaaagctaagtattagcgttcgccggtccgacgaaaagcgcatgaaaaatatttgttcacgctacttatatggaacgcgcatatgcattcctattttaagccgaaaattattttagtccaatataagtgaattatattttatttcctggccatttattttgtggccgcaatttaattaaattacttcaccatctgtctcccaataaaattcttatttattattatatattttttgtaagcactatatttgagataatatattagtttataatttaacaaattatatttaggacacaagccaaaatccatgtcaacacttccaccaactcaacttcgactgctggaatcggcctgcagtggtaagtccctaaagggtccattgggatggccattcacgacgccaccttcacgtgatgagaggttggacgttagtaatcaacgtaagcaacaactggcggaatgtacatgtcaaaaatcataaaactacaagcataccttgattgataatttcttaaagggaatatgcagctcacatggtgtccgctgcgtgatttcatcgacggggcaagtggtttggtcctgagtttgcatggcgtccatgctctatgatcctacctgcctcgttgaggtgcagctgctacgattgcctgaggggctgactattacatgaggaatgtacagctggggatcctagcaccgatgtgcggccatgtgttcatccaccttccttgccacctcctcctgcatgcttagctcgtaactcgataccctgtacttaagatctgcaatcttcacctcagtatctctcttgttcctcatccgactcctgtacgtgtggatgtcctccttgaatccaatcttccaaggaaccacgcctttccctcgtgttcgtcttggatgctcgggagtctgcagggcgagtgacagctcatccttctctctatcgagtcggaacgtgccctgagaagatgcttccactgcgtctgttagtcgactggcagcttcgcgtatctgatcgctgaacgccagggagccatcaacggggttaagcgttccaccatgagcatagtaccagaacttcgatcgatccggctatttagtggtggccggttcgatacccctctcaatcaagctggcttccatctcctcccacttcggcatcgcgacgctataccggcctgaccccaggtggtgatggtactttttctttgcagcattttctttgtttcggtccatcatcgcttgcccttgttgccctgtcttgtaagcaacaaactcgtcccagtgatcccttagcttcgggaatgtgttgaagttcggtgtcagccccttcaggatgtatttcttgtagagttcttccttgaagcactagaactgttctaccattttcttaagagtccactgtttcactatgttctccgtacccgcagggagtgtgaacgtctcgagcattgtggtccacaacatctctttctctgattccgggacaaagctgtcataatccccacgtgcccttgttctaagccagtacaccttgctgataggcacgttatccctcacaacccaaccgctgtgtcgtacgtaattcttggctgcttctgctggggcactaggtcggccgtcttcgtccacttcagttttaatgtgccgaccctctatcttctttgcggcacctcgttgtctgcgtcccctcttctgtgcagacgagggttcatttccactagcctcctccccgttcccctcctcgttcccctctacgttcccctcctcattcccctcctccacgttcccctcctcattaacttcctcgttcaagtattggtttggatcctcgttcccctcttcttcgttccagtactggctgcttccctctgcgattgtatcatacagtatctgttcgttatcgcgatcagccatctgttcatacaagaaatatttccatatataatattaaatctctagtaatcatatgctaactctagtaatcatatattaaaactctaataatcttatattaaaactataataatctcatatggtaactctaaataatcatattctagctctaataatcatatatgaaaactctaataatcatatgctaactctaacaatcatattatatctctagtaatcatatgctaactctagtaatcatatattacatcacttgcatgcgcaaattcctctgagggctagctaccatttagtcttgagagacgacgacgacctcttttctgcaacatgcaaaaaaaatgtattagtctaaatgcaaaggaacatactttgattagtgcaagatagattaaactaggtcggaggggagtagaagtttaggttcatggattcattcgcgttcgttcccgtttgttcgcgttcgttcacgttcgttcacgttcgttcccgttcgtttacgtttcgttcacatttagttcacgttcgttcggcgttcgttcgtgttcggtcccgtttcgttcacgttcgttcgcgttcgttcccatttcgttcacgttcgttcgcgttcgttcccgtttcattcccgttcgttcccgttcgttcgcgtttcgttcacgttcgttcgcgacggcgtgggcaaaggtagtagcggcttcggcctcggcaaaggcggcggcggcggcgacagcgagacgacggcggtggcgtggcgcggcggcggtggcataggcgtcgtgcggcggcggcggcggtggcggcgtggctgtcggtagtggcggcggcatcgtggcgcagcggcggtggcgtggcctcggtcaactccaaccttgttaaggtcaaccgttgtcatcccactgtcatcaatcgttacgcctccaccagtcagcctaacccattggcaccgaaacagagggaccttgagaggtccatagtcaagttcccatatgtcctcgatggcaccgtaatacgtgctagttgtaccatcgtgtcccatatcatctatacgaacaacactattctggttcgtgctcttcatatcttaggctctcgtgtagaatgtgtacccattgatctcatatccctggaatgtcgcgatcgagctagatggtcccctcgccaggaaggccagttgttggttaatcgtctcgttacccatgagaagtcgcagccacgcggggaaagtatcaatgtgatgccgtgtaatccatgcatcggacttaccgatgtttctggcgcgaactagagccaagttctcctcgatgtaaggagccaccaatgaagattgttgcagaaccgtgaaatgggctttatggaataaattgttgtctaccatcattattgctttccttccgagagtcccttttccccgtagtctcccttcatagcgtgattcgggcaccccaattgggcgaaggtcttcaataaattctacgcagaattcaatgacctcctctgttccataccccttggcgatgcttgcctctggacgagcacggttatgaacatacttcttcagagcgcccatgtacctctcgaaaggaaacatgttatgtaggtacacaggaacgagaaagcagatgcgtcattatattgaaaaataaaggtggaaatatcaactcaaagctaacaagacattgcaccatatcattttgaaggtgttctaatttatctggatcgatgaccttctgcgaaattgcgttcatgaaagcacagagctttgttattgttgcccgaacattgtctggaaggataccccgaattataactggtagcagctgtgtcatcaacacgtgacagtcatgagactttaggtttgtgaacttcttctccttcgtgcttattattcgctttatattcgtgaagtatccagacggaaccttgatgctctccaagcattcgaacatactttccttctctgccttgctaagagtgtagctggctggactcaagtaatggctacctttctcctttggttcagggtgaagatcgctgtgttgttccatatgcttcagatcattacgtgattccagtgtatctttctactttccatatacacctaggaagccaagcaggtttacgcaaaggttcttagtgaggtgcatcacgtcgattgcgtggcggacgtccaagaattcccaatagggtaactcccaaaaaatagagttctttttccacatcgccgtgtgaccatcttcgctctcaataggctggctgccaggcccctttccaaacattactttaagatctttcaccatagcaaacactgttttcctgctgcaatgtttaggcttcgtacggtggtccgccttatgttcgaagtgcttgcttttcttccgtacaggatggtttgcagcaaggaatcaatgatgacctatgtacacaaccttcctgaaatgcttaagatacgtaccttcagtttcatccatacagtgagtgcaagccttgtaccccttgttagactgcccagataggttgttaagtgcaggtcaatcgttgatggttatgaacagcagcgctcgtaggttaaactcctcctatttgtcctcgtcccacacggggacaccttctttcttacacaacagttacagatcttcgaccagtggtcttaataaatatcgatgtcgttaccaggttgcttggggccttgaataataatcggcatcattatgtacttcctcttcatgcatagccaagggggaaggttgtagatacacatcgtaacgggccaagtgctatggctgctgctcatctctccaaaaggattcatgctatccgtacttaaaccaaaccgtatgtttcgtgcgtcctttccaaagtctttaaatgttctgtcgatgtttcgccactgcgaaccatcggcagggtgtctcagcatcccgtcctgttgacgttcttcagcgtgccaacgcatcattctagcattccccttgttcctgaacaaacgccttagccgcggtcctccttggcgtcctgcaacatctaaccaagatcatccgtagcgtcgttatcgtcagcatccctgtccacctcgcccgtttgatttccttcaaatccagcgtactgagcccagtccggaatgttctcgtcttccacttcatcttcttccatttcaacccctttctcaccgtggaatgtctaacaattatagcttggcatgaaccccgactcaaacaagtggaaatgaatagtcctggatgcataatactccttctggttcttacacatattgcatggacgacaaataaaacccttatgcttattagcttcggccactctcaaaaaataatgcacgccatcaataaactctttcgaccgccggtcagcgtacatccattgccgatccatctacatgaaatgaaaaaaaatcatacataaataaatattcgtacaataatgaaagtggtacaataatgataaaataattaaaaactctttcaacggttatacaataatgacgtatcattattcatacaataattataacataatccaacaaacaattcttatttattttttttgaagttttaaactaatattaatgttgtgcttcttttaattttcaatttagtttcttttctattatttaagattaattttcattatattttaaactatgagaataaaactttttaagtaaacaaacaaaattcctatatattcttcttcccacacaaattttctctctcatcaacttacaacaaagttttggcgataaaaaaaattgtgaaacatagctccaaaagtaatataacaacaaaaaacattggagaacaagttactaaccttttagacacctctgatttgtatataatcaccaaaaagatttcacaagaaattttggcatgacctcccctcttttttggagaaattttgaagcttgctcgggctggaggaggaagaaaac

SEQ ID NO: 9233 - DNA, 18047 bp, Oryza sativa
cttattcaatgttttaatcttacaaaattttcttacttttcactcaccataacatgcacatgcatagccttagttgtataaatgtataatatataatataaacttgctgcatactctgagggatggcttggtcccagcaaccttcatgacagcgctgataacccattgcctatagctgtgatagcccaccacccgttgccatttttccatggctcggatattttttagaggaaaggccacaaggacccagatttttaaaaaaagcatgagtcttatatagttttcacataacactggggtggcacagttttcagggctagccttgggcctaggccggttatgtgacacctagggcccaggccggaggggggtggggcatcaccacctcccagcccagcggcagccagcccggcaatcccaggcaaagcatgctgcgcgcaagctaggagggagggaggtgagaggccacgtcgctactcatctccacgcgactcttcgttttctgtttttttttttacgcgactccacctctgcgaccggcgactccgctctgcgcgttgcagctgccgtgcaatccctgtctccctgagtccgctctgtgacacaacgccgcgcacccacgccgatggccgatcgatgccggatcaccgcctgatagtgatggctgatgccttgttaacgacgaaatttggtaaatcatgcatcgaatttggagttaaggccgaagcggatttgggaggaaatcgataatggaaacagagtatgaatcggcttcggaaccgtatcggctacagtgtgcattggcagttaccgaatcggacaaggcaagccgatgtagccgattccggcaagatgataatggaatcattgtcggattgagttgacgtgcttcataatgattgccatgtacggatcgagtccgaagaaggcagttgtatctattaattaggaatagtttgttagtttccttttttatccttaggaaagtatgtttagtgtccgattatgaatttatgctttccttttatctttaggaaagtttctttcttgtcctacaaggactagtatctacccatgggtataaatatgtacacccggggtcattgtaatcaatctcgatcaatacaactactctcggcgcatcgccaccctctttcctgaggtttttacttatcaaccggcggaatttggcacctgacgtggggctgcatcggctttcgatcttcggcgaaggggtaagtcctacgtttcgtcagccctagtgaatctgtcggctacgttggtgttgttcaaggctgcatcgcttcgaactcttggatcgctctggtttggttgaaatatttgcctacctgatatctcaattctatctctaattgcattgtgtttagaggcgcatcggtttagttgggactgtctcggttaggtctgatctcctgtcttagccgatatatctctacaatcataatgttgttctaaatatatttgttatatccatcacattagacagatcaatcggctcatcgagtattagattatcatatataatctcgtgctgcatcgattaggttcgacctactagattgttgttgataatataagtcttgttaagccaataggttcatgctaatgttttatcgaggtgctagccgataagttatctggacgttgcatcggcttgtaaagattgcatatacatataaattggatttagccgatcgcaacaaaggtttcactgtttaatctaatcttatggattttatgacatcggacctccagccgatgtatgctttaaccttcggatcgatgcttatttatcatatcattatttgctgattggtttatactagattatattgttattttattacctcatcatcaaccgattgcctttatatcattatctacattgaacatatagtcgattgcttaaaccctatcgccatcggctgatatcggcatcggctattatcggctatcggctggaactactccatcggcttgtcagccgatttgcatatcttgtcagttgcaggatcaaactgactggcacgcctgtatctcatcaagttttggacctgcactggagctaagcagatctctcaggccagtatgtgtttttttgcttcaacacgcctctccctgtgatcccgtctcctataggctacgggcaaactgaggttagagtcttagagtctttttgtactgtgttactccttctaagaaatttaagttagcaacttattacttatggacttaggattttcttgcttgcatgctgtcaattgttcaaaacaattgatactaagagttatctagcatagggtggaatgaggaactggaagcatttataccttgagactcaaacaacatgacaacagtattgagcatataagacacatgaatacttggaatggacttaggtggagattaagcaaaaaccagacaattgatgatgatttgcaacgggaaattgcaaaggaaaaaagattgtcggagacaagtttttggtaagaatagtttctgctatgaaatttcttgctaaacataatttggccttttgaggattaaaggagaaactttatgaagataacaatggtaaaatttttttgtgtcaatatatagtatatatgatttaaaaagtatatactagaagtaaaagaaataaccttaactctttaaaggcctatagtgtcaagttcgtctagggcactcgaaattgttgggccagccctagcggctttcggtaccaggcaggcacaaaaacaactaagagacatgaaagtctatctaaaacagagattgacagaaaactagctaaaacaactgactgagcagtgagaaatagttgggctgataaaatgaaaaggaagtgagaacatacagtgtgtttctttttcaatgccacccattctcataataaacttatatgtaacaagtgttgccttagtatgggcacatgtattgtttcatttggaagataggcagagagagagagaggaggaaacaatccgttcttggatgacatggtagttggttactacaatggaagaagtggatcgaccatcatgaataggaaaaagattttaaatagcttatggttaagggaggtgaaatatgaattaaatatcaatagaaaatttctcaggttcctctaagtttttaaccagtctgtctcatgcacgtgaatatcatacaatcccttatatgcccctaaatttctttatagacccctacatatccattatgttaattgactgtgaagagaccattaacaacagttaaatttggcaaattaggtcttttgccaaatttagtaatttcagccattcgcagagccaccgcccggcaacccgcggctgtggtctcggcaacaggttaatggtctcttcacagtcaattaacacataagtcatcatgtgtgctggttgtcggtttggaaatccgctatgactggttcctaaccaacaacaaataccttattttagtagtgacggaatattatggctggaaggacgcgtgtagaggtaagcctgccaatgggctggattgaaatgggcccaatggattggtttcagctttgggtgtagtttggatggatggaaatggattgaggagtttaatgggctggactggttagggtagaggtggaaacagtttggattggattggtttttggtttctgatttttggatccaaattggattcagtccatggatttctttggatgcactagacagtccagtactctccaaacctagcgtcatcagtcgtccacggctccactccttccgccgccgccgctccctccccttgcttcgcctcctccatctctccgccaccgtccgcgaatccgccgccaagccgtcgccagtcagattccctcccccaccaccattgcttttctttttccctggtttttctcggtctttgatctatcctggttgttttgtttgtgtttttttttgggtctcttcctgatcttggtggttgcgggtgcaggtgaagcagaagaagaggaaggtgcgtgcgccgctgggcgttggcgaggatgtcctcctccggcggtccggccgcgtcgccaatctataagaagcccaagtaccacgacgtatgtgaacagtgtgattggtgtgatagtttctataagattttgtttttttgttggttttactgaggagttaacttgctcaagattacaatctttgatgggtttatgtgcaggagttccaagatttcaagaagaagataaggaggtatagtgaatgcaggttcccttcatctcccaatgcaaattatttaacatatcattacagattgagtcctgatatgattttgagatgcaaattaattctatggtcaatcgaattttagtgtgcaaattttagattgtagcacgtgtacaatgtgtggaaaaaataattatagaccatgttctttcaactatcttgattttagatttcttcctctatgcagacaattgaacaaactcaataataaatatgtccatacaaatgtcagagagttcaggtactaatagtccaaataataatcaatcttcaagaacacgtaagagagctaaagtatgggaacactttcagcaagaggttgtaatgatagatggtgtccccaagactcaatgcaaatattgtagcttaagattgacagccgccaaaaagtcaggaacaagtcaccttattaatcacatagccgaatcatgtccagctattgatggtgatgctagaatcaacttccttgcaacaattaagaaacagactagggaaggtttcgtgtttgttcccaagagaagccgggagctaatggtcagattcttcattcatgcagaggtgccattcaagaaaattgaggatccttattttttggagtgggtggagtccatgcagccaactttcaaagttgtggggcgtcaaacacttcgtgatgatgcctttaacttgtatgagcgaatgagggaagacttgcatgctgaaatacataatcttgattcgcacgtatgtctaacatccgatatgtggatttcaattcaaaatataggctacatggttgtcacagcacactatattgatagagagtttaacattaagaagaaaattataagctttaaggaattgaggtatccccacacgggattcgccattgaagaagctataatgagttgcttgacatattggggcattagaagcaaactgtttactataactttagataatgccaataataacaattctgcatgtcaagagttgataaagaatcacaagaatgcattgatgtttgagggtcagcatttgcatgttagatgttgtgcccatatcctaattattttggttcaggatggtatgaagataattaaacctacaatacacaagctacgtgagttgttgaagcatttagattcttcagtatcaagaatgcaagatttcaattctatggcaaactcgaaaaatcttccttcgaagttgagtttttcttttgatacaccgactagatggaattccacctataaaatgattgtagaaggattaatgtacagatctgtcctggatagctatgcaaatcaacatggtgaagttgcacctactgaactagaatggcagaaagttgaatcaatttaagaagccacattatcggtgtcagcagataggaaaccaacagcacataggttcttgcccttggtgctacaaattcgtcgtgcattgaatgaccctgattggcagactagtgatattttaaaggtattggctgcagctatgctctcaaagtttgtcaaatattgggacagtgggtttaactctgcacttgtcattgccacaatgttagatccaagaagaaaaggagattatttgaatttcttttatgagaaaacatctaacagtgtgatagagattgtcgaaaaagtgggacagcagcagtgttggatcacctgttcttgggaaaagaaaactcgaggaagagtttgcttttacaagtcttgaaggaggactgcacggcaaacgaaatcagaatttgccatatatttagaagaagatgttgaggacgatagtgagagtttcgatgttttggactggtggaagagacatgctcaaaaattcccggtattgtcatctatggccagagatttcctagcaatacccctcagcactgtatcttccgaatcagcattcagttgtgggggcaggatacttggtgacacacgaagtttgttaacacctgaaatgcttgaagctctcatttgtgcgaaagattggttaattaaagccaacgatcctttgatcaatattccaggtgctgaaggtataatagtgataaatgattcctccataaatgttctgtgtatttcaatcatgaagtagtgatcatatatcatttataggtggaaatttgtcctgatttattcaggtggtgaagtgaagaagatggaaaggtgactttccatatacatatatgcaactttaaattcaacttttcctttggcgtattggaaatttggaatggaatacttctcttgaacctgcatttttccaaaattgagtttaccactttgttgcctattctgtttgtatataaaatgttactattcattatttaccaattgaatcaatttggcacattgttttgataacactgcaaaggtcacattatttaaattgttattgtaattttgtatatttgctttcttaagcaacgaagtaacaattttctagttattcctggatataaattttttatgacatctacttctttcaggttactgtcatctgcaagaatgtgtggctgagaattggaagggtttttggttttggttatcttagaaggtaatctaaagattgagacatgaagaaattgttggtattcagttatacatggttctgaggcttgtaatgcttgatagctttttttgttggagattttctcttgagcctgttgctctagtagaatctctagtgataattgtaatatttagttgccaaaacttgttggatggcactacttaaagcatcaaaagttctaagtatgctagtagcgttgattgattatttttgcatcttgcttatgttatttgtaagtatgctagtagctgtatgcagtgtgagtgttcgccggctgctctgctctgcttcctgccgtggattgggtatgggttggaaaatggattccacccgtggattgtgttgaatttggactgagcaactttgtgggttgggttgggtggggttagctcaaggaattcttggtctggattggagtgacaattttgctatagtcactttgggttgggttggattcggggtggatgccaacccattggcaggcttatgtggaagtgtaactatgcattgttctttttctcctaatgccacccattctgaaaatatattaattcctccagcatgctctatgtagaatgtagctagtgtatacatatatgtgtattgcaaaatggaacaaaatgatgccaaagagatagggtttgtttgtttcgttttgcaggcagataggtaggagctcttgcttagtgatcaatataaataggagggggaaagagattaaaaaaaaggcatgtcaatgtagggttcgtaggtgcttgttgcaattaattactcccttcaacaaaattaaaaccgggtctggtaattgtgcacatgtaggtgaaatactgaaaactaaacaaggaattgtcatttgttctgtacacctcaatgaatattttcttttcaagtggtattgcgtgtacgtgtgagttgtacaaaagattattttattgcctccctgaactataaaaatctatagcctaatagtaggatatatatatgaatgtgtagccctttcttgcaacttttcatttcatttgttcttttatactgtttagcttcatttattttgtaatttgtatttgttcacaatattatttgatcttttatgtctataatatatgactttgatcattaaaaaatacatgtgatctaatacttaaaaaatcaattatttttcacccattagtctgtcttggtgtaattcctccattttgaaccacaatatttaacataattgtcaggcataaatccaaagagctagatgtccatgcaaaaatataataagccacttccgcccgtcagaggtgagccgtcaaagcttaggccaatttgatgtagggagtactccctcaattccaaaatatgggacgcaactgctatttttaatgtttcataacacacggagcatgcatgcatctaattaactaaggccaagtttaattctaaactttttcttcaaacttccaacttttccatcgcatcaaaactttcctacacacacaaacttttaactttttcatcacatcgttccaatttcaataaaacttctaattttggcatgaactaaacacaccctaacacatacccgtccctaaattttcgtttgtttaacttttcacccttaagatctctaatataccattaggtacatgtattttatttattatgatgattcaaacgagtaggggataataatcttttgatggtctttgtgtaagtgtatatttttttattttttgggaatggagggaatactgcctacttcacactaggcccaattcagtgtgaggtgtggggaaaactagaataatctttcctttgaccagcaagaaaactcaagacagctatcgctggcagcttatctaaatttgatcctccatatcctcatatggatggccatcgaaaaaagattcctcctccatataccttcccactctaatagatcatccatattacatactccatatcacaccctcctatattttactaatatcttccaactaaccatatatttatgttattttttaagggctatattttgaacaactaaaatttaacggtgttatttatcacgataatctaaatgagtgtattttaacctatatattttcaatggataatttaatgcattaaattgtgacttttctcccgaactatatttctctttctctctctttttctattcattcttttctctctgctcctttctacactcttctccattctttccccttctctcttctgccgactgccgcagctctcctctcctctcctctcggcgtgggcgacggcggcagcagggcggccgagctggcacgaggcggcggtggaggcgagcagccgggcgggcgaggggcgcagatggtcggggaggaggcagccggcggcaggtgggcgaagggcggaggaggcccgcggcggccgcgcgcatcgtgacggtggcaggcaatgcgagcaaggagcagcggcgcgagcgcagtcctgatgggggcgacgcggacggcagggcctccactccggcgaactccaacggcagacccagtatgtccatcctctctattccccacggtacaatccagatggtggcgcaagttcatctgagctgagtagtttggggatagcgtaaggagagaaactccaaattaggcatggggagggcgcggtttggaggaagtctaaaaatggtgtgcgtgatagaggatttgctagagcgtgttttttcatctccatacgtgaaaaatgagatggatggcgggatggaagagctgctgggatgctctaatgaacccagaacccatgatgctgcccaagattgtcaggtggtggctccactagtagatactactaagttggtatgcgcataggtgaatgcgcaatgtgcttctttaccaatgtcacccattctcaaactaaaatccagtaacatgagttttctcttatgtacatattacaaaaccataaaaaagattgcacagagatagtatccacagcttcagttagctggcaggcaaacagatgaaacaacctttgcctagttattattatataaacaaaagagagagaaaaggagatggaagcatatcaaaacagggtagggagtagtaataagtaatttcttggcagaaatttacagtttcgtaattgaagaattgccggtgcaatgtatcacaccataccatcttccacaaattaacgtcttaaattgtccaaatacaataaaaggtacctctagattaaccattgtcacagtaggtaattaatgtgtttgatttgtactgctctctggcactttgcatatcatataaccctacgacatctcgacatactccacgcatatccatatttggagttttgctttgctttgaatcagtttcttgatcgtgcctcattgcatggatcgctttcttcaggtattagctcatgtggatcaaaattcaactgcctactaggcctaattcagtgcgagggcatggtgaccgcaatagtcaaaaaatcaccctgttcctcttcgctagttagaccacctagaaaactcatatttgccatggctggctggaaatgagcccacgaacccaagttgttcccaaggttgtcaggcagtgactctagctagcagtagatgagtctgactgctgcgtgtataggtgcaagcgcattgtttttctttcccaatgccccccattctcaaactaaaatcatgtgacacgctttgtgatttgtacatgttacaagaccgaaaaaggtaatgacaaggggagagcatgtattgtttcaattggtagataggaggaggaagcaaccttacgtagtgatcagtataaataggagaggagaaaatggatagaagtatcaaaatttggtaggtggttgtaataagtgttcttttcttgtagaaagtaagcttagaggtaaaagccaaggtagattatatgctaacttacactggagaaacgaaactaaaattagagataccatcatggactcacggatttaatgcttgcactagtacggatttatgcatggctagcaaaggcttgagactagccaagaaacaaaatttatttattttttgataaaatactcatccgtgacatgcttaaacttaaacccgattgagatgacctcatccgtgacgggcttaagtttaaagccgattgagatgtgtcatccgtggtgagccttagtttatgcccgattgagataagtcatctgtgacgggcgccataccatagtcgttttcaagtatgagcctatcacagatgagctcatcgttgatgggccctagtttggctctagtttgactcatctgttgggtcaaatctatcaatgacagggctttagttttggcaagataaatataattgtcatccgtgacggcaaaatacccgatacagatgacttctcatatcaatgacctttggtccgtgacgggaccgctcccctacacagatgacgcttgccggccaattaagatgagatatcccatgccggtgcttacttgtatagtatgtaaatgtaatctaaacatgtagcatatacttcaatggagctttaacgcaacctttcgttttgtttcatttttaaatacaatatgtgacctgatgagctcaactatatataattttttcatgtaaaatgcaacgactcctacttcaagcctactagcgaagatatgtgtatgcaaattttacagtagtctacgagtagtataagtaatgcaggccttctatttcttttgtttaattaataaaccatatatatttattctatcaaatcatactaattctggaataaaggtggcatataacataaagtaagggacacataaatcaatgtcacaaatcatttaactgttagtaatgaccattccttcgtgaacaaactggtgcactactgaaatttcctcgaaagctagttgagctattgacagaactatattcttcacaaggagctcatgtgaataacccaaattaaccgggtgttaatttcaagtagtgattgctagtgtggctcaggtggcgtcccgtgcacagcttctgtcttgtcaaaaatcacaaacacagttgtgtctttagccacaccatatcaattagctttgctttccaggtgctgctgtagcagcaatactagctatagctttgatgttatggcatgtctaaactcaagagatgccctgacaagactggcagtatctagccgagccaatttgcccgggcagagacatcagcttggcgaatctacctttgaggaaaatgtggcggtgtgtctctcccaatgccacccactctcaaaagcgaactcatgatctacgaagtgtaactgtagtacatgtgaacatgtcgcgaaaaggttgcacgttttcgtttggcaggcagataggcagacataggagaaagcaaacccagcttgattggagggcatgatagttggtttgctggaatggatgaagtagatatacagatcatggattggaggcggaaaaaagagtctatcttgtaaagttatagataggaatggggaaccaagataggatgtatgaatacatagtagatgttggtgattgtagtaagtattctctctatcccaaaatacataggtttatactacttctgtcccaatttaagtgtagttgtagatttctatgtccaacgtttgatcatccgtcttatttcataaatttatgaaaaaaaaattaaaaacaatagtcgcacataatatactactacttccgtttcaggttacaagactttttgactttggtcaaagtcaaactactataagtttgacgaattctatagaaaaaaatagtaatatttacaacaccagcatagttttcattaaatctataattgaataaattttcataatatatttctcttgggttaaaaatattactattttttctataaaattagccaaacgtaaagtagtttgactttgtccaaagtcaaaatgtcttataacctgaaacggagggagtatttatgttttatcatcttaggaaactttcccataccagaaacaaactttacaaactctaattgtactaaatttggacttcttccaaattcgactccgcttcccaattgcacacaatatctccattatatgacatatatatggaatccccatcaaccacgtgcattaatctttagcctaagcatcccgcttaatatccatcatcttctcccaaattgactcccaatccattatcggcaacactctcccgaggtgtaacatcctagcatttgccggcaaagcagagtaaacgtgatcagtgcttacccataggaacatgaataaaaccagatagcacatccatgactcacatggaacatgaataattgaaaccggaaataaagaatcaaattgaaaaccatattgcacatccatggcaagcatggaacttgaactatttaaccagaacctgaaccatattgcgtcaggcataacacatagacacatcacaccactgtaagaagagaatagaatgagtagatggcatgggggccaatccatcccatacccaaactattaactcggtacagtgatagatgtatcacgacctagcactcactctcggacaacctcacttggcattgggaaaaaaaagagtaaaagtcccctcctctaaccactttgcattgcctatatggaagcaaagttacctattcttagtcttataagatacaacattaattacttctataaaagagatttacacaagttagatccatgattaaactagtttaactaaggtctagggcaactaaaactttatcatgtacactcacagaccacaagtataacacattgcaactccatgttgttctccctaatagctttccaaatatggttatgcgcaaacgttaatctccacactatacaccgcaccaatggatcaaaactgaataatttttttatacctcctagctttacttaatatacaatcaaatcttattcgtagaagagcatatatatctagtaacaacataactctagaaattacaaatacaatgagatagagatcagtaatcaataaaataaatcagaagtgtaatggattgaatgacccaattccattctactgtgcgccaatgtgttaaaattttaaattattcaggcctatctcatgttttgtgttaatccattaagcaacgtaaagctcttttttctgaccaactaactctaagcagatctggtcaaagttttttttttagtcaaaattatttattctctcccatggacctaccgcctactctgataccaactgtaacaccccaggtaaccacgtacctagagtgctacaccaaaatacactcaaaccactaactcccaaaattattagaaatttcggcggagtctcccctataaatacggacatccataacaggcaattataagttaaactaataataatatcattcctacagcgcgatccatccttataattccatggaaagaaactaatagatatctaaaagattattacaagaccgaaccatgatatagtttaagtatcattatggacctaagcattatagtttgatagtgtgcaaataaatgtgtatataaaggtgctagtttccgtccatgcatgtcggtctcaattcgtacctaaaaccaaataaaacacaagagtgagtataaaaatactcagaaagtacaatatggaacaagaaaacacatatacacatcattggcaataaagcataaacagatggctttctttttttgataggaaacacattttcaaacaccaagtcaaagaagatagtagttcccatcccgggtaggcatgaattgaaagagtagtttccatcccggacaatagtgaatacatcctatcatttgccggcaaagccgagtaagcatgttcagtgcttacccataggaacatgaataaaaccaggtagcacatccatgactcacatggaacatgaataattaaaaccggaaattaagaaccaaattgaaaaccatattgcacatccatggcaagcatggaacttgaactatttaaccagaacccgaatccggaatattgatacaagaataacgacgtaaacataaaataaacttgaaatctaaatagcatgaacaacaatctgaacatatgcaatcacatatcacacataaatgtaatgaaaataaatagatagagcaaacactctaagaatcacacaattagttcgtcatgcacttgcctccaatgaaggtttggtatcatacacgatctgaaggaccaccacctaatcacaaacaaacctcagcaaacacattcaaacatacatatgaaacaataaaaaaggtgaacctactgcccatcccgtcaaaacgcaataacaaggaatgccgcttggactatacataagactgctgcttcaaacctttatatcttgaaatataaaaaggctatgactgaaaatatatatacattttaaaaatctatagaacaatacctacaacttttatgtagaaatcatatttttattctgccatttaaatggtctaatttgtgcttgaaagccggcttcagaatctgtccagaatttcagagggtacatacagaaacaactatatctggagttctactcatctgatcaaagagtattttaccaatatggaaaccttggagaaaactctacaactttgtctagaggcggcttaactgattccgctgtttaaccccttaaaaaacagttcaatctactactatccagattatgacataaaagcaacagtcatactaaaaaaaattatatctcctaaaccacttgagataaaatcacgccctttggtcagaagatagatccaaacgttatctacaacttcctagctatacactttcgcagaaattaacatttatagccccgaaacatcgtaaaaccgaagcactgcaaatctgcccacatgcagaactgcaacaaaccaaaccgcaaccacccaaactcctcctctagcattcactaaccacgaattaaagcactaaaaccatgctagaacaactgatacaacaaggggaaaagcctcacctagtgatgtgaacactcacgaagggtggcccgatcttcacgacaataggttgaaaaccaaggataagttgctgtagaaatagtgggtaactagctttatacctgccaaggttggatgggaccaaacgacggggagagagacgccaaaaccgtgaggacattgactcgatctccgaacgaccgcagaaccacaatccggaactaatccacacaatacggtgcagccaaactagaagccgtagagcatgaactaggggacctcagagagatcttcctgacaagtccaagaagaactcgcaagaacaaaagggtgtaagacactcaagcagctcggttgcaaaaaccatttaggttatcaaatcatcaaaagttgttttctggaagcacataggggatatttatactaggaacaaccattctagataggtatgaaaagtcttggaattttaaaggacataggctagcccaaaggtctccacaagtgaattcccgagaagactcgcgcgcctgtttgccttctgagcagccttcagtaaaaatgtcattactccttattgacatggggttggttgcgttggaatgctaacttaataagctttcacaccatgtgcataatgcactacaaaatattgtagattgatatatttttgcatggaaagttgaatgtcttggcaagctgttggccttcggagtagtgtccactaatctggccataactctttagtgggaaatccaatggacgaacggtttgttgggtttgaaactagactcaataagcttcccagaaagtgctcattcaccttcatagcttttgagaaacaaaagttatgatgatttattgaactagtccgttttgaaactgaactggctcgattttgctggttcttttttactgtctgatttagcatcctcttgttgcatattcctaagaacaaccaaagtagaacatttaggtaatataacattctcatctatagatgcatcaaatgtagcaaggagtgagttcacctgctattgtagttttttcacatgacttcgcgtaatcggtctttccattacttggtcgcatgtaactgtagttgaacttggtatagtcatgactgggatgtcctcatcacctagggtttttttagagaacttgtgaggagacaataggggagactccgatctaacccctcctactcctctcctcctcatcattccgtttttccacttcgcttgttgatccaagctatgaagatggagatatagggagagcaatttgttgtagaggggagagatgcaaacacaggaggaggggaggaaggcggcgccgtttgaggccggccagggagaggggtagcggcaccatgaggggatgtgggattcgattcccctctctctaggttttaggggagaactagtgggctgggtttatgggcctcctcatgttggcccacttataaaggtatttttattttatttatttatattaacatatttatttaacaagtcaacccaaaccaaaaacctaaatatcttttaatatacaggatattacacgaggcatcaagactcacctacacatgcaatcaaccaagaaattatatccgagtacaagttctttccatcttgactcaatctttgcgcacaacagtattacatacgcatagtatccatctataagctataaacatgaattatccatgtgtggccatacagtcgtcggtcagattgcgggctggctagtctgaccgcttgctacaatccggtctgaccagctttagctagccaaatcagctcatcacctcaaaatactgtttattctcatccggtctgaccgatacacacaccccagtctaaccggtgccaaaaccattttgctaataatctccaaatatcaaaaaaccaatattctcaaatagcaattgttaatcacaaaataacaatcaaacacactatgattttacaaaaaacatagtgtaattggctataaaagggaggcaaaggcaaacctatctgcaaatgctcatcaaaggcgggttatgcctgtattatgcatgaaaaaacttataatttgttctaaccctgatcataaaggaaggctagtagttacactatcagtttttcttttgcaagaagaggtgcattgtcatgagtcaacgcgtggagtaactaaacagaagttctgaggataatttgg

SEQ ID NO: 9234 - DNA, 30994 bp, Oryza sativa
  unsure (1)..(30994): unsure at all n locations
aatatattttatctttatatagtagaaaatcatattttaaatactgttgatttttatgaatgtatgttttttctgtcatttttatgtacatgtatatgttttttttccagcgaagattaggaaagttttgttttcaatcatgtacaacgtttgtacgtatggaaagaaagcagtggcatttgtaacgtataaactcaaactcatacattcatgaggatattattttttaataatagatctaatctaatagtgtaaaataacaggtctatcaatttaagtgaaaatgaacggtgagattagatagtaccatgtggcgacttaggagcgtttgtaggagtgccacgtggcggcttaagagcgtttgtaggaagtttaatggacttttagtatataatagaagattggtactctttactaccatgcgtgcaattaatcagcttaaaaaatatcatgtactcatgcattggaacccacggtgtaaaagaccaagttaaagggaatgtgtgaatcatccatgtgccagaaagtcaatagtgttaattcttcagacttagactcaaatatttcgaaagtgaaacaatataaaaccacaagtttaatgatgcagcatttgcaatattcagttttcatcaacagtacaggtgtgcaacttatggtcgccatcagtctgtagatagtttgcaatccaggtttgggttacaacttggtagacttgcaaaaatgaaattggcggctcaccggttcgttaaaaaaaatgtttcttccatctcttgattcaaaaactcgaactaaatagtttttttttcttaagatgatggattaactcctcctattgaacatcgatttctttccacggcataaaatttctcacaataagatggactcaagatttacgtgtgctatcttttcccaatcccactcattcccagttgaatcggtagagccgaccattgtttcccttttactacaggtcttccacctatctaaactttctagtatacaaagctttccagtatacaaagagatgagaatggacagtgcaagtgagtgcttggtagagaaaataaattccagtagctgaactactggttctatacgaataatggaagaagacaattaattagacaaacgggatgtacctaattaatcataagatcaacgaggtcagtcacagaatcactgcacatccatcctcatcctttctatttgcgtcactctggatgcttcccattccaaatagtattacggcacaatgagatcagaattgaagcattccaaaaagaatttagcttcttcgatttatatgcacatcagcacatcaaggccagattttgaatgcttcaatgttttcgatttcctactgtgtgtttccgactaggctaaacacagtaggtgcattatccgacaacaatgcatttatttcctaccatttgataagtgcactgtatagttccaaatattggtttctacaatttttcccaacttgatatctaatctccaactaattaaactaatttctattgtccaccaatgtgctaaagccggtgctgacatcaatagagtagctattccgtccgccccatatacaagttaatatagtacgagatgtggcatatcctaaccagtactataaatctggccaattagattaacttattatgggatgaaggtagtagctgctagcaccatctaaaagcactacacattggctccatttgaacctgattaagatacagattttacctcgatttctgttagcatgttttttaaattgctaaacggcttttttcatgcgaaagttttataggtaaatgttgctttaaaataccaaataaattcatttttcaagtttaaaacaactaaaacttaattaatcatgatataataactctcattttacatgtatgtacttaatctgcatcttgggctagcttatctggggaattcggtaaggcatgcacagtggagaaaagaaactaccccagctacaaaagttaaatcaaacaataatgctatgcagcacctgtgggcgatgatgattctgaagcctactatttatccatgaacagtatcacggctgccatgttttcttcttttctggtgccacccactcctaaacagcacaaggaagaattaatattggcataacacttgctgtataaaactttgtccaccatatttcacagtggtacatttcactttatgccctgtgggcctctgtttggagctcaatattctgggttagtcgtagtagtaggaagacagaagctaagctgctagctgctaggatgaagcttggattacgatttgatttatgcaattgttgtcaatctgtcagtataaatggaggacaagcttaagcacactgtactagatgacacctcacaggtttctagctaggggaagttataatgtaaaataagcaagattgaacaaatgactctgtatggtaggcacgaatatataaacgcagaacatgcgaccagattgatcgggttaattagctcttcttgatggtgtggcctcgtgcatgggatgagctgataggtagtatatgttagggtttaggtggtagaaaaataaaaaatagttatccaaagaatagaaacaataaataggaagctaaatggccacatcatgccacaggcaaaaagatgaatgaaataaaattgtgcacaatcatcttactacagtttaaactcatgaatgaaataaaattgtgcacaatcatcttactaaaattgtgcacatcatgccttatttattctagttgtctacccatccatttcacaggttattatttattacaaatactataaatgttgttagaactacttctaatattccaagcgtcaaacatgcatcagcctaggcccaccccaccccacgtcccgtcatcccacttctactgttgtcggagtaaacgatttactcctatcgcgcgcctcaaccacccacatttattcgagtaaacgatttaattcaataataaaaacaactcccctgcttccgattccaccccacgtcccgcatcgtgctcctaccattatcggagtcaatgatttacttcgataaaaacaacttctctgcttccggtatatattctattttttctgtacccaaccaaccactctcgcgcccactttattttttttcctttttttcagaacccactttattttttttcctttttttcggatctgaattgatccaccatcccagcccacagatcggcgatacaccatggaggaggacgacgacaccgtggcggttgatggcggtgaccggcgagcggtggccggcggtagttgaggcgaaggcactgcttcgggcctcgctgccggacgctaggcaacaccttaacgagcatggagatgttcacctgggcctatagcaacaaccagtggctgctccatgtcggcgactttgatagaacaagcaagtaaggaaatgacactctgatttatatttgcatactctccttcaacttcacacatgaagccctaattttttttgcaaatcaaattaacgtgcaatctctaatattacctgatctcaattgatgggctgcacaggccttacatttgcacatcgtgctccatggggctggccgcagaggatagggtggaatccgccagtgacagaggttgtttgctatttttcttttgctcgtcgtctctattgacatgaacaaaaatggttttttatttttttcgtacttgctagatgatggatggctgctactgcccaacgtcgagctcatctctataccacaccgctacatccttccatgattccatcatcgactactgctcgccacccggttgccctctccactaccagtcacaagacacagaccatgctcttcatccttatagcaagatccagcaaagccaccagatgaatttttggctgaatcattttttttcttttctagtttgattcatatgtgagtaattttatcgcttgtgtgtgattgagcatgtaaattttttcattcatacgactattttgggatacagattaacaatactcttagtatcagtctacacggtggctacgagatcatggttgtatcgagaggaaggtggtaattgttttactcgcagaccacgaaatctcagtctcttatactgtgtattgaacacatcagtaaacatattactacacggtggctacgagatcatgggctatattgagaggaaggtagtaattattttactcatagaccacgaaatttaaacaatatttataatattggttaaagaattactagcattgtaagctggtaatatttcttttatgaccatctaggtattgcgttatacgatgtggaggcattaatgagagtaaatttgttacttttggatgagtaaatgtgggaggctgggagtaaatgaaaaactccacggagtaaattcgttacttttgaaacgtgcggagatataaaaaaaggaaaaatcggaaagaaaaattagatggtaaatattttacaaaaacgtgaaaatagaaaaactatagagaaggaatgaaaaacaaaaaaatctggatggttaatattttaccaggcccattgatgaagcatggatgagatggaaaagtgaaaaaacatagaaggtggggtggtaaaaaacaaaaaagacgaaccgagaaaatgtgggatgcggaggaaaggtggagtggtaaaaaagggaaaaatcggaaggacagggtattctgcggcgctcgaactaatattccgcactgtagcgcgtggaatagtgctaccattaatgttgtaatattatgttaaacatattggttatctttcgtgtgattatattaaaagaggagtccatataagttacaactttgctaattattaatttagaatagtagaactgaattaatagagcgcaaaattgagagtctaagatgggtgtaaaatatattactaccttcgtctcaaaatataacaacttttagttcgatgtcacatatcctagtactacgaatctggacaggtcactaggatatatcacatccaccaaaaaattgctacagttttggacggagggagtaatattgattacttgtggatttcaaaattataaatttagagcccacactattataatgcatgatttattttacacagactcgcaaccccatgcatggctcaagctaatattgttgatattaaaaatattaagattgctttcatatcttatatgtcttggtttctttcattattctggctttgctgaaaagaagaatccattccattttcaattttcttgttattatttccgaatttaggatatattaaaattttaggtatgtctataactaaatagtccatggtagtaaaatttgaagagtccatgatattataattaatcaataacacactacatttaacacgaatcctctcttattataaagttataacccactaactcctaaagtttaatatgcaaagatgccacatcattgtccactaacaatatgccacatcctcatccactaacaatcattaaatttaaacatcatacaaacatattatattatctataaatttataatttgttaaattttagagcttttaaaatataaacatgttaaatcatcatcccgtataattcacataatatttcaatatatatcttcattatttttacaatatgctatgtagctatatagtttatcctcacttagttaatgttatttctctcttctctcattgagtcatatcacatcaattgtttttagtgcttaaatgattaatctatggtctaaattatcacctcaattatttttagcctttagaagattaatctacggtccaaactatctcaatatttttcttctttcataaagtcatatcaccttacttttacatttgaatcattattgtatatactatttaaatttaaattatcataaaccacgttaacttatataatattatattgtctagttatcttacacgttatttttacttattattatcgtactagactcccgcagcaacgcacggggtttcacttagtatttagtacggcattgataaccaactaacaaacagtcgcaacttcttgattggtattgcttagattttaataaaataacacattgactttcgagcatgtaaagtaaaacttcatatttgttgttttgaagaataaatataaaattataaatttaaccatatgcatggatgaataagttggcattgtcatccttgaagaactaattaagaaagtatattttttaattgtaaattactttttggtgttttacaatcttgaaatatcattggcgttttattttagtaaagaaggaatagtgagttaattaaaactgcaatgtaattatttatatatttgtacaaacaatactaacttaaaactataactatgttactcttctaaatctattcatgaccatggattattatgctgtggttatttctggtagttgtatcgatcgtgaaatcagcgaatacatattggatgccaggacaatatgcttatatttgttggcatcttctcagcacatttagtacatgtcctcatcgagggttcgcatcccctgcctttgggcataacggcaagtttggatttcgctggtccatacatacacctcaaaaatcacttttttctcgaacggaagacctcttagacatcatggttgtggcccactgtagctcaattttgttttatgtccatcatgaatacctgcatcttcaagatttattatccacaatacatatcattagggaatgtatgtgtgtattttaacaaatgtatcagttttttctcattggacatggaacaaatggaattaaatttaaaaatatactgttcatccaattttttgtcaggaatattcgggatgcaaaagtttgtggannaannnnnnnantaaaacctttaagtagntnnnnaanatttttttgtnnnaatagnannannnnnnttttnaattttgagagccaaaaattgctactttactaggtgagtcacttacttgtactaaataaaaaattttttttttttttgggaaaaaagggaaaaacccccccaaaaaaaattttttaaaaaaaaaccccctctttttttccccattttttcagcctagcacaaaaatgcaaaaaaaaaaagtgtacatgcatatgcatctagcattagtttgatttcagtcttttatgtgcatttgattttggtttgcatatcatgttaggttcatgaacatgaataaaaggacaacttcactagacaaacccatggtcattcttgtgacgtaattataaggacatgaaagtgaattcaaataataacaactcagttcaagtcaagtcctaatacaagtctttacaaacatttagatgcatttatataatgagaacacttatataaataaacgccttgctaattattgaaaataatttatgcaaggtaaaatcatgggaaaattcatgtagtctctactcaacacatacaattcactataattttattaaaattttaacacttagaatgatacctcgaataaatcagtcaaaccagttaaatgatagaccaattataatccttaatcggctaaaacctgcctcaccataatgtgcattaaactgcataaaagtgtatagggtaaataatttattaaaatactaggttatttatcatgaataaatagaatttttacagaatttatctactctgttcaaatctcctaaaaattcaaacaaagttctaccgagcccatattctccaattttctgagtgcaaaccacataaaatttttaagagaaacaaaataaaatggaaactaggtatcttcagctacctccagaaaaatccacatgaatttatcgtgcccacaaattaacctatagattacaaagagagaagagagattcaaatcctgaaaatcatccaaaatggattaacacccaatctcctacccacctctctcactccagacttgttcccttcgccctggacccacttggcagcctccttggcttgcccttcctctgtctctcctctccaaccgaccaagaacacgagagagaagaggggacacgccctgggcgccggtcgacgcgtggccgagacgcgtggacgcccagttctgcatctctagctttctcctcctcccagttgcatcgccacacatcactcaccacccgtgagccaaagaaaccgagagggagagctccagctctcctcttccctctcctcttcgttgccggccgccaggaagaaggacgccgcaccccatcgtcgagacatcgccaacaccaaatatttcccgttccgtattctaatcttcatgccgaacaagtttccttttgacaccatctcatttcatccactgcagcgacgggaacgccatcgtgcccacgggagctccagagcgcgcccggagcgccgccgccacgacctcgtcgctgtcccggcttctgtggagcgaatccggtcgagccgtcgcgctaacatcttcccctcgaggtcctctccaaatgccctcaagaatccccaagatctgagcactgaggagagagatcgagctattcttctccaactccggccgccgagctccatctttgattcttctttctccggtgagctccaagtcgattccatgcatttcctaggacctctttaacaccagagacatacatgcatggcacttcttgtagtgagtcaagccgacgccgttcatcgagaaggagcgccgtcgccgagccgttccgaacgccgtcgtcgacgaccaagcttcgccaacctcatccaatactactgtgagcaccctggagcttctagagttgcatgcatgcattttatccacctagatccggcctctaacgtgacatgcatcactaccccgagacccaaagccactcgtgctgccgtcgccattgattccggtaaccacagatcacgataagaccaccattggcttcgaaaagaacccctattccttttatattttggtttcatgccgagatctgccaccgttcgccgccagaaagctcgagaacgagctcagccatggctagctctgtttcagctcgaaccagggacctctgtggagaagaaacaaaactgtagatactactttgtaaaaactaccacacacatggaacagtcataggactgcggattgatttcctgaaaagccagggaccttttgcatattggtctctcactgacaggtggaccccatgagcttaaaatctgaaaatctaaggaaaatcctctagagctttatattttcaacagaaaaacatgcaaacttgtaaaattcatacaaagtgaaatatagctcattttgagatgattcaagtttctgtgaactcatagaaggatgaaatttaatatggaaacataaaacttggcacttgcagtataaatttcacctctaaaatttgtctaagaaaaactatacataaagcatgcacaaatttacaaaatgtatagagaattcatttcaacttaaattgaagcaaactcaacttccacagattcatcaacttactctctaaggtaaaataaaataaaaagatgcacttgctttacaccaaatacctctaaatgtatgttatacaaaataactaattttagacaagctgaactttaaaaatttatataaaattcatcttacttcctttttgagtaaactcaagttctgtagaatcatcaagtttagcactttagatatataaaataaaaatatatacttacagtgcaataaaagcccctaaatatttatataaggaataaacaacttagagcacccttcaacttctaaaatttgtagagaattcatctttagtccaaatggaatgaaccaaatttctttagaactagcaagtaatgaactttaattaggtaaaataaaatgtggcaccttctatactaaatatgtcactaaactttaaatagataacttcagtgctagtcacatggtataggttaggcaatacatatgtataaatgtatatataaatgcactctagctctaagtaaccaaaataaaacttgatagaccagagaggtcatagttctatccccaaccaccaaaaacttagcacacttagctcatatatcaatttctagattggtatgttaagtaactaacatagaacactcccctagcgtataaaatgtgtagtagcgtaatataatctctaaaattgtgaactaagattatattggttaataaaattagtcattttatacatcacaaacaatatgaaacatgtactggacataaaactccaaaaccatgtacacatagaagctacctacctacaacacgttaaaacttgtaaaatacataagaaattcataataactctaaaagttatgaaaccaaatgtgttagtcttagaaaacacatctctacacccctgagaaatcaaacctaataaaaatcactttgcaaaaatatttcataacactacctaagtaaataccaccctgtaccgagtaaacttctaaaactcataactcacaaataaaaagagataaaatataaattctttcacctaaattcatcttagatcagtacctacccactgtgcacaaagcatgcattttagagcattttgaatttttacctattttggtgtttaattgcataacgtgtattttatatagataattgcgtaaatgatgaagaagtgaattaggtgctaacatttcccaggaacaaggcaagttttctcctcccaatctttgatcacattgaatcccatgttttgaggaatgaaaatatatttgtttgcaaagttgcatatgaatttagactataacggtatttgaaacttggttatggtagctatgacctaattgctgcatttacttctttgaataattgtgatcctcactgattgtaaccttagaaatggttacttagaaatggttagagtactttcaaagtgctcaattgggtttatacatgcttacataaaagccttacgcttagccatgcctagtagtttctaaataatttcatgatcacttttaaaatgagaatttaggggaaaattttcactgctggacagaggtgaatatctctgatatttgtgaattaaaaggtgtaaaagtgtgattttagacctgggcggcaagtggtatgcatatggtgttagttgcatacctataggggaagtgctcgccctagtcaattaaggaccgaactttgtgtcaccatctaagtataccgtgcaaccacatgtgctaggaatgggacggccttagcttattaagttgtttaatgtctaaccttgcattgggaggcagtagtagtatgaactagtcggaatgatggtttataggagctacctagtgcggttgtgcctaggcgtctaagcgtgtccaatataacggttaatataacggttaagtacctcgtggaggaatggatgtgttcgctgccatggcgctagggatggcgagggccccccgacctagcggcacttgggttgctcctcgtgtgaataaacacttgccgtgctcgtgcaaggttaggcattagacaatgtaaaggctttcgttatgacctttagaccacattcaacgtgaagaatgtggtagagtcttgcaaactcgaaacaaactatagtgttcatatcatgtgggtaaagctgtacaaactctgtagagttctttaaaactaatcgattagccatgctcacggtcatgagcgctttggtgatgtgtcatgagtatagccttgtgttgatgaaacttgggattgaaatggaaaaattgtgttgagttgtgtgagtgatgatgattataagagttgtgccattgaaggcaacaagagtatgcttatgatgatatgttgttatatatgatgatatattatgttaattatgatgaacttacaaatttgttaatttaattgaatcaactcctttacaaaatatttgtgaaccaaaacttgctttatgctgaaattaaactacatattgtcctttgaatatatgccttacatgtagtatgttaggattgatttttggcttgccagtacattaaggtactgactcttgctactggaataatcttttgcttgcaggttagacttagtcttcttgagtggtgcgggtttcgattgctttttctaggacttgaacttaatggggtaaacccttaatcggtgtgcttgtggttgggtagtcaagcttccgctgttctctgttatctatctatatttggtcggtcggcctatgtaactataaagtagttgtaaatttgaatcgctttcgtcttatttgtatttgctatgcataaccatgcttaagaagaaagtgtgaatctagtacatatcctaggaacaagattcatatgagtatgagttaaggatatttgaggtatcgtagatctttagcccatttgacaagtctcctgaatgtgtaacacatctgatcgtctccttcgtgtggtttgatgggcacatctcaggctgaagttgactggcaagctaaaggcccattaatgtctctaatatccttctctcgaggcgtcggatgttttattacgtttgtttgatggcttgaattattcactttatccctcaaatataatgagaggtccggagagcctacgacaaatataccgtcggtatcgcacagccattgcgcgaaaataacgtgggaaagacgtcgcgtcggtatcgcacagccattgtgcgaaaataacgtgggaaagacgtcgcagacggtatcgtgcggtctcgcacgccgcgctgtcgctcgtgttgttgatgagttgattttgacaaagaatgtgttgaaaaaaaatacaaagttgctttttgtgcaagttctttggtcaatgcttcatgtgcaaataaggcaaaacaaaacaatggtgttttgatttctcaagattgctcaaagtgtgttttgaatgagatgaagttgaaagatgctttagggcgtgttaaacacatggaagaaattgttaaacaagataaggtgttttcttgcccaacttgtagaaaataaaaaggtcttttggatgcttgtaaaaattgtgctattcttacacagaaggtttcttatttgaaaagttctttgcaaagattttctgatggtaaaaagaacctcaacatgattctggatcaatctaaggttagcacacacaatcgtggtttaggttttgattcttatgcttatcatgctagacatcctcctattattttgggtgttgctaggaggtgaaattttgattggatctgagcctaagaacactgtgtttaaatttgctggcatcatgtcttctttaagtgcatcttcatcgaaatcaaatgttgtgaatgcaaaaccatcaatttcagaatcatctacttcacaaacttgtcgtgaaaagtacacttattctttttgtggaaaaaatggacatttggttgttttttgttttagacttgcccataaacagaaaaaggaaagagaaattgcttttgcaaaatgacattggcaaaaatcgggttttaattcgaggagcacagttagaccgacattgtccagtcggtcagaccgcaggtgaacgggcggtcagaccagttgccaggcccggtcagaccgcaggtacagcggcggtcagaccggccttggggcaatttttcgcatacttcaaatcggacttttgtgaaacgacaaggtaagttttcaggtaagtctggttctgattttattagtgcatatgtatctactggttctactggttgtgtgactcagtgttggattccaaaatttcttatttctaaccccaacacagaggcgtcgacatcttctcgtttgtaggtagtttggtggcatagtccccatgtgcgttcaatgttgagatgacgattgcttttcaaggtaacatcaatttacttttggattgacataatattgttctactttcttgattattagcttttcatgtgctagtgtttgagattgtagtttttgttgatactaatgaatgtatgtcaattttgagagtatttgtgatatctttggcaattggatgtctttttcaaaatctttgatttcttcttgatttttgttcggggagaattggaggttattttgagggggagttagtgctttttatgactttcttttggcatgatttaagggggagtttatacctcatggttttatcaagcaaaaatatgacaatgaaaaaattgataaaagagagctttgtttatacatatggtattttcttgtgcatgccagcaatactttgaaggtttatttgtctctagcatagcttgtatgtattctagtcttttcatgagatttaaattttgcttttaagagagatgatgcatgacacttaaattctatacttgaattaagcaaatatgcaatgttgatgtaaaagcatatggtttgatttctaaatgctatatatatatatgttttattgaattgttattcctcaaatagctttaattgctcattgtgaaaaagagaataaaatatgaaaaaatgaataccgaatccttggaaacagtcttgacgacaaagacgtattcgatgtgagtaaaataatgggtgccgaatccctggaaacagtcttgacgacagggacgtactcagaataaaaaaaagagaaaaatatgagaaaaaggctcaagaaaagaaaaagttaaaaattctctttgttatgttgtgctaaaggttatttaagaaagagtgataaatgcaataggtatatgtgtttagcgtttatttttcaacctatgtgcttgttaagatgttgcattataaattgtatgaaatcatgaatttttattgttgattcaagcttaattgtaaaatctttgattcatggttatactttaatgcatgcttattatattatagatgggttcatcttctttttattgcaacacatgacatgatatgctatatgtatgttaagcttttatacattaatgaaataattcctatgctttatgaaatcattgtcaaaagggggagaaataatgtgaaaatttttagatcttttggagttgtcaaaagggggagaaataatgtgaaaatttttggatcttttggagaagagttaagttttagaagagaagagtttttaagaagagcatgtttttggttcaattgggaatttctttcttttaaaaaggggagaaggtttcttgtttttggttcaattgggaatttctttcttttaaaaagggggagtagttttcttttggatttttgagcacgatgtgtacgtttgtacgaagtgtgctttttaccgcttttgtttttaatgttccaaactccaaaacatttttaatgggtttgccaatgtgttcatcaagggggaaattgtaagatcaacgtgtgttttgatttttattctgtgatgaacaattggcatctgtgattattggttttgatactggagtttattcacgaagtggttttggagatgattggagttcacaggtgaatctacaggaaatcgctgttatttcatgtgaccggtcagaccgggaaggtgttgccggtcagaccggcggagatcgagcggtcggaccggccggcccgcggtctgaccggccgacgctgtgtcggtttcggtttcgggttgtttctttggatatctgtgattgtttcatggttatggcttctagatagatactatacgtatgtaatactgtttgtttgctaacaatgagtcaagtgggagatagcttggtctcggaatatggtttctttgtttgtttcatgtgtaggtgactcaatgcctcgagagagtatttgcggtgatggtccgggagtcggcttggtgttaagacaatgtccgtggtagtcagatatcatgcgggatactaaggctagagttgatgcacgtggttgatggagattccatatggcatacgatggaggtattgtgtgcgtatgggatgcggagtcgaatttggaagtagtccaaatttggtatgattggttatgtagagtttgtttcttgtactaggaggtttcctatggggattaggactcttagtatgggtttggttcgtggctttaggctgctgtcttacaatgcatcgggagaatatttgcggtgatggaccgggagtcggcttggtggtaagacgatgtccgtggtggtcagatatcatgcgggatactaaggctagagttgatgcacgtggttggtgaagattccatatggcatacgatggaggtattgtgtgcgtatgggatgctgagtcgaatttggaaggagtccaaatttggtacgaatggttatgtaaagtttctttcttgtactagagggttttctatggtgtttaggactctttgtatgagtttgattcgtggctttaggctacctacctcatgtataaatagagggggagcgtgaggcttcccggtatcacttttgtatagcttttgagatctagtttagttagggtttcgagtttagtcgagatttttgtaaggagtgctgttggtgcactttgtaaacacagagagaagcaataaagttgtcatctactttgagagttcttcgatttgtgtttcactgggtttcggcggtctaaccggcgatatactggtggtcagaccggcggcgctagggcggtcagaccggcggcgctagggcggtcagcgacaggtgatctcggcggttcgaatggactttgatctcggtcagaccggcgtgttccaggtggttagactggtacaactactttggtcagaccgcgagccatcgatttcgagggtaacttttattgccgctaaaagtttttggtttttgggtataccaatcattcacccccctctggttggcttagttcttgtgattcgatcctacaagtggtatcagagccacgtttgctctttttgatctttaccgatcttgagtttttgccatggctatttctaataagtttacaactaagcctcatattttcgatggaacggatttttctcattggtgtagtaggatgcaatcttacattatggctgagaattatgatctttggagaaaagtttctcatccttatgtgattcctgaagctattaatactgctgctaaaaaattgtttttgaacaaaattgcaaagctcgcaacattcttttgagtggtatttctcgttcggattatgatcgtgttgcttatcttcaaactgctcataagatttggattgctttgagtaattttcatcaaggtacaaataacattaaaaaacttcgtcgtgatcttttcagaaaggaatacattaaatttgagatgaaacctggagaagctttggatgactatctttctaggtttaataaaattttgagtaagcggtcagaccggccggcgctgtgtcagtttcggtttcgggttgtttgtttggatattcgtgattgtttcatggttatggcttctagatggatactacacgtatgtaatactgttgtttgctaacaatgagtcaagttggagatagcttggtctcagaatatggtttctttgtttgtttcatgtctaggtgactcgatgcctcgggagagtatttgcggtgatggaccgggagtcggcttggtggtaagacgatgtccgtggtggtcagatatcaagcgggatactaaggctagagttgatacacgtggttggtgaagattccatatggcatacgatggaggtattgtgtacgtatgggatgcggagtcgaatttgaaaggagtccaaatttggtacgattggttatgtaaagtttctttcttgtactagagggtttcctaaggtgtttaggactcttagtatgagtttggttcatggctttaggctgcctacctcatgtataaatagagggggagcgtgaggcttcccggattcgcttttgagagcaattgagttgagttttaagttagggtttcgagtttagtcaaaatttttgtaaggagtgctgttggtgcactttgtaaacacagagagaagtaataaagtcgtcatccactttaagagttcttcgatttgtgtttcaccaggtttcggtggtctaaccgacgactcatcggcggtcggaccggcggcaaggcggcggtcagaccggcggaagcgaggcggtcagaccggcgatagcagcaggcacggtaggcgatctcggcggttcgaccggagttcgatctcggtcagaccggcgtgttccaggcggttagaccggtgcaactacttcggtcagaccgcgatccatcgatttcgaaggtaacttttatttccgctaaaagtttttggtttttgggtatctcaaccattcaccccccctttggttggcttagttcttgtgattcaatcctacaagtggtatcagagccacgtttgctctttttgatctttgccgatcttgagtttttgccatggttacttctaataaatttacaactaagcctcatattttcgatggaacggatttttctcattggtgtagtaggatgcaatcttacattatggctgagaattatgatctttggagaaaagtttctcatccttatgtgattcctgaagctattaatactgctgctgaaaaaattgcttttgaacaaaattgcaaagctcgcaacattcttttgagtgatatttctcgttcagattatgatcgtgttgctcatcttcaaactgctcatgagatttggattgctttgagtaattttcatcacggtacaaataacattaaagaactttgtcgtgatcttttcaaaaaggaatacattaaatttgagatgaaacctggagaagctttggatgactatctttctaggtttaataaaattttgagtgatcttagatctgttgattcttcttatggtgctaattatccacaatctgagatttctcgtcactttttgaatggtcttgacatgtctatttgggagatgaaagttacatctattcaggagtctgttaacatgtctactttgactttggattcgctttacactaaactgaaaactcatgagatgaatattccttctcgtaaaggtgattctaagtctagtgctttggtttcgtcttcaacttctttggatcttggtgcttcttcatcaatttatttaatgccatgtccgatgatcaacttgaacagttcgaggaggaggacttggttttgctatctaacaaattttctcgagctatgaaaaatgttaggaacaggaaaagaggagaaccgaatcgttgttttgagtatggagcacttgatcatattcgctcgcattgtcctaagcttgggagaggcaagaaggaagatgatgggagagtcaaagatgatgacgtgaacaagaagaagaacatgaaggagaaggagaagaagaagcattgcatgcagtggttaattcaagaactcataaaagtttttgatggatctgaagatgaagatgagggcaaaggtaagcaagttgttgatctaggttttatttctcgtaatgctagttctgatgttgataaatctgatgatgataatgaagaaaagcttagttatgataaattagaacttgctacttaaaaatttgctaaaaaacttcaaacatgttctattgagcttgatgagaaggatcacactgttgagattttaaatgatgaaattgctagattaaaatctttgattcctgatgatgataattgtcaatcttgtgaagttttattttctgaaattaatgctttgcgagatgtcaattctgttaattgcaaaaaattggaatttgagattgaaaaatctaaaaagttggaatcttcttttgctcttggatttgctttacatgctcgtgttgttgatgagttgattttgacaaagaatgtgttgaaaaaatacaaagttgctttttgtgcaagttctttggtcaatgcttcatgtgcaaataaggcaaaacaaaacaatggtgttttgatttctcaagattgctcaaagtgtgttttgaatgagatgaagttgaaagatgctttagggcatgttaaacccatggaagaaattgttaaacaagatgaggtgttttcttgctcaacttgtagaaaacaaaaaggtcttttggatgcttgcaaaaattgttttggttggtttttgttttagacttggccataaaaagaaaaaggaaagagaaattgctgttgcaaaatgacgttggcaaaaatcgggttttaattcgaggaacacggttagaccgacactgaccagtcggtcagatcggccagcggtcagaccgaccggcggtcagaccggttgccaggcccggtcagaccacagggacagtggcggtcagaccggcctcagggtaattttgcgcgaaattcaaatcggacttttgtgaagcaaaaaggtaagtttttttggtaagtctgattctaattttattagtgcatatgtacctactggttctactggtcgtgtgactcagtgttggattccaaaatttcttatttctaaccctaacacggaggcctcgacatcttctcgttcgtaggtattttggcggcatactccccatgtgcgtttaactttgagatgacaattgtatagcaaggtaacatcacttacttttggattgacataattttggtctactctcttgtttattagcttttttatatgctactatttgaggttgtagttttggtttatactattggatatatgtcaattcttgagaattttggtgatatcgttggcaattggatgtctttttcaaaatctttgatttcttcttgattctttgttcggggagaattggaggttattttgagggggagttagtgctttttatgactttcttttagcatgattttagggggagtttgtacctcatggttttatcaagcaaaaatatgacaatggaaaaaattgataaaagagagctttgtttatgcatatggtattttcctgtgcatgctagcaatattttgaaggtttatttgtctctagcatagcttgtatgtattctagtcttttcatgatatttagattttgcttttaagggagatgatacatgacacttaaattctatttgaattaagtaaatatgcaatgttgatgctagcatatggtttgattcataaatgctttatatatatgctttattgacttgttattcctcaaatagctttaattgttcattgtgaaaaagagaatagaaatatgaaaaaaaaatgaataccgaatccttcgaaacagtcttgacgacaaggacgtattcgatgtgagcaaaataatgggtgctgaatctctgcaaacagtcttgacgacagcgacgtacccggaataaaagagaaaaatatgagaaaaaggctcaagaaaaagaaaaagtcaaattctctttgttattttgtgctaaaggttatttgagaaagaatgataaatgcaataggtatatgtgttagtgtttattcttcaacctatgtgcttgttaagatgttgcattataaatcgtatgaaatcatgatttttgattgttgattcaagcttaattgtaaaatctttggttcatggttatactttaataaatgcttgttatattatagatggattcatcttctttttattgcaacacatgacatgatatgctatatgtatgttaagctcttatactttaataaacataatttctatgcttgatgaaatcattggcaaaagggggagaagagatgagttttggggagaagagatgtgttttgggagaagagaagagtttctaagaagtgcatgtttttggttcaattgggaatttctttctttgtttttggttcaattgggaatttctttcttttaaggaagcaataaagttgtcatctactttaagagttcttcgatttgtgtttcaccgggtttcggcggtctaaccggcgactcaacggccgtccgaccggcgacaagcggcggtcagaccggcggcatacgggcggtcagaccggcggtggcgacagcaagtggcagttgatctcggtggttagaccggagattgaatctcggtcagaccgacgacaaccaggcggtcagaccggcagtgtaacttcggtcagaccgtgatccgtcgaattcgaggataacttttatttccgctaaaagtttttggtttttgggtatatcaaccattcacccccctctggttggcctagttcttgtgattcgatcctacatgtggaaccatcagaggcccacttgtgaaaatcgatttttgcgtgtggtgcttttaaggagccgtatgcaaaaacggaagttgatttttgcagaggtaaccagtcatgatttgtatgtaacctaaagaatgtcttattcagaataatcattactgtagtagtgtaacttatattcacggtcaaatttgtttttttcgttgtgacgtgtaaaagttgaattttaacttgtatctttacgaagtgatatatcacatgttaatacatcttctcaattttttataactatttgaataacttacaaacaacgaggggatatcccctcgagagttaaaatccactcctagttgatcagccactcaacaaagagtgagcatcatagtgagagagataagagacggagacgaagcgtcgtgcttgcgagtatggggtagcaagaagagaaggcgaaccggtgattccgtgatttcctcaaaattctagattggacacttgggctttcctcttatgcggtggtagacgtcccaagggaggtagggtgacgtgggccgtagctgtgccggttgtaagatcaacgtgtgttttgattcttattctgtgatgaacaattggcatatgtgattattggttttgttatttggagattatcgtcgaagtggttttggatgattggatttacaggtgctattattttatgtggtccggtccgaccggacggtggttgccgctcagaccggagctatgtgagcggtcagaccggccagtctgcggtctgaccgcccgtcgctgtgtcagtttcagtttcgggttgttactttggatatccatgattgtttcatggttatggcttctagatggatacgatacgtatgtaatactgttatttgctaacaatgagtcaagttggagatagcttggtctcggaatatggtttctttgtttgttttatgtgtaggtgactcgatgcctcgggagagtatttacggtgatggaccgggagtcggcttggtggtaagacgatgtccgtggtggtcagatatcatgcgggatactaaggctagagttgatgcacgtggttggtgaagattccatatgacatacgatggaggtattgagtgcgtatgggatgcggagttaaatttggaaggagtctaaatttggtacgattggttatataaagtttctttcttgtactagagggttttctaaggtgtttaggactcttagtatgagtttggttcgtggctttaggctgcctacctcatgtataaatagagggggagcgtgaggcttcccggtatcgcttttgtatagcttttgagagctagtttagttagggtttcgagtttagtcaagatttttgtaaggagtgctgttggtgcactttgtaaacacagagagaagcaataaagttgtcatctactttgattgttcttcgatttgtgtttcacagggttttggcggtctaaccggcgatatactggcggtcagaccggcggcgctagggcggtcagaccggcggcgcaggcaggcagcggcaggtgatctcggcggttcgactggagttcgatctcggtcagaccggcgtgttccaggcgcttagaccggtacaactacttcggtcataccgcgatccatcgatttcgagggtaacttttatttccgctaaaagtttttggtttttgggtataccaaccattcacccccctttggttggcttagttcttgttattcgatcatacacgggtcgccccatgccacccaatggtaacgtccgcccctgataagagctgagccgaacctatagccaacgagcagagacggccatcccttgagctgtggttgtggtggagcgaggcggccggggccaatcctatttgatacctcgggctgccttcccctcttctttttcttgtttatccctgaacaagatgcaaatgaagcaacacattcaagctatttctttggcattcttttcgagttctgtaacattaatggatattgtaagcaagaagattttatgttgagaatggaaggtattggaaaagaagctattgagaataggctagttgaaagtgatcaggatagcgagccataagttactacaacacagagtatcacgtcgtggcctgagttgacgtcttaagagagtggttgacccaacgagacatactatcgccgtccgaaaatactcatcgtattaagtttttattgcaatgtttgaccattcgactcattcaaaagattatgaaattattatttatttttttttcacttgctttattatcaaaagtattttaagcatgacttatctttttttatatttgcactaattttttaaattagacgaatggttaaacattataagcaacaagttaaaacgacatctaatttaggagggatggatgtagtaaattcaagcaagtagaatcctgaacatgcatgggcatgagtggatgacatggagactgagaagtgtccaatttcctgagttcaaggacaactatgtagacagggataccctactagttgtttgctaaggctgtgtttagatctggggggtgtaaagttttgatgcatcacatcggatatatggacacacatttgaagtattaaatatagtctataacaacacaaattacagaatccgtctgtaaaccatgagatgaatttattaataagcctaaaaatctatcattagcaaatatttactgtagcatcacgttgtcaaatcattgcacaattaggcttaaaagattcatctcacaatttaaacgtaatctgtgcagtcagttattttttcgtctatatttaatactccatacatgtgtcgaaatattcgatgtgacagggcgtaaaattttacaggggatctgaacagggccttaaacaattgttttttagataagtatattttttacacggcctctttatcgaaccggatatttgcagccatttaagttaggaacttagtctctcaaacaacctaatttgaaattcgctcatatggagatttaaacttatgaccttgaggtgctatacaaatcactgaaatcactaggctacatggggtgcttaaacaattgttgctcatgatatcttactttgtgaattttgatgactacaagcagcttgtgcaagaattggattgatttggttacaccacacattactcgaccagccaaaggtcaatccagccgaagctgcgcatgctttaatatcaattcaactagtcaaattcaacgcacaaaaaaactgaatggataaaggtggaacgaccaaagttgaaagaaagcttcattaaagagtatttgcaggtttatgttacaaattgtatgagttgagctgtacacatccataagtttcagtgagtgaaattgatttttttataaaaactaacaagtagtactacttaaaaagaaaacattattcatcgaggcatgaaaaacaatgccatcgatctcatgtttattttttctttccatgtcttatgctaaggctgagttagaggagaggaaaagagggaattgagaagatacgtaaaacgagatatgcaattagcgtatgattaattgagtattaactactttaaattttaaaacagattaatatgatttttttaagtagttcaggaaacatacatgcggaaaacaaggtgttttctctctcaaatctcccagtaacgaaagcagccgtgtagttatcgacatctgtaggccatctaccctatatgttggatacgtccaaccaagtcttccgtgaaagattatgtcatctttgatgacactgaagctcagtcttccggtagcttttcttttttttttcctcttctgtgcaggggggttcagggcctaacaattcgtgtgtgttttggctctgtatattctccatgaatatagaggctggatttgatggcgatataaatatagcaaatctgttgattttttctcattaaatcatgagatgcaaggtagcgggctgctacagattgtcgtctcgacagtgacataatattgattatcagatggatgcgtggtatgagaggcgatgggatggtcgtaccaagcattgcagctcaataagaggtggaggtaacacggggttgttctccggatatctattcgtagcagcacaagtcaacacgaattactagatttgtctaactcttctcccccagagactttggtactcatgtcttgttgcagccgcggcttgagagccatctctaccatcaagcgtctaagcttgatccgagtaatatcatcggtatataggagtaccttccatgacaccaccgattcccatacataaatttaaaatctgtaccatacaaactagtgggagaagagtggttatgtactccagtcaaccaacaagtgtatgctatatatcgttatttgtccttatatagactgaagagggtgggacaggaaaaccacccaaaacatgtttaactgaaagtatagaggacaataatgcatggtgtctgagacttattggcttcagtcggattagagagagttctttattttgtcatgtcaaggaataactaaaacagagtacaatggattggtggaatataaatgtagttctatttcctttcatattggtttttactcccaagtagtttcccctctctactccaaatcttcgagtcatccacagacacaaagtcacaaacaatgtgcaataaccagtccttgatcaaatcctctgatttatgccttcctaaatcttaagcagattaccttgtgcatgtaagtcccgaaattagatgatttttcaagcacattcttatcaataatttcgtaaaaggtgttgatgactcatttgaccttgtttcgtatgctaagtatcaatctgaccctactttttttaatttacttatttgactccactttttgaaattaaagatgaaagctgaccttattccgttaaaacgagttaacattgttaaccaaggggcaagtagtccttttgcccttgcttatttaaccatattatataaaaacatccatatattccaaccttttgacataattgtaacgaatttgacatatctttcacatttgacacaagtttgatagatttggcttcaatttgataaatttgaatcatattgaaaaatttggcggagtgcaccaattttgacacaagtttggtacactgattttgctcttgtggtggtgagaaagcatagccaacaaattagaagaggaagccgagaacaacaccaccataatcttctccccacgctcgtcctactcgtccctccgtgccaccgccgctctctccctctgtgtgcctgcggagccgctgcctccatccatccacccgcctgcgctagcaccaccgccccctcctccctcagcatgtcggagccaacgccaccccctccctctacgcaccggcgctggctctaccgttcatgccgagagagacgagagagcgataagggtcaggcagggtggtacgagatggataagattgaaggagggtattttggttagtttgaataataaatagatttattttctttttcctaaatgaaaccctatcagtatattgcaaatatagtcaaacggtaggttcaattgtgaaaagcagggttaaatcagcaacctagaaaaaaataagatccgattggtagttagccttcgaaatagggtcaaataagtaattattcgtttcctaaaagtgatgaactactcgtagtagaatatttcttctactggtaatataactcacaaatgaacggttaccatagtagtgataatatgggtagaacgataactaccggcagatacccatgtaaaagtactccaattggaattatttgtagcaaatattacgaccatttttctgtagcactaaatattgaactagtctgaaaatggttgtgactttttaattaatttccaaacaatcctaccacaattggactccattgaagctacaattaagttttttgttcttcacatttccgaaagaatgatcaggttatctgatttgaccattaattccctatggagatatacattccaatatcaatatgcttttgttctagagtttgacaatcactacacaatgggggtcttggttctattaacatatatactcctacatctatgtgccagttacataccttgtgatgtataataagcccattaattgatgcaaaatgcatgcaattcggccgtggtaagagaagtcgtattatttctacagaaaagcaagcagagggcaggagtgattctttattaagacgactgaatttttccttctgccacgtggtaatgcaattcatttcattttattgtatttgttaacattattggtgacttcaataatatcgatctccagtatgtattaattaagaccaataatatatatatagtaagtggagttcaattctaaaaactctgaaaaaacaataacaaaataagtatgtgctcttgtgtacctctcgttgctcaatacaatgaaataattatataaaactatggaaaataatgacaaaagttgggctgtgtttagatccaaaatttggatccaaacttcagtcattttccatcacatcaacctgtcatacacacacaatttttcagtcacatcatctctaattttaaccaaaatccaaactttacactgaactaaacacagcctcgaagagagaaggttacgatggttgcagtgaatctccaattccactacctacctaatggtaaattttgcaggttagcccttcaattttatcatattaaaaaacagtgaaatctaaatgaaggtgataatataccctatagaaaaatatggataacacatttaatgaaaatttggtactaccaacactttggtagatatttctattgatttaggaagttctggaatcaatccaaacaacacataagtagtatttagactaccaacaatttggtagtgtaagatttggcactaaattaaaagagcccataatgtattttaattctgagatctatggattgaattgagaaatgcatgtccgtagaggggaatgacattataatccatgctactactttttttctctagatttacaaagtgaacttcccatattgtttcctcatttagtgtacagagtaacaagatttactaaaactgtttgtgttccatacaatttgatctactgttcagaataagaaccaacaacatacccatgtaaaaaaaagagtcataacacaatataaatatttcaatagaaaacataagtaatcgaatttgatacatcattagcaggacataaatatgttattagttttgctgaacgtgcctatgcaaccagcttgccagctactagctagttgagcatacagtatactcccatgcctgatgatcaccgtgatactctttagtgcagcaattcgcatagtctcacctcagcatacatgcccagataacgccattaatatatatagatctgtcaaacttgctgctaacccaagtaattggcagcaaaagcattagtcccggttacccttaaccatcatcgcttcaaccttttgcttgagggaataagtgaataacaaccccactgcaaatggtgcaagcgttgtacgttcttcccatgacaccacccatttccatgtaaaactaaactcgcaagacaaacctaggtttaacaaggtcaggcatgagaagagtgtacaacgatcactgtttgtattactcagctgatcttcccctttgaactgtgcgtgtcaaatctctctctctatatatgtaacaatgacaaaacatatagatacattgtgttataaatagttacagagacttaatagcagagtgaaaagctaatagcagggtgataagcaagctggctgtcagtggggacagctatgtgtatctattgttcaagacaattaaggggatgtttaaatcagggtctaaagttttagcgtgtcacatcgggtattatatagggtgtcatatggggtgtttggatactaataaaaaacttaattacagaatccgttagtaaaccgcgagacgaattattaagtctaattaatccgtcattagcaaatgtttactgtagcaccatattgtcaaatcatagagcaattaggcttaaaagattcgtctcgcaaattagttgtaatctgtgtaattagttattgtgttagcctatatttaatactttatgcatgtgtttaaacgttcgatatgacatggtgaaaaatttttgggtgggatcttaacagggcgcgcgtaagttagattggttcatgattggctgtaacttttaggacgctataatcttgttcgtattggtttattacaccagattaaatcactctgctcgtatcaaccactgaagtagaacttcgtactgtgctatctgttctcatatcactactgatctttgctgggtggtgcaaatagtcccggttcgaatagaaaaatagactaaacatcatttttagctctggttaaaaagccaacgaaactttttgatctttagtcttagttggtgttaacaaccggaactaaacatcatttttagtctcggtttgaaaatttgtcaggccgtgtcaggtcccattatttttagtcctggttagtcaacactttagtcccagttgtttataccaaccgagaagaaagattgaaaagaaaactaaagatcaatactttagtcccggttgtttgtaccaaatgggacaaaagattgaaaagaaaactgacagccgcacgccaccccctccctcgtccttatctccttgcacgcacaagcgaaactccctccctctctctcgctcccgccctccccctacctccttatctcctctccctgtgtgctccctccacctccctcgcaagtgact

SEQ ID NO: 9235 - DNA, 65570 bp, Oryza sativa
  unsure (1)..(65570): unsure at all n locations
ttaaatctaagagacattcttatcacattagtagtatattaaaatctaccatctattttatggtaaatatattcctttttttattgtaggatgatctaaattctcttacactatatatatagtgattatatatatagtgatgtatgattccttttagcattctttttttaataacaaataagatgcctgtgcatctatgcaaaattcttttctgatttatattccggaaatgttctacaacttatattccgtcgttatagagtttgaaacacaaaatataatacatgcccacacgaatgcgcgggctacctttctcgttatctagaatgtgccatttggtaatgcacagctcaaacatcggtgcttggagctgtttgacatgtgcacacgcaatctttatatacgatttcaggggtggaaatgaggcgtgtgatttggccacgtggctcactgattatttagggttagttcatctgaaaatcagccacgtgtccctgtgcaatctcagatagtcagatcagtaacttctcgagctggcctgtcttctcctacctgattggtccacatggacttacaaaatgttgacacatggaacaaagacaagatgcagcctgcagctagcctgctagctacgctctgctttcatggttacaatcctctagatacttccaagctcgtagaagtatagtcaataaattaaattaagaacacctagatcgtttggacgatctcaaaaatattaaccctagaataaacattacacagcgaaaaacgatacagcacaaaatttaggaaaaactagaagaaataccataaattggaaaataaataatgacatgttatagtgaaaaaatagttgtcaaaagaaataataaggccaagactttcttttgagaaaaatcaacaactcaagtctagagcctagatgcttttgagctaagggtacaagcggctacctacaaaaacccacttataggctaaactaacctccgaactcgcttatcttataaaccgatttcagggttctaaccctggccagggattgggccacgtggcaccacgcatagaacaccagccggattctcggctggagaagcgtgacacgtatcccacatctcctgcagccatacgatagcatatcaacggtgagaaaaaggtccaacggacgtaaatatatattgcaagtttgagatggtttttttttttacaaaatgtgtgatctcatctaaaacggtctagaacagtcaggagtggaccaaaaaaatcctataaaaagaatctaataaaaaaatcaacgagtggttagccccccaagtggcctaattccatatttttgtccctaagcatagccatttgattaaaaatcttgttagaaaaaaatccagaaaacatagtactatgcatgagaaaaaagaaatctagagtggagacccattgcaatctagagagaaaatctggaattaatatatttgaatctttgtctccattaaagataaatctggaattaatacaaagcgaaaatacgaaaaggtgttgcagattgtgaagaaaaaatagggataaaaataaaagagccaatcttaccagcccgcgagccgccgccatctcccatcccacgagacgccatcgccagccatcaccaggcaaggagagccgcctcaattctagcttcttaggatgggaagagaaggacaatggcagatctggtcagccgacgaccttcgctagcgacgccatcccctctctttcttccccttcttccaccggattcgcccgtctcaacggtgcggacctgttgaaccggccaaatccaaggaagtcgatgttggaccgcaagcaacacctccgtcggctaccatctagttttgacctataagtgggttcgcgggtgacctgcttgcaccctaattttgagcgggtctttgaaactggagctcaaaaaataaatagagaaaacaatggaaaattaaaatgtaaaaaaaatagatctctaaaattgaagctccaaaaaataaagataacacaactgaaaatcaaaatatgtaaaaaaaagggagctaaaaaatagagaaacaaaccaaaatccaaaatgtaaaatttaacagcggtgcctcctctactgtgttccttaaaaaaatcacaatgtaaaagaaaaagaaagcacccatggatatcagttgcactgtatagctctgacgatttcagatgctagatgtggtcgattgactatgataataattgaaaatccaacagctcgcaaacaaaattttccaatttatgaaagctacacgtaatttcttactgaacatgcatttttaaataacaagtaggtaacataataaggcatatattactattgtatttccactctcaacctttgataattaaattaattatgtaaagacttgcaaaattattctgatcatgtcacaggctataaattttgaagcacgccaactggcgtgctgatgatttttctagttcttacttatttgtctgttttatcctttcctggccacttcgcatttccaagcagtttggtaagccccaagcagaaaaggagacaaaaattgatactctaatcaatttaaaatgaaaaaaaatcatcaaccacaaagttgatcttataacgtgtatataaaatttgttcccaacggacttcatatgaaacagtttacattttaagaggcagtgacggttctcctatgaaattttttttccacatgcggttttagaccattggtccctcttgtcattatgacaagtggatgttcttttgacccacttgtaaaatgaagctggactttttgaaaaacgatttttttaagtagtgatatcaaggtttggccaagaacatgatgaaagatattcacaatttaatcatgtaaatatataccatgaaatagttggtactagtctatctcaaaaaaaaaaagacaaactctagctacgaacctaaacacgcataagtccaggttcatagctatgattggttttttttgacacaggggcgtatgttgatacattttatctttttttagggtaaataaataaatccttacatcatgagtaatcaatgattgtgtgatgatgtaggccattgagattctcttggaaaatattttttttcagctaccatgaactagaaggtatcatacatttcagccgacgtccttctacaccaatttataccaacagattgaactgtaatataagatcaaattgcagtccaagcttcatcctatctgcttctctctgtacacctacccactagatatattgaactccaaatcaagacccaacacaacacagaatgcaaaaccaaccactgtgacttgaagtacagaggtcgcgtgtgtgtgtctctctctctctctatatatatatatatataaagtttatcaaaatactatctaggtatccacattccttcaaaatctatatattgttgttcgtactgcaagtatgatgccactattcaaccttgttctgcttaggagtgggcggcatcaggaaatgagatagaacttggcagctgtggtaatatgcacgcacaaagtgtaggccttcaaaatcatcaaactttgcttgtctcactaaactttttgttactaaagaagtttgtccatcttagtcatatcaccaattatgtatccaatggcaacatcagaaagagagcagatcagctagccgaatatgtagtgtacgttgtgatggcagacattgcttcctctgttcccagtcaaggtccggcacaaagtttagtctattttgagattaccgggttatgtcaagttggaaaggaattcatctaggaattgttagcgctagcgctgaactccgatcgaacaccttccgggcgaactgtagccgtccggcacagaaactccaagcacagctaactaacgaaaatgaaaacagagcaagaacagagtatcaaggaatttcagaacttagcgaaatcacgaacaaatgtggggcaattttctagggtttttcattcaactgaattgtaaaaccttacaagggaaaaatgaactgattgctacttatactctagaaacagaaagaggaatcctaggcctaaaatcgtgccatcccacgactcagtttctcctggactccatgcagatgcaaaatgccactccgcacgcctgacgcaatcgtcgccaccttccgcagcctcgctgccaacttcgtgcatgcataacaaactccaaacggattttattcctccagccgttacaactgtcaagactggatcacattggggccacagctgaaataaacagcaacaggaatcatgttattgattacatttgtggtgattttcttttgtgagatcagtagagacaacacacagtgtccggaaggatataaacacagactgatcgtatcacaaagcatcttgatatatcagatactatgtgctaccgagtgctgagtgttagaatgatagttcgtcatcctttccagattctgagatagataagattgaagtctcgctgctatatgtacaaacggtttcatacgtaggatcgaatcataataactaagccaaccagaggggggtgaatggttgttatacccaaaaaccgaaaacttttagcagaaataaaagttaccctcgaaatcgatggatcacggtctgaccgaaggtgttgcaccggtctgaccgcctaatgaacgtcggtctgaccgagatcgaactccggtcgaaccgccgagattgcctgccgcgtctgttgccgccgccagtccgaccgcctcgctcccaccggtctgaccgccgccttgccgctggtctgaccgccggtgagtcgtcggttagaccgccgaaacccggtgaaacacaaatcgaagaactcttaaagtagatgacgactttattgattctctctgtgtttacaaagtgcaccaatagcactctttataaaaattttgactaaactcgaaaccctaactcaaaactcaactcaattgctctctaaagtgatatcgagaagcctcacgctccccctctatttataccgaggtaggcagcctaaagccacaaaccaaactcatactagaagtcctaaacactttaggaaaccctctagtacaagacacaaacattacataaccaatcataccaaatttggactccttccaaattcgactccgcatcccatacgcacacagtacctctatcgtatgccatatggaatttacatcaaccacgtgcatcaactctgaccaccacggacgtcgtcttatccccaagacgactcccggtccatcaccgcaaatactcacccgaggcatcgagtcacctacacatgaaataaacaaagaaaccatattccgagaccaagctatctccaacttgactcattagtagcaaacaatagaattacatacgtatagtatccatctagaagccataatcatgaaacaatcacggatatccaaactaacaacccgaaaccaaaaccgacacagcgtcggccggtcagaccgcgggctgcgccggtctgaccgcgtgatacacgccggtctgaccgacagcacatgcccggtctgaccggtcacataaaataacagtacctgtgattcacatgtaaatccaatcatctccaaaaccacttcgtaaataaattccaaatatcaaaactaataatctccaatgccaattgttcatcacagaataataatcaaaaacacctttgattttacatcataatcaatcgatatcttctcatgtttaatcttacgtcgaggttgttcttgtgtgctgctagcttagagtcttcagagccttacgtctggcatatgccctaaaggcaatcatagagatgattgtatcacatactatatttacatatttatccgacattgttccttgaaatagataactcattattggttaataaatatgtgattctttcatgagactctttatgttgtttgttactatttctaaaagatccctgatcaaatatcatatgtggaacaaatatgtttatatgatcagcacatgtattaattgatgatcatgtctcatggatcatggtatagagataccaaattaataatgtggacacatgttggtgaacatattgttggatagacccaacatgagacactgcatgagccatatgtgttgtgtcatcagtgatctcatttagtgttggtgttgaatccttagacctgagattctcatggttcccaacatgtgtagtagcttacttagggactgctaaacgctactccgtaattgggtagtaataaaagtagttttcgggtatgctatgaaacatgtagtaggatataaataatcaagatgggatttgcccctcctatggagagatatctctgggcccctcgatgttgtagattatggaagtgcatggccataccaaaggtgattgaggagtcaatcacaagttatataatatatcaataggttcgagtgaatgattgagctattagaggacggcacatatctaaccttgagcttaatcgatatcgtggcgcaaaggggttcatacaattatacactagaggttcagccgatatgatctttatgtatgcccggtgggtcaatacattctgctaggggccgctgttgacgcgtggaccaaaaaggagttttcgggttacagccgagtatacatgaacctacagggtcgcacgcttaatggaccggaatagggggattggatggagatccaatatgagcttaattcggatagggatccgaataggagtcctacgggccatggaggcccgagtaatggatcttatatattcgtgaggggtgtgatcggcggaggcattgcatcacgtgagaaaccgtagccgtcacttccctccctgagcaagaccctagccgcgcacgggtgctagcacatctgtgcgtggcgttccgtccttgtacgtgtggataccggtagaggcgtcgctggtttgcggtgctgatcggcgtgggagtatggcgaggagatcgcacgaggaggagaaggtcgagccgatgtgatcgactacttcctctacatcaacgcgcgatacttcgcgagagttccttcgacttctcagcgtcttcttccgctgcgcagcgcgtcgagtagtaacgatctatgatataataattgcatggttcctggtttacacgatataaaattttgagttatgctatcgtagcctacgcgtatcccaacatggccaccagtgaaattattctattagctaatttgtagtatatggaaagcaggtaggagtacggttcagttactgagcaccactattttccttaattgccgaagatatggaatatattttcgctaccattcactcgcttccttaaaaatatccttgccatgtcaagcctgtgactctcacaggtgcagatagatcaaaggccctgttgtaaaaagggctgaggcaaccgaaactttgtagatagatcgaaggccctgttgtaaaaagggctgaggctacccaaacttagggccttttcgttttggaggaattttaaaggatttggattcctaactgggaatgagtggaattgggaaaagattgtagacgtatagagcctgcacgagttgacaacagtgctcaagtggtggaaagaaggtaacattcagcagaagatggaaacatggatgaaaacaacaggcaacaaccgatcgtgctgggataaatcattctaaggataaatcaaaagtaataccttgtaccttatagttccatctaaggataaatcattagtaatatcttatagtaccatcaaagacaacgataatacatttacacattactatcaaatccgagtacgttcatcgatggaagaaaacagatgaacaagatctaagcctctgtttgctatgcaggatacttcatgattcttgaggaaattaaacttctcatgtgaaattcctagtttctaatataaaccattaaatcgtatatcttcagaactgataataaccccaaaccctcaactactaagtggaaatttcatttttagtagcaaggacatcttgaggatatttttagttgaatttggtaaatcatcagaattcttaacataggggagggagggtgccttttgtctgacaaaattgacattcagccatcgtctaaagaaaattgcgaggcggaggaatcaatacctcatcgttgtcgacgccgacgaggaagaagagggaagcgtaccgccggtacaccaccttgtagttccggtgctccacgaacgaacactgcaaccgcacgaatcatacaaatcacatcatcacgaggaagagaacgaacacccaagaaccagcacagattcagatcatataaatctctatttaggatctgtttggctcagcttcagctctcaaccaaacagtttcagctccacccaaaatggaagcggagctgtgcggagctctctcacaaaatgaactggagttgtgtggagctgggtttaggcagctccacaactccacttcagacctaactcctgaagctaaatttaagagttggagctgtaccaaccaggtttttaatggcttatatattttaaatcacatattactttttaaaatctatttacatcatatattctactcaaaatttgtgacaaaacgagatccatgcggaatatattcaaacattttattaatttaaaagtaatttatttaaattgtagaagtaactcagatatgcaatagaaataactctctattacattagaagtaattataatataagtgagttgtagcaagaaaatatgtcgagtaaattcacaagcaatgtgtacagaagattttcaagtaaatacatttatgaaagtaagttacataaagtcaaaaaataatttacataaatcataaaagtaactttgcacaaaatggaagtaagttgttacaacattagaagtaaatccgttgtatggataaaaacataagtttatcaagaaattaaacttacttagcacaaattatgaaattgactaaaaacaataataaaagtaagcaacttagagcattatgaatgtataagaagtaatttattcaaatatgaaagtaatatatatatatatatatatgagaaaattttctcataaatcggataagtaatttatgagaaaatttaataagaaggaataaaaaaggacatgcatgtgtagatgtagcagttttttttccctcagcggctcttgctttgtgtatgtgcgtggtcgaatggctttgaggtgcgtcgtgcgataagattaaaacgagaggcttcttgatttagatgttacgctaatttttctatcatatcgccaactataaaatcataagcgagaggcaatcgatattaggcgttggaagatgttcgtattggtaaactccaccctccatggcaaatctataagcgaaagaagaagtgaaatccggctacatggcatctcaaaacagtcagtattatatcaaattccacataagcaagaaggtgatcgtgttaggctaagatcaattatgaaattggagacaacaagaacatatataacaaaacgcaagcagtaattaattgcccagcaaattgaatcacaggacggaccgacagggccggttagagtatagctaactagctaggagttgagttttgcacttggcctgtaggacatcaccgcgaacaccgtctgcacgagcgtgcagaggaggaggacggcggcggcgagccaggccaatatgagccacgggttgtcgaagtggcggcgcgccacccacgcgagccagcggttgaggcggcgtccgtggtgcctgttgagctccagccccacccctcgcaggtagtgatcgccgtcggtgtcgaaggcgaggcccctcgcgagcccccggaacagggcgcacgcgtcgccgtcgttcccgagcgagtgctccatgacgcccgaccgggacagcaccgccacgtccccagcgctccccagcagctgcgacatgaacaccacgtacgccgtcacgtacgcgtcgcgctccacgccggcgccgctgtcctgctcgaacgccagcacgttgcggaacacgcagctcatcttctcgtcgatcacgtggcgcgacatggtcaccacgccccacgagaagtccacgtcgaggagcccgaaacgaggggcaggctctgaatctgacctgaccctgaaccggacgcccgattcactgtactccgtcgccgtcctgaaccgctggatgtgaccaccacccgccgccgctgcctgctgccacccggctggcctcaggtaggtgtggcacaggtcgaccagatgcttgcagtcctccttgacgtcgtcggcgttggaagccgttgggatgtgttgcatgaagttcctcaccgcattccaggccgttttggctagagttgtaccagcatgatcgacgagcaagccgaagatgctgtgcacaacgaagaacgggatctgattctccagcagcaccaagtcgagaaacccgtcgacgagcaccctcttctgcgtcctgctgccagtgcccggtccagaatcctcttcttcttctttattagcaggcgcgtcatcctgttcctggatgccaaacgcggtgagcatcgcgatcaggaaggccccgtccaccagcagcatcatgcagaattcccccgaatccatggcgacatcgccgtcgtagcagcgcctcgcctcctgctccagcgacgccatggacagcaggcactctctctgcagcgacgccgcctgatcggcgtcggcgccgagttggagcttcatcaaccgaaccttggtgagctcgttcctgcccatctcctccgtgccgtggcggtggtaaggcccaaccgagaacaagctcggctggtaagcgtcctcgtcggccagccgatgcctccccgggacgcggaagatctcgcgccttgcctccacgacttgtgcttgtgcttctttctccgcggcgtcgagacgtcggatgatttcgtcgatgcgaatgtgcgccgcctcactgccacccatctgctccccgccgttcgtcctcatcatcggcggttcagttccatctggatcaaacaattactagttaaattaatcacaaatggaaataataagaaactaaatctcgaggggaaaataaaattaactataaccaaatatggatgagtttctcgaacaacgtgaatctgagaaacgtacgtactgttgggtgaagccggagcagagtccgcggaattcgacaaacccgtcatttccacgctcaaccgcagaatttccggacgaaacatggtgtctgatgaactcaatcggtcccggacgacaagagtagtaatcaatatctcagggaagtccagatctggtaacaggtctgacgacggatgaacaccacggcttgcactgcggcagatgagctagcgatcgagtatcgaggcagccatatatggcatgcggtcatgactcatataagatgagatgatgactcatgaacatatcattctagagcttaaattaggagggaagaaattacttactaacttatccgtttcacaatgtaagaaattttatcatttctcacatgttaatgaatcttacatcaatataaatgtaaaaaatgttataataatttatattgtacaacggacggagggagtatggagtaacaaatagagtgtgatttggttctagtacgactgagcacgcgcggtcgaaaaaaaaaaagaagtggccctccaatcatcaacagctatagcagatcgttatgatattgcgaaccacatggcctgtactaccaaaagtaccgagtagctccccttcaagaaaaaagcaccaactagctagttttaaaaaaaacaaaataaaagtgtaccaattagcaacactatattaccttgttttaaaatatgtgacgtcattgactttcacataacatttaatcatttatcttattaagaaaatttgtataaatattattctttttttgacttgttttttataaaataaaatataatcttagcaaataattttacatatacacattaaatttttaaataataagaaattaagaatggtccaatgttctctgaaaacttagcgacgccgtacattgcatgcagtatttgcaaaggccaacccgatggcttgagttgaaccaaaacagcacattgcactattggagaccgggaaagctcccgtgtgcttcctactgctacatttgcatatggatacgacaagtttatgacatgccaaacagtacacatgcatcttttccaattgcacccaaaactatttgaacgtgacctttttttcatgtttatcagctaaaatttaaattttccaccttaattttgaaactgattttaaggtttttctcatcaaaatttatttttcagtttttacttttaaaacgctaaaaacacatatataaaaatttattcacagatactttttatttgtaaatatatactccctccatccaataaaaaaccaatctaatacactggatggatgtatgtactatgaatttgactactattttttttacggagggagcatatcgtttcgattgggccgttgcatggcccgacgcgacgacttgacgactcttgtcttggcattccatgcgcgacagaccacgtgcggccttagctgtgtgtccatgctactctggacgcattatcaaatgctccggatccacgattccacgccattgagcatatatatccaacataccctgtttagttcacactaaattttatccaaactctcaactttttatcacatcatatcacatccaaaacttttctactaacattaactctcaacttttttttttaaactaccaaatttctccaaatttctccccatttcagacactaaacacagccaaaaagtatgatttggacagttttgttaattataagcggtgctggtaatttggatgtggacacgataaaatctgataccacaatagagttttgttaatcataaggtgtgctggtaatttggtgcaaggagttgctgtcccactctccgagcaaggaaaaaaaaacccaaaatatatctatctattatatactaaaagtccattaaacttcctacaaacgctcttaagccgtcacgtggcactcctacaaacgctcctaagtcgccacatggtacaatctaatctcaccgttcattttcacttaaattgatagacctgttattttacactattagattagatctattattaaaaaataatatcctcatgtacgtatgagtttgagtttatacgttacaaatgccactgctttctttccatacgtacaaacgttgtacataattgaaaacaaaactttcctaatcttcgctggaaaaaaaacatatacatgtacataaaaatgacagaaaaaacatacattcataaaaatcaacggtatttaaaatatgattttctactatataaagataaaatatattacttcacacatataaatatatttagttaaattaagatctataataaatatcctatcaatgttcttttaaaccatcttctaaatctatctattatataaaaaaagtacattaaactttctctcaaataaattagagaaacactaaaaatctattatacactaaaagtctattaaacactccaacattgtcacgtgatgctctaataaaattagagaaatcctaaaaatttagagtagaaaaagaaaaccatccaacctttaattttcacttaaattagtggacccactattttaaacattggattagagctcttaaaatttccgtgctgctaatctctatcccggaaaaaaacataacttgcttacgtcgtacgatcgtctcctactcggggaaaaaaacttaaatacctacaccatatatgatcgaaaaaagataaagccaaaaaaataaaaagaaaacatgcacacgtacatagtagtatcggaaagaaattctaatcatgaaaaatcatcagcgtcagcactgatttgttgtcaacatcctttaatctacgattttattataaataatactacacaaatatgcacagctaaacttaatcgtaaacttattgtagtgataaatatatcatgacaaatgacgccaacatgtaatagttaatgcgataataatgttccaaataatttcatatcgtattttatggtgtcaaatatcacgtgacaaatatacaacgttaatttgaatctacatatgtaaaaaattaaaataacaaaacctatagcattgttttttgagtacatctatttaggtttatttaattttggaagagattgagattctcaaagtattaggaatttttcaaaacttttcttatttgaggtgtgagaagcacaattaatagattgatgagaaaacataaattaaattttagccagtgataataaaacaatagaatttagctttggtttttaagtggatctttttaggtttattttgggtgatattgagattctaaaggtatctgaaatttttcaaaactttttgattgttatttgaggagtgagaagcatacatgatagatagatgtgaaaaaaaaataaataagattttagacagttattttgctagaatacaactcttaattcatcacgagaagtatgtattatctttgccaagtagtattggcaaaacatgaataatccaataaaatacgcataaaactacttatattatattttttgtagttgatagaaattctaatatactgggtatataattgacgaatgttatacaccacagaacccaactataaatgcactctagcgaattggttagtgtaaataagtttgtgaaaataagtacattcttagaattattaaatgagtctcatataattataaataacatatggtggaaacaaatttggcgctaaagtataaatctttatcaaaatataaataatgatacggtgttttacagattttcgtggtagtacatctctttagctatatttttttaagtagtgtcgaatgattaaccccactcatttgaaaaatatgatattgtatgtattccattaaaatttgataagtacttattactaacttcatatacacattttgtctattctctaccaaaaatcgactcaaatttttttgaaaaaaattgttttcatcacctcctccttctttctatccctctttgacatttaatgcagggtgcagtacttgctacgctgtcatatatattgtatgggcatctacatggttgagttaaggtggtgtctgtgaaagaccatcataggcaatgtaactaaagtgacatagttatcaatataatcatttgtaagtgtaccaatagtgtactaagtgttgaaattgtattgtatgatggtttttaggggcatggctacatcgaaatgcgggacctatatgttttaagccattacatacttcatccattagagaggcattcatgtttatttttaatggtgttatcatattattcggtagatatgatatatttatactaattgtacatatgattgaaaaaagtgatgaacaccgggttatgttgtgtagatgaattttttagtgtattaataatgtatcatttgtttaagtggtgctaatacagattcatttattaaaagtcatctaactcttaaaacaattatagtaagtagtgatgacaaacaaccagtttatatatgaccaggataaagggatttttatttaaatctaagagacattcttatcacattagtagtatattaaaatctaccatctattttatggtaaatatattcctttttttattgtaggatgatctaaattctcttacactatatatatagtgattatatatatagtgatgtatgattccttttagcattctttttttaataacaaataagatgcctgtgcatctatgcaaaattcttttctgatttatattccggaaatgttctacaacttatattccgtcgttatagagtttgaaacacaaactataatacatgcccacgcgaatgcgcgggctacctttctcgttgaaaataaaaagcacttccaaagcatcttcttctaaagggctaatagcgttattccaacggatgtcacttatgacaagtatctaaggtatattggtaccgcagcacctatggtctattagaacttcactatgtcccttaggacaaagatgttaaactagataagacctaatgccaattgtaaaatcttaaaatatcttttctaccttaaaagctaaccaataaggtaagggctttctctcttatacattgtttttttatccttcaacaacaaatgtgggaccgttcaacataatccatcatcaaaattacaacctcaagattgctaatcggattttgggttgggaatagattcctctttatttttcagaaaaaaaatctaaaaattgactgacagtaataaaaagtgtgtccaccctactaccaacaattcaaaaaactagaaacaaatatctcatcctccgtttaaaaaaaaactaatttgcaaagatcaatttggacaaacaaataattatctggactcatattcctacaatttttttaatcgaaaggatatatatctgttgtgctctctctctcctcaattatagattctctctaggaacgtgatgatatagcagaaattgttttttagcctgctggcttgtacttcctgctttaccgacgttgcttctcggaagcacacacccagtcgacgacgacttgacttcatccttatcactaaaaacgccgcctgagtaatacaaagaggcgtaggcctgcctgactataattggctcgatgatcgactgcaactgcatcaaaacattcagcatatctcttgctatcttgcaattgcaaattagttatactcgtagctactgcgcgcgcactaattgactacacaagcaaatatgggttctccttctgccaagtacttgctgtttagccttgcaatcctgctggtcctgagtagccagcagcaagctctgctgccttcggcattcgcccgccagttggttccgatgcccacgaacactgccgccggtaagaataacatcagtgttaattaccagttccatctgtatatgttttgtgaaatatcatgtggagaaactaaccactacatctctttgaacatttggagttgcggttctttcttctagcgtgtgtttggccctcccctttttaacctctactctcttatttctacttgcatgtttctcgaactattaaacgataatttttttaaaaagttatgtatataaaaaaactatttttaaaaaatattaattttttcttctaattttgataagctaatacttaattaatcatatggttacgagtccctccatttttgcatgtgcccaagaccttcattgcgaaacaaagccttaattaagtatagctagctatgtctacatactttctctatttaaaatataataattgcctcagatttaaatttatcgaggaggaattactttgaacgttttctggtttagtatatatttttttatatatattggatttttttttgaagtaacacatactcctacgtacattaattaactgtttccattcgcatgcgtgatggagcaatcgacaggccacgcagatgtcacggaggaaaagcctagcgtcccgccgtcgagcgtaacaaagatctgccgagttttacgtatctgcaaacgatcatcgtcggccgcaacatcggccaagccgtgatgtgtcaacgacggcaaatgcatgcacgcgggaataaataatggaggcaccgattaggatcaacaatatggttagtccattaaatatgtgtgtaagctcgatcgatatggaataatgagaaacaaataaacaatgagaaacaaatattcaccatgtttattactacctctgttttcaaataaatagtattgattagtgtaattttgaactaaccggcatcaaacaaaaagaaacagagagatacttgtttacgttacttcttttgtatacgtatccagccgcgatgttcggaaactgtgtaggatcgagattggcatcgatcagtaagggcatcaacaatgttactttttagctgccggtaagaagcattaaatgctcttttcctatccggtagcaagctctgtgagagtggcgaagaattaaaatctggtgataatatctattaccggtatattactaccggtgaagaagagataaataatattatttatatagtgttttaatagaactttaaaaaaatgaaagtggctgttgctgtggggtgatgctcggatcgagatgacatcgatcagatggtgaaagaattgtttaggctgtgttcagatgcagttcctaacttcaaacagtgcgcacgaaaaacgaagtgatcaattagcgcgtgattaattaattattagctatttttttaaagaaaatgataatatgattttttaaagcaatttttgtatataaattttttttgcaaaaatcacactgtttagcagtttaaaaagcgtgcgcgtggaaaaggagaggtgagtgttgagaacttggagtacccaacacagcatctaaacaatagtttcaattatccctataaactgtggcaacaaaataaattcactaaatatatatgtttgtaccgaacaaccttagaaaagactgaccagaaaagtgcatgatctgcaaggtagccaggtgcatttttagtgataataagtgtgtacttcgaggtaaattttgctacaggacgcttcgacttcgtggagttagccgtgggataccgcctgaactcatttttagaggaaaacactccataaatatggtaatttgtcaatggacaccgcacctattagaataataatttctggttgaagaggagagagaaatcacgtgaaataccaaaaatgcctttgggccaacacgtcagctctcctatctctcttctctctatcttctctcccagagggggcatcggtcgccggggcggaggacggcgaggacggtaggagcggccgccgcgggcttgcggcgggagcagcggaggacggcaaggacatggcgaagcggaggagcgggagcaccgggacgcgaagctgtgggtcgccggcgtggggtggcggcgcggccgcatgtgggacgtgaaggtggtcgccgacgtggcgacggcgatggggacggcggcgtgtacctgggtcgtggctggctgcggttcgcccgcgcccacgacctgcgcgacggggacctcctcgtcttctgctaggacggcaaagacgtggcgaagcggaggagcgggagctccgggacacgaagctgcgggtcgctggcgcggggcagcggcgcggccgcatgtgggacgtgaaggtggtcgccgacgtggcgacggcgacggggacggcggcgtgtacctgggccgtggctggctgcggttcgcccgcgcccacgacctgcgcgacggggacctcctcgtcttccgctaggacggcgccaccgtgttcaccgtcactgtcttcgacgacgggaccatgtgctgccgtgcctaccatgacgccgccagtaatataacctcgccgcgcgtcctccgtcccggcgatcgactccccctatgggagagaagatagagagagattagaagagagagaggaaaactgacatgtgggcccaagggtatatttttgatatttcatacgatttctcactcctcttcaaccgaaaattattattttaatcaacacggtgtctattggcaaatcctcttcaaccgaaaattattattttaatcaacacggtgtctattggcaaatcaccttatgtttatgtagtgtttttcctcaaaagtgagttcgggcagtgccccacgactaaagccacgaagtcgaagtgtcctgttgcaaaatttatcttacttcaaactcaggtagacgcaagaaaatatgattcagtgaggacaatacatatcaccgcaggtcaattgcaatagagctataacagctcaaatttcaagcacaaggactgaagcattactaaggacagtatgagcccagtactacccaagtactaccacgaaattcagattaaataaatacaagtaagatgcccgtgcgttgcaacgggaaattttattaagtttaaagaaattgagtgaaaatttgttaaactaccagaagcaagcagtcaacacgtacatttgtaatatctccaagcggggctgctcatatccaaatagattagaacgtatttggtacaaaacacctaacaaatttctacatgtgaaatattacacatcaacctgaaacagatgaggatgtaggagtagccattttggtcgtggaatcttgagatccatgatatgaaagagttgaattaattcaataataataaggtgttgtgttcaaaaagtccaaattttgataacaatagatgtgttaatttataaaaaccaattgattcatccttcctccgctttctggaatcacgtctcttcttgtttctatcttcctttagctcttttgtcaataatgggtacctctctctagcacacttcctttttagttcagccgtactgggattagtaacatcttcatgcatgttgggtgtaccgtacgacagttcagctttgtctgtgcatggtagccgcacatgcctaatgacagaagcgttattttcatagcctgcaccgcaaaatcagaatgctgatgttagcctaaaacaaatatctcatatattaaaaaaataaagccaatataagtatgataccaaatccaatagttgaggttctctgaatcttatatgtagagttcttgttgatctgttgacagttctcacggtcttttggaacattgatttcacttgggataaccgcgcggcacgcttgtttgtcaacttggcattaatcacattagttatattcacaaaaggacctaaaggaagagtgtatgtaaaattaggaagcaaaaatatatcaattgagtaatggatatgaccatggctggatggatgaaacaattacatgatcttttggacgatgttggtgctgaaccgccaccattgttatccattgcagaactaacttgattagaagttaaccgcaactctagaaaatcattgttcggtttcaatttagttcttcacaccaaaactggcacctaaaactgaaaatcgtacatcatgatgtggggataatgacatgcaaaagctaccagcaaagtagatgagtagactgtactgcagaaaatgaaaaaaaaaacatggtgcatgtactgaaataggtaagatacattgcaagaatgcggatttctgaacttgaactaatgttcagaatgtggttttcaatactacaaaatattcaagataccattcttataatagtattcagttttaatgtccatggtgttgtgcaacaaattataatgttgtttgagtgtccttaggcaaattagtgcaagatttgcagatccaagaatgtacaggttaagaagtgcaggccttcaagttagtagtagtagactgcattctgtatctttgctacctaattaaattgtacagataaatcctattcagggtaataggttatttcagaaatacttgccgcaaccaaaattgtagttactcaatccatgatgctaggatgcctagtgatgcaagcaacacaacatgcatggattggggatataacatcagaacttcaaacttattacatttttttaaaaaaagaagaagagcagagtccagatttgacctgttatctgaacaactccacaaaccataccaaatgtcaagaatggattcaaaaaattaaaaaaaccagagttattcagataaagggatgatggtctggataaaggaaatgcccttcattttctcatcattttatcaattttaggtcatgttctccaggcaactacacaacattgtagtgcttctatcccgttagaatggctaacggattaatagtctgaaacccctctaacaaccaaaccatgataaattctgaagcatgatatcttaatagataaagatttgtgatgaacgagagcaattgtttttattctaaattccagcatatgcaaaaaacagaaaaaataatatcttctcatatcaatcactcaaggaaaacagggaaaaaaagagagaatagtcccgcagtagttcatcattaataatttactgcccctttttgagatcatgcataatcacagttgttatgcatgccaatgatcctgaagacgcagatgaagttattactatgctttgcctgagagcctgacagctaatctctaggtacgctgttgaaaaatcatcacaatgcccagatatgcatggtgaaaaatcatcacaatccaatcagctcacatccctccccaattcatctatacgcacgctgttaaaaaatcatcacaatccaatctgctcacatccctccccctttcatcacacatggaattcagcggtttgatgcactcaccgatgcacacgaccttactcaaccgccaaaaacgcaaggatttttcattcagttaaagaagaggaagggggaagcaatggatgagtacctgcttggccgccattgccggtgaagcatagaacatgtagcacggcctgcccgctgacccgaacatgatggaggagcgggaggcctcggcggcggccgtccaggcgacctcgttctgcggcggcggggtgaccggttgctgctcttcccgcggccacgtgctcccgcctcgccgatccggcgccggcgcggtggagaagccgtccgcagggggaggtggaatgcgggcgctgggggatgggggatggggaggaaggaggatgaaggcggcggcgtctggacgatggatcggtgaccgctgttgatacggagggtatcgaggaggaagaaggatcaaaggcaccgctcgggagagaggggaacgcgtgcgcgtctgcactcggcaggatcagagcattgcggaagcgatctgagccattggatttcacgatcctacgtttagtattacgcgtgtctatcaggattggagtcaccgctaccactacggaatttttaagtagcagagattacgaatctcaactctaattgcgattgccactaaatattaggggtataaacggagcggatattatccgatccgctccgaatccgtccgatgtaaggatatggtaagggtttttagtatccggccggatacggatgcggattttgtcatgcggatatggtatcaatgatatccgatggatgcggattatccgatattttaatcggattatccgatgtactgtttggcggataattcacaactttcaggccacacaacaactttcagacccatctagcccatctattataaccctaacctaattcactcctcccccagatccctctctctctctgccgtcagccctcagccgtcacgaggtcgaggagtctgagagtggcggcgcgacggtgacccagcatggcggccgctcctcctcagtcttttgctctccccaacacgcgtcggccgctcctgtatgcctatggaactaccgaactattgtaatgtgtcctgtgtggcagtgtgcctatatgcctgtgtgcagtgtgtgctgtatgcctgtgtggcagtgatgacttatatttttaaattttaagcaacgcagtgaccattgaactactgaactgaacacttatattattgataatttattggatgtgttatattaagcaaaattatattattgatgggttttggttggtttttcctaaagagctgagatcatgttcagatgttgttttgctatcgtattgcggctaattgtaatgctgccctcttattatatggactgaatacaaacttgacatccgataactttttatcctttttcgaattgagtccgcaccgattccgcaccgaatccaacgtccgaaataatccactccacatccgcacgtcatccgtacccgctccgtatccacttaagaaatagtttaggatatgatagagctattatccgtctaaatccgctccattttcatcctctccttccctcccattctctgatctagtcacaacttgctgagttgcttcttttcatatgtgcgacgggagagattggatcgattttttcttcttttctttttcatgccacagaattggatgattttttttcttcttttctttttattttttgggacaaaaaccgtgatgacgtgcatgcttggtgagcacatttttaccattatttcttaattatgtgcacgtgaaattttttgtcctttccaaaaaaaaatattatcaacattgttttgcaagataaaaagataatatttcttgcataaaaaatacaacatttcagaggtttttaggtgacaaaggaaaacaaccttcacaaacaaaatgactaaaccatcagtgcttctcaaattgtcacaaagtcattaaagatgcgaaagggcctgtagcctagtggttacaagagtctaagtatcacttgaggttctgggcaagacgcctgtgatgactttgtcaatctgaaggatagcggctattgtaagtgtttgtattgtactgtttaattctaaaaaaagtcatctatctatctatctatctatctatctatctatctatctatctatctatctatctatcttctatctattttatactaaaagtccatgaaacttcctacaaacgcttctaaatcgtcatgtggcactcatataaacgcttctaaaccgccacgtggcactatctaatcttaacatcgattttcacttatattggtggacccgttattttagatcgttagattagatctacacagttaattttcacttataatttagttgctagaccattattttagattacatatatatgagaatatatagatgccaacagttggccgaaaaaaaaggcaaaagtatttactgttcgtactatggaaaaggaaaatccatacacgttgatttccagaccgttgttttagattagatatgtaagtgtaataccttcctccgatatatacatacacgagaggaaatttagatgtaacagttggctgaaaaaaaaaaagcaaaagtacgtaaagtaggtactactttgtggaaaacagaaaagcttgcgtatgtacggttcgccaaaagaaaaaaaaaacgtaagcaccataaaaaaatatgccgtcgcaaaaaaaaattaaaattatatatttaattggatcttgttgtattccttttatctaaatcaactattgacatattataaaagttatattatagtcctactaaatacatcacgacacatagagccgataaatagtaattaatgttatgataattttttaaatgattttgcatcatattttagggtgtcaaatatcacttgaaaagttttttaagtagatatgatttaattttaatttttttaatctcaaagtgtttttttgaaattttccagaactacttaattgttattagagaagtgagcagcacagatggtacatggatgtgaaaaatattataaaaaatatttcaaccaatgatcctgctataacacaatcctttaatctatcatgagatatatggttatatatgtatattttgtttatctggtcaaatagtttgataacaataaaataatatgtaaaataaactactcatgatatatttttcttataattgaggaattccaacatatcaaacataattaatagatttatatcatacaccccaccgacatgactaaagtatgctcctacgaattagttattatacaagtttgaaaaagaaattcttaaaggtgtctcatatgattatcaaaaataggtgttgaaaataaaccaattgctacgctatagatatttgtcaaaatataaaaataatatagtgctacgaagattatcctggtggtatgtctctttagttataatttttttattctatcgaatgattaaaatcgcttattttcaaaagtgagtactctatctatagcataaaaaaataaaaaaaaatattttgatcatctccatttcatctttgtccttccttgaagggcaccaagcatcgataacagagtttgctacgatatcgtaattagtacgggcatacatatagctgaattgagacggccctagtggaggccaccgtcgccaatagtgcccaacttactacttagtgatgcaatactatatgagggtatgatagtgaattagacattaaaattatactccagactggtctagatgggcacagctacatcaatgcaggacccatgtttcaaggcacaaagaaataaagtcttgctggctacaatgagcttcacactttataggggcatttatgtttaattttaagatgtatcctattaattggtacaagtggtatttttagaatgtttttatatggaattggaaataagtgagacaaaaacacttaggtatagtggatatttttagtgtattaataatatattagacttattttattcgtacatatgcagtttcatttattaataggtactcaactttagaaagtgataataaattgtagtgacaatagggaagtttatatgaaaccggaacaaagtgttttttttaatttagaagacatccttatcatttaaatatattaatatatatatggtagaaacagtgaaatgtgactttttttaatcattattttcataaaacaacaaataaaatgcccgcgcatctgcgcgggcttcctttctagttaaatataacaatctagtaagccatttacaacttagttgccgaggatatagaatatattttcgctatcaatcactcacttcctttaaagtgtcctcggtacggtgtaattcttaaaaaaaagtcattaatgataacaatctaataagccatttacaacttagttgccgaggatacggaatatatttttgctatcaatcactcacttcctttaaagtgtcatcgccgtgtctttacatattgcaaagcctatgactcaagtgtagactttgtcaatctcgaggataaggatttgctggctattgtaagtgtctgcgttgtactgtttaattctaaaaaaaaagttattgaagataacaatctaataagccatttacaacttagttgccaaggatacggaatatattttctctaccaatcactcacttcttttaaagtgtcctcgccatgtctttatatattgcaaagcctgtgactatattttcgctaccaatcactcacttcctttaaagtgtcctcgctttgtctttatatattgcaaagcctgtgactcaagcgtagatagatgaaaggcccttttgtaaaaagggttgaggctacccaaacttaactgggaatgagtgatacccaaacttaactgggaatgagtggaattatgaaaagattaaacacgtatagagcctgcacaagtcgtcaaaagtacttgaccagtggaaagaaggtaacattcagcggaagaacatggaaatatagatgaaaacaacaggcaacaaccgatcgtgctaggataaatgtagttcatcaatcaagatcaggaagatgaaaatgacattgcagcctcgtgagatttgggaattatatcatggtcgatagtgttgacccaatctacacatttcctctgtttgccccactacctcatctaaagttagatatcacgatatctatatggtcagagataggatcatgcctgcttacaacagtccaaacgttccttttcccttcaattacctagacaagatgctccctctaatttaacagttctacagcattatagtactccgtatgaagtatagtagttagagtaaaaaaatggtgatcaaattggagcacacatcaattcgagttaacatgattcacatcaattgcaccctctgacaatttaagccgtagcacttattatgatctcacaatcagtggctttgtaatcttcacaaatcatgtgtaaaaaatcaaaatgaaataacatgaagaaaagtacatcgcatctttgtattcagcatataatcatctccagtcagctcatatcaataatatgtgcaaacagaaattttttatactccccagtagatgaaagataaagcaccacagagacaaaaggattaaaaactagatagttagagaatgctattctaagaagttttctccataagctggattggtgctaagatgttctgtttacttgtctctactatgcagccattcatcaccatctcttccagcatgaagtgcaccttctctagatggaacatgatgtcgagttcacactggccaaaaggataattaccatcagcttgtcccatgtgatatatgtgagcgtatttacagtcacaagaaaaataattgttgggattactgaaaaataccacatttccgaagtggcggtccatagtttccacaaaaagatgaatgaattcgagaatagctagctcattctgccaaacaaaagaaaattgaggcattttaatatgaatcaaggaaaacatggtgcaggctgtagttatgattgacatcccagaggaaaactacaatgcaaattgcaaccaaaacaagttgaaggaagatttgacttcggcaattgctacaaaattcattgagaaaccaggcagcaaacaatgaactgcagtcaacaggcataagatggagatactgagattcgtatgcagagatgtaagtatgaaatagtgttaccacacagaatcaccaatataacaaattttcttactaaagagttctatctaatgataaataaatagtaatagcgtatatcttatagttccatcaaagacaatgataatgcattttcacattactatcaattagcaaatccgacttgtgcatatattcatcgaaagaagaaaacagatgaacaagatgtaagcctctgttgcgatgcgggatacttcatgattattgagtaaattaaacttctcatgtgaaatttctagttcctaatagaaaccattaaaccgtatatcttcagaactgataacaaccccaaaccctcaactactaagtagtaatatcatttttagtagcaaggacatgttcagaaactatgagctaactgcaactgcaggagcatttcggtgccataaaatggaatttaatggcaaaatttggtaaatcatccgaattgttcaacaaagggaggcagggtgccttttgtctaatgaaaattggaaggcggaggaatcaatacctcgtcgttgtcgacgccgacgaggaagaagagggaagcgtaccgccggtacaccaccttgtagttccggtgctccacgaacgaacactgcaatcgcacggatcatacaaatcacatcatcacgaggaagagaacgaacacccaagaacctgcacagatccagatccaagaacaggaggcttcctttccccgctcccccacccaccaatccggagcccaagtttccgcgctgggcaatattggatccaagaaaacgaggaggaatcggaggggggatcgggaattggggggttaaccaaaacctgctggtcggtgcgggcgaggcacttgcggacgatctcgccctcgagggcgcggcgctcgtcgatggagaggtgctcgtagtactgggccagccgcgtctgcccctgcttgttcacgaacagcacgaaccggatccccatcgcctcgcctctcctcgcttcttccttcgctctgttccaaggctgcttcgtcttcaacctctcgacactctgctctttctttctttctctctcccgtcttctgtttgactcttcttgcccatactcgtcttcaacacaaggcaaccctcttttcgtttgccctttttactatttctaacggtggaattattttaggtacggtgttcgtaatacaattcgtatattcagatattttattaatttaaaagtaatttacttaaatttaaaagttatttttttgacgggaaaccgcaggagaggctcctactgcgataatatattaaataagggatcgacatatacaaagaaaaagaaagaaagaaagaaaaagaaaatagattacaggaaaatatattaaatttaaaagtaacttagaattaactctttgtactattagaagtaattacattaggaccgaattcaaataaaaaatatgtggagtaaattttcaagtaaagtttacacaagattttcaagtaaatacatgtattatattttcaaagtaatcactatattatttttgaaaacaaaaattttgcatcatatagaaattaactcttcacgatattagaaataacttcattattagagaaaagtaatttttataagtaactcttcataataaatacactcctaaagggaagtgactataaaaagataatatataaataactaactctactactagatagaattaagttttcacggcaactacactgctataaggaaagtaactgttatacaaaagtaactcttcacgttattgaaaatagctacactgctagtgaagtttatcggtgatatggacctggggatatcatctttacagggaggaggctacccccgaacccacatgccccccctccagggagatcgggcctggggtggagcggcggctgcccctctccagcttggggtaccgagattggagggaggaggctgcccttagacccacgttgcacttccccgagtagggtcgagcctagggtggagtggcggccgacccctcctcgcttgggggtcgggccgtcccgaccccctcggcgcatcagcctactcctgcgagttgggtgggcgcgcccaccgcccacctaaccgcatttaaatcagaccgaacgggcgtgtcacgccgcatttaatgcggcgtgctgcgcgcctaaccagtctatgaacggtcgaatgactgatgggactggggtagtgcgcctacgcattgaccatgtgtcaggcggtgtgcagcctgccatgccccgtcacgtcatgatgatgagaggctttcccagccggagttggttcatccgctctagtcaagcagggttcccatttcccggtgcaaacaggaacccagaagtcttcacccattaaatgatgaatgaaacgggcgtcccctatgtcagccggttcgatttgaccggtcccacgaccgagatgacgtgcacgtgacttccaagtcaaggaacaagacatgcattcaatgcaaagattgtactccttcacccatagacaggttcttgggcccatgtggtaaccccttgaggtataaaaggaggtccatgcctactaagggagaggatgagcccattttctaacacacacttcagattcactatctcaagcatctacaatcttcacagattcagccaagcacaggagtagggtattacgcttctcagcagcccgaacttgcataaaccttttttgtctctatgtcttcgaggggcctgacccctctctttctctcatccatcacagggatcctcgaatctcaaccgctgcccccggccgaactcacaaagagagggggggtctcacggtcccccgctagaggagttcatcctctgacatagttaagaagaaaggttaaataatttaaatatattcaatattagacttgttttgtcatatattttgagtagagtatgatggttcaaacggatttaaaaaaaatatacagtttaagagatatacatcatcaaagattctattaaaaaagaatatatattagtgtaactatatgttagactcagtagcatgcacgtgaatctatgtaacaaccagcagataccatgtggtcctctttttctggcaagtgatctcatttctctatcacttgatcagtacaacatccacgtgttcatatcttagccattacaactgatcggacggcttacgaaagatgtttggataaggtcaaatagtgtgtgtgcactgaatacattttaccataaagatatgggttaattagattcatgccattataacctttatagttttgaaatatgccattactatttaactatttgaagtcgtgccatttagtagatatttaagaaatgccaccacatacccctccaacacactgaaatttatttttggaccaaattacctgagtcttttttcctccatcccctcctcccattctctttctggatctgagttcccggtgtaagcgtggtggagaggcccggcgagcagccccgaaggagtcaaagtgatgttgccggcgctgtgagatcgtactgccgcagtgtcgtgttatcgtgtgagccgcgaaacgccacgcccaaatcaattttgagaaaaaaaagataaagaagtaaaaaagagaaaacaatgcacggatgaaagaacacatatctgttgctgatagtcctatgcacaatcaatgtaaaacgagctttaagaagacaagaacatatcggcggaaggtgatcttggagcagccgaggtcgtcacgctcctcgcctcgcctgcgcggtgcttcgctgcagccggaggaggggaggaggatgctagttgcagctgctgctttcagtctggtcgccggtagttctaaggccgccggccaccactgaatcaagccaaccgggtgtagctccaaatccgaagagggatgggaagaagaggagtagagagagaaggagattgaggaagatgacatggaaaatttggtccaaaaagaaattttattatattaaaagggtagacagtgacatatttcaaagagtagttattccaaatagatgaatagtagtggcattttttaaaactgtaaaatttataatgacatgaatccaattaaccctaaaaatagatgctgcaagcaaaactcaacaaaataaccacaaattaagacaagtaagcacgtgtatgaagatgttcagactccatgtagacacgttctctgatcgatctgaagcccaagcagtcgagcttgtgcccaggggtcaataccggtgaaggtcaggagcaggtaaccgaggtttgagaggaagaaaatacatagtaactgcggtggagatatacaggtggtccaaactatgctactagaatgtaatgtttttattttgcatgaagttgctccagttctttcataatgttcgtattcgattaaaggtatatttttgtggaggctccaacttcttgttgtaaaaaatgattatttgccgagataaaatggtttactatttcaattataatattattaattgtaaagaagatgttttgcccttaaaaccatagagtgttctcagctccaaggctccaacttctagagttacgtttcttctaccaaccttataacaatcctaaatgacagccctaaactatgcgttcagtcttgtctaaatttaatggaaaaaatgcagcagaagattgtgagaaagtttgtttcgttttccatgcgcacgcttcccaaactatttgcaatgagagtggtgattactttactaatgtgtctctgggttttgatcctctcttgggtcggcaatggtgactcctgctcctttgggaggctgggatttctccctggggatcacatcagggatgaaaccctactcaggttccgctctcctgttcacttctctctttttctctaatcgtccgttcaccctggtggtagactttcctcactcctctttttggctttgttgctcttcggcggctctcgccctcagggcttgcattggtggttcttctggtgatctccatgtctctcatctctctggaaggtgttacagttttacagtttgttctaagaaagttggcctttggatctataatcttagatccttcacttgcaaggattatgttgctcggtttttcctctagagagatgggggccctaactggcataaggaatatgatatctggtcggcagctcaagaggctgattggacaattgttcgtcacaagaaaaagtctaagattgtttccaagactatctctagcagccgcaaatcagttcctcgtgccaacaatgctctagtgcctgtaaaattggtgttccatcggttgtcttctttcttctggcgatcaccggaggtaagatggataagaatccagttaatgtgggggcggtattttagctaggtcttctaggatttcaaattcaaaatctaaggctgaatcatcgcctctgtctgttaaagcctcttctgttagtaggcctagttgccctagatgtcagaagccaggtcatttggaatctaactccataaatagagtccgctgtgcagcttgctctaaacttgatcatcgggcttcagtgtgctggaaccaaaagtctgaaaagaaagtctgggttcgcaagcccaaggctaaaaagcccattggttcagttattgcttcttctagtcggaggcccgcaactgatagtttggttgtttcgtggaagtcgctggaggaagagcataatattttagttggcatcgtttcgtgccttaattataggcagttgcagcctgacgcttcttcttcctctcttcctctcgctctccgcccaaatccaatctatagtgctccaaaaaccccaatggccaacatcaatccggatcctactccattcgtcccgccgacgatggcgatcaatgatgcttggcttcactgtctccctcgtgcagatttgatcatcatggatgaacctcccaagaagcatgaaggtatcgcagttgccattcttgaaccccctcccaagaagcaagagcattttgtccttgtggtttactacgttcaaaacactctgggttatcatgtgttggacaccagtaggcatgcatctgagtttgcttttattcacattgcctcggctgtgcttagagatgctctagtattgggagggccatatgatgtcaatgaacagattaccctaagatttgtcaaccatgataacacctccacttgccacaattcccctccaattagagagggttgggtgatgttcttagatttccctctagacctacaaaccgacagaattgtggacaaaccagttggtacttttggttggttgctttgttggtccagtggaccaaggttcagaggcagggttcttgcgaaggtcatttactccatggttgaggaggtccctctctaaggtggtgattaagaagtactcaagctttggaggtgttggccgctcctagacagtttctgtgtttgtgcttaatggggactttgcagatgtccagcctgcagatgaggatctgccacttgtgaaccacattcccttgccagaaccatctcctgttcctcaacaagctaatgtttggggaaatgcagatgaagacataggtgagaatgatgaagtgaatgcacagatctaggaagaactttctcacaatgtcagtgctgtctcccagcaggactcaggggaatggcaaattttccctgcccatcaagtggcacctactatttctttggatgttgcaatggggccactggtcagccagactgaggaagttgtgccttcattcattgtttaccctcagttttggaaactgctcagcatttgtaggactctcctgtgtgggccaagattgcttgggcctcagcccatgtcatctgatgtagtcccataccagctgcctgtccatcatgtttttcaatttgccatgctagcttctgcattgatatgggccaaagaaaactgggtcagccaacaagttatttcagtccaaccgattcaagctatccatcctcaacacacagtttcagtgttgaatcttctcctggacccattccaacaagatgtctctcctgctctacccccaaggcccaaaaggaggactgggaagttgattttgttggattcagaaatacggagaagtgaaagaattaacaagctttctgatggatttatgtcccctgacccaaatttgggtgtgggaaagccaaggggaaaggctagggcaaagagctccaagaagcttaaaatgctggctcaagaaagtggtatcttgctctctctcaaccctttgcctttggaacttaatgatcgtattgcttaagatgatgagattgatgcccccctgctgattgttctatacagcttcaacagattggcactgatgtctgtgggatgagcagggagatggtatctgctgaagctttgactgcccatgctggaaatgggagtcactgtgctgctgctccctaaattctgccccaatgaacagtcctattttgttattttgttgccctatgttgggtctctccaagatttgtaataatgaatttgcctttaaaagctgtgctattatgatgaatgggacttctgcctggatcgtttcatctgttactcttcgctcctatgttatgcataggactctatcttattgctctttgtttgacaatgaattcacacaatagaaactggaatattttgtgttggaatgtcaggggtctcaactcttcctctcgttgtcaggctgtaaagcaaaagatagatgaaagttcttgctcgattttttgtttgcaagaaacaaaaaaggatcatttggcgccaagttcgttaagacgctagcccctaaaagatttgataatttccttttttctccttctgttggagcctcggggggtgttttcattggctagtgaagctctatgttttttggtgtgctcctgcaacaaacccaacatgttttagtggtcagtttcacttcaaagtcaaatggtcagaattgggttttgatcaatgtttatggtccctcctgtggtccccagagagatgagtttgtacagtggttacacgatcttgatattgccaatgattattggacgatcctaggagatttcaactcctacgggtctattgacaatagaaataaaccgggggacaacatgaatgatatttttatattcaatgatgtaatcagttccttgggcctgctagaaatccctctaagtggaagatcttacacattgagtaatatgcaagcagacccccttcttgaataactggactgggtttttacttcggctaattggatcagtgccttccctaacacgcaagccctagttatggccaggaatacctctgatcatgctcctattaaaattcagattgctacctccatacctaagtccaacgttttcagatttgagaattactggttgaagcagcctgggtttttggatcatatcacttctgcatggacagacattcttcacataactgatcaagcaaaactgatttctgctaaatttaagaggttgcgttgctctcttaagaaatggagccaagctatctctaagttgtctagaacaattgagaatattctttgtgccctaatacactctctggatttttccatgaattttcggagctcaagaaataattttaaagtcacaaagttcattaaactaatttaaataaaaaagaaaactaattaaaatcatccttcctctctttgggcccctttcggcccaatccccctttccctcctgcggcccgcgcgccctctctcggctggccttccccctcgtttcttgggccgtcggcccgtttttcctccctcgcaagtccagctcgcctctcccttcgcaagtccgttttgcctccctctcccatccctctctcactctctccccgacaggtgggacctgtggaacccacctgtcatctcctacctccggctccccactcccaaccaccatggccacccgagccgccccacgtcgccgcttcccccgcccacctcctccaccccgcgtgctccagcctggccgtgggacctcgccgcccatgtcctcactctcctaccccactccttcccacgcaaaactggcgccggatcggcccccacgaccccacgcctctcccccactccggccggcgattccgcccctcccggcctcgatctcgagctccccgcgctataaaaatgctccgcgagtcctcttccatttctccatttttcctgagcttctcgcgccccgtactgctctccccacgctgctccccatcaccgcccacctccagcgagctccggccgccatttcccgtcgctagggccgccgccacactgccccgccgccacgttcggcatcaccgagccaagccctatctcggcatcccctcttttccccaatctcccaccaaaacactaccccactgtcaacccgagccgccatcgcctttgcgagctccggccgtcgttccccgtggctggaacctccgccgcactgtgtcaccgccaccactggcttcgccgcagcaatcccaagcccggccaccgcttcttttctcctcgccaccaccgaaaccaccccttcaccgcgtacccgagccacctcccccattgctgcctctggctgcaatttcccttggtaccgcgcctcctcctcccttcctaacccctctactctctctcccaggctgtgttgtgccccggccgctcctccttcgccggacgtcgccggagtcccaccgttgccgtgcctccccgtggagcccgtcgccgccgcgttcccgttgtctcctctccgttgcgcgagctcggtgagcatccctccctctccctctatctccccttcgccggccgcccgcgttgcaccgccgccgccggtggccatccggctaggccgctgtcgccgccgttcgccgccgcttggccggccggtctcggctgcgcccgccctgcactgtggccgcccgtggaccggcgtggtcctggtccacggcgcgcctgaggccgcggtggaccgtgtccaccgtgggccgcccccttgagccgctgatgcctggggcccacctgtcggtgccggccccctctttgatgacgtcagcatgtctttttttctttggaaaaacaatcaataattgcgcaataaatcaataataattctagaaatctattaaaatggctcaaaacttctaaaattcatatctaattcattcgaactccgaattgagccattcaacttgcaaaattcatctaaaattgagatctacatgtttgtttactttttatgtactgtttgcttggtttttattagagtttttcctcgttttgcgtgccagcgtgtagaatccgtcgtttcggaagtccgcggtcgcaaggataagagttcagaaggttgttgtgaagaagcaaggcaagtcacatattccccttgagcatattgagcctactttacaaatgttttactgtttgcaaataaatatgcatgttttgctaattacatgggatcagggtttcacctatctgctcgcttgtgccatgtttacttgatgtctgtcctttgtcaacattgggtaataaatcgactagctcatgttacttatgtgacctagctagaactatatgcttagctatgcttaattaccactagctcagttgatgggataattacagtattagacctttttagtattagaatgagctgcgtgctcgagacatctggccatgcttcatggtcataattatccaactaaaatgcgactaaatggtgggctgtgggtgcatggttttgctagtcacacccatggcaattaaggactggttcgcgggatgccctagaagaacttattgtacttaccacaaaccagcgtgggcaacggctgggcttgtagtgtagctttcctctagctgatgtacccaggtaagggtgggcgttatggagttgggtcggccggggtgttcggttgatcggcttttagattcaccgtggcacgagagaggggctgcccgttgcctgctggggacgggggcgaaccctgaggtgtggtgcgatcggttagagggggttatgcgaagggtcatgtcacggcctctttccggtatgttgtggtggcatgtcggcacacggaaatgtgtcgtggggctgtgtcttgtgggtacagttgtacacctctaatcagagtaaaactattcgaatagccgtgcccgcggttatgggcggtcgactagattcaccgtgattagtcccaccttaataaatcaactcaatgcaccgtagttcaggtgggttagttgggcctgttcaatgtggtatagcgttgatcagtggagatttaatattaccttaattactctattgttttactgtttgctcaataaaatgttttacaaccgcctttatgcaaatagccacaaaccgtccttgtattcccatgcacgtctgcatcattggtgtggcttgctgagtacggtggttgtactcagccttgctattattcccccttttcagaagtgtagtgcttctgagctgaagacgaagttagaggaccaaggctcagaccccagttgagttttgcctgtggagtggagctgaagccccgctaggatcgcctttttccactgctgctgctttcgtttcggtgtgtggactaagcgcctcttctgtaagtattttacgctttatttacgtttggaactgtatattacttatcgttttgtgtaccctggctggtcctggacagagatttagtctggaaatttgggctaaatttctgggtgtgacatggctccttttggtggaaggatgttttctaatatgatgtcttattcagaggaattgccaaacctgtcttggattcgggaaatgacgtgctttattgggatgatttatgggaaggagtgattcggtcctctaaatatccaagattattttcctatgctaagcacaaagatgactccgtagcccagcatctggctcgagatccacaagatcagttcttcctccctctctcccaacaagcctttgatgagtacaatgatatgaagagagaactctaggacttttctcttcaggatacaactgactcttggacttatatatggggatcggcaaagtacacttcaagactctgctataaactcagtttctggtctttatcccctcccatcaattttaaatggatctagcagagtaaggttaatatgaaaataaaggttttcggctggctgttgtttttggacagagtgaatactagggatctgctggagaggaaacactgtgctcctttgaatgcctcagacatctgcccttcttgctcaaccaatgctagagaaaacagggagcacctgttttttctttgccctttcagctcagcctgttggaataagttgggttggtgctgtgatactactctgcagtttcatcaaatgattcaagcccaactggcagtggtatcgcaccaatgcttcatggaattgttcttaattgcagcttggaatatttggaaggagaggaatgggcttatctttcagggtatccaaccttcagtgcgtaactggttaagaaacttgaaggatgacttgagtatacatttaggtatccatccttcagtgcgtaactggttaagaaacttgaaggatgacttgagtatacatttaattaggctcatggatagagcaactgtaatttttgtttagttttccgttttcttcttctcgtttgtcttctatacatatactctatggaaattaatataccgtgggggcatccctcactgttttctggtaaagaaaaatataatggattttgactttttcttgcactgttagaccactcgtcttattaaaaaaatttggaattattatttattttatttgtgacttactttattatccaaagtactttaagcacaacttttcattttttaatatttggacaattttttttaaataagacgagtggttaaacagtgcaaagcaaaaaatcaaaatcccttatattacgggatggagggagcatgtaggatggccatgccatgtgcacaatgttccctaatatcccaattcctagggaacctttctatccctaggattttacaggagaaaacgtagggcactttcaatttcccccacattgttttcccttggaattgtgttctctatgaatctctttaggactgtgtgccttttttccgacgccacccattctcagataaatcaactttggtagcaagtgatgctgcaggccctgcagcatgtgtatgaatttaccatctatcgttgcatttggtaaaacctacaatgggaggcacgatggttgcatgatttttgtgcagtggatgaaccagatgagcgatcatggattgcaaaatgaacaaaacctatccaggaagcatatataaatagtggttgtgcccgcgggggagagggagggggggggggtgtaagacgtagtaagtactttcttaataaaatgaagtcaaagatgctgatcgatgactacaacaacataggtcacagaaagtaaactaaacaaggaggccctagtacagatcctctcatctgtgacggcccatcacatgcctgggcaacgtaggccatcagaacgaagtcatcccaatcgggcctaaatttttgccgttgtagatgtactcgtcggggtgcatattcctatagctcgtcaccgatgacactcatctgtgacagactcgaagtttggcccgattgagatgacctccactatctcaattgggcccaaatactgagcccgtcacagatgagtgtcatcggtgacgggctccaaagaaggcccgattgagatggccttaatgcccgtcaccgatgactcttatcggtgtcgggcttctatttctgcccgttagagattagtgtgcgcccgttagagatgacatttttttggcccgattgtgatatactttgcacactatatatactccagcagtctgttgtctgtagttatcccactgttcactattttggtgggaggttgaaggggtgaatttttttgcaaacaaaaacaggaaaatcataaaagtaagtaaaagggtactaatcatttcctattaatttagtagtacttatgttatgagatgttaactaatattttgttcattgttcaacgatggatagaagttggatgtacacgactggcttgaggtgtcagtacaaggagtatagagatggcgtattaagttttatgaaagccgcagtggaggataggataagaagaaatgacaagtacatgtgttgtccatgtaacgattgcaggaatgagatttggttggacgatgaaaaggaagtacacgctcacttgatacgccggggattcatggagagatacacatgttgggtgaagcatggagagcaagatctgggtactgatggtgcagctgcagacggaagtggtgcagacaatcatgaagaaggacatgaagaagagcatgacatgtttgtcccatctccattgggcggtgaaatggttgatgtggaactgatatgctgcaagacatattacgtgacgttgatgacccagctatgaacgagagagattccatgaagttcagcaggttggtcagtgactcggagactcaatgaagttgaagcacaccaaattatcagcaacattagacctaatgaagttgaaggctagtagtggatggtcagacaagagttttacagaacttttgggaatactgaaggacatgcttcctcaggagaacacattgcccgagacgacatatgaagcaaaacaggttctgtgtctcctagggttagaggtccggagaattcacgcatgtccaaacgattgcatattgtaccacaagcaataggcggacttagatgtttgtcctgtctgcaaagcttctcgatacaagcgaaaaaagagcgcgggggagggaaagaagtcaaagcggggtggtctggcgaaggttgtgtggtatctaccaatcattgatcgtttcaagagaatatttgccaaccccaatgaagaaaagttagtacgttagcatgccatagagagaaggaatgacggtttgctaagacaccttgcggattcgatccaatggaggaatattgatcgaaagcacaaagactttgctgtcgaccccagaaacatgaggatatgtttgtgtacggatggcatgaatcctttcggagacatgagcagttctcacagcacttggccagttcttattgcgaactataacttcccgccatggttgtgcttcaaaaggaaatatattatgttgtgcttgttaatccaaggtccgagacaacccggcaatgatatcgatgtgttcttggagcctgttattgatgaccttgagattttgtagaaagagggtgtggaaacttgggatgcatatggtcaggagaacttcacgctacgagttctattgttctgcaccattaatgattatcccgcgctgggtaatctttctggacaaaccgtgaaaggaaagaaggcatgctctgactgtatggaacatacacgcagtaggtggctgaagaaatcaagaaagatggtttacatgggtcataggagatggctccccctacggcacgcctttagaagaacgaagaaaattttcaatggtaagaaagaactagggtctgcccctgcggatttgtccggagatcaggtacacaacatggtgaaggacattactaatgagtttgggaagaaaagaaaacgtagcaaggaggacaagaagaggatgtggaagaaaaaatccatattttggcggctacctcactaggaagttcttaaggtccgtcattgcattgatctgatccacgtagagaagaatgtgtgcgatagcttgctggggctattactgaatatgcctggcaagacaaaggacgggttgaatgcgcgtctcgatctacaggagatgaacattcgcagtgaacttcagcctgttacagatgagaagacaggaagagtgtacctcccaccagctagccatacattgtcgaaggatgagaagatcgcaatgctatcatgtctggtagatattaaagttccttcgggctattgcgcgagaataagtaagtacgttaaattggaggatctaaagctggttggaatgaagtctcacgattgccacgtgctaatcacacagatcttgccagttgctatcagaggcattctaccaccacaagtccatcacatgatccaacggctttgtgccttcttcaatacaattggtcagaagattatagatccagaagacctagatggtttgcaggccgatattgtcagtaccctgtgtcacttggagatgtattttccactggctttcttcgatatcatggttcatctcactgttcacctagtgaagcaaacaaaaatatgtgggccagcttttatgagagaaatgtggccattcgagaggtacattggaattctgaagtcctacgttcggaacagagcaaaaccagaggggagcatcattgaaggttacatgaccgaggaagccattgagttctgtatcgattacatggccgagactgatcctattggagttccttcgtctcgccacaaaggaaggttggcaggtgtcggcacaactggcagaaaaagaattgttctagatcaagcttcctacgcgcaggctcatttcgcagtgctgcaacatatggctgaagtaaccccatactttgaggagcatttagcgaaggtccgacaggacaatattggtcgatcagatatttggatcaacagagaacatggtgctcgtttcaacgaatggttcaaggatcgtgtagtacggtcgaccgatggcccaagtgagatattacaaaggttggcaaggggtccatcttgggatgttgacacatggcatgggtacgatatcaatggatacacattttacaccgtcacataagatgagaaaagcacagtgcaaaacagtggagtccgtatagatgcatatcaggatcaggctggatcgagcacatactacggccgcatagagcagatatgggagctgaactatctaaacttcaaagtccctttgtttcattgcagttgggtgaatatccgcacaggtgtcaaggtcgacaaggaaggcttcacattagtggacctggccaaggttggatacgcagacgaaccattcgtactaacgaagcaggttgaacaaattttctacataaaagaccccgcaaacaagaagatgcacatcgttagggatggcaagagaagaattgtgggggtggacaacatcgtcgatgaagaagaatacaacaagaatcttcatgtcagacctcaaatcgaccttgacgatgatcccaaagacgaagtggcttacgttcgttcagaccattcggaaggcatatcactgtgaatgatgtatttaatttgtattggagccttaatgaatgaattgcatatgtttcatgccattctagttaaaactctttgaagaaatggatttgttaattatatggttttaaaaaattatacttgttattttaaactatatgtgagaaagccaattgttaattgtatgaatttaaaaaagtaatatgaattttaaactatatgtgagaaaggcatttgtcaattagatgattttaaaaaattaataggaattttaaactatatgtgagaaaggcaattgtagattatatgattttaaaaaattaataggaattttaaactatgtaaataagacatttgttaattatatgtgataaataaaatgtaatagaaattttaaatcgggtagaagttaattataaatgatttttataacttaaaaatattttaataagtcatctgtgatgggctttagtactatgcccgatagagattattccatctctatcgggcttagtgctaatgcccgtcacagatgactttcatccttatcgggcagagtactaacgcccgtcacggatgagtgtcatccgcatcgggcatagtagtctgcccgatagagatgaggattgactagggtttatttagtcaatcctcatcccgacgccgcctctcactctctcacactctcactctctcagatccaccgccgtcggcgcctccctccacgcctcccggttcaagatccaccgccgcctcctcctcctcgacgccgccacctcctcccggttcaacatccaccgctgcctcctccctcgtcgtggataccgcctccccgactgccgccgccgtctcccggttcaagatctggcctccccgaccgccagcgcctcctccgcacccaagaccgccgccgccgccggcctcttctccaagtccgtgtcctccatgcccaagatcccgccgccggcttcctctccgcctagtcctcaagaccgacgccgtggccgtttcaccgaccgccgccgcctcctcgtcctcaacgctgccgcctcctcctccctcgaagatccggcctcactgaccacggccgcctcatatcctcctctctagatctacgcccagcggccgtcgacctcgtcctagccgccgcgtcgacctccttcacgccgctgcctccctctactgattgccgaccgccgccgttgcgcaagaccgccgttcccgaggccggggccgctcaagatccggcctccccgacggccaccgcctccctccacgccgtccccgagcccggcaccgcccaagaccagcgtccccgagcccgacgcctccctccacggcgtccctgagcccggcgccgcccaagaccgccgtccccaagcgaggtaggtactcctcaccgatgatgatgcataatgtgatgatttgctgtgtacatgttatatgtgatgatttgatgattcgatgataatgtttaaattcgataatgtgatagtgcgattatttgttgattcaatgtttagatgctaatgtctacatatgaattgtgctagtgatgaatttttgtatggctgtgatgacttgtgcatttttatatgtgttagctaatgatgaatttttatatggctgtgatgacttgtgcatttttatatgtgttagctagtggtgaatttttatatggctgtgatgacttgtgcatttttatatgtgttagctagtgatgaatttttatatggctgtgatggatgaatttgggggagaatgggatgttgggaaaaatgtttagatgtgggctgtgatgatgaaatattgtgggctatgatggatgaatggccagtgatgattgctcaagaacataccatttttgggatgaattgttgtgggctgtttttctatgtctatttttttactgcataaggacagacttgttcttatatagttgtttgcaaaatatttagggtattttgggtccaatgggatggatgaattgatgtgggctatgatggttgaattattttgggggaaatgtgagttttggtatgtgacctgtgttttttatggctgtttttatatggctgtttttttttgcatgacagaccctctacacttgttcttatatggttgtttgcaaaatttttgggatattttgggtctaatgggatggatgaattggtgtgggctgtgatggttgacttattttgggggaaatgtgaattttggtatgtgacctgtgttttttatggctatttttatatgactgttttttttttcataagaacagaccctctagacttgttcttatatagttctttgcaaaatttttgggatattttgggtccaatgggatggatgaattgatgtcggctgtgatggttgaattattatggctgtttttatatggatgtttcttttttgcatgaggatagaccatctacaattgttcttaatttcttttgggggtgggggcagttgcaaatgatggtaattgatgcataatttcttagcaaaactgaggccaaacttattatatgtcatgacttttgtttttttaggtacaaaaaataatatatatgtgacttgtgtagtatgggctgttttgggtgattttgagggaaatgggatggatatgcatagaaatctgttatcaaatgaagttactgaaattatggcatttaggagaatacgaagtgtcccagttgccaaatctggtttggtcgggttactgcctgcacggtactgaccaagacaaattggtaaacagaacatttcattcaaatacaacatttctagaaatctgttatcgttaccaatatcctagattgctttcaaggtcatttctttaggaaaccccattcccataaattcagtatccaaagatggttgttgtatctatgggaataagggttccctaacgaaatgatcttggacgcaatctaggagtttgctgataataacgttagggatcttggataggaaaggttttggttgcctgtgtattctatctgcgtccgcctcgtcagcagatatgtagcatccatgttccttagggccggaccagacgggatctcgacctggacatccatatcccactagaacttgctaccgttgccactatcttatggtagtgacattgatagcaagttcgagtgggatactgatgtcgaggtcgagttttcggctgctccggccttattgagcatggatgctatggttccgtcgacgaggcgaacacaggtaggagatagaggtatatcaaaccatcagagaatgtgtgtagatgcaattttgtgtttaaaaagtactttctccccgtacaacagtgacataggacatgttgtagcaaggcgaaccaatgtcgacgaccactactgggactacttcgagccggaatcctaggacccagaataagattcctaaggaagtctacaccataacagaggtggatgatgtttgatatccgacggctccgacgaaagctgtcaaaaagttccctacgatatgcggagtcctagggaggcgaaacttcactattctgaaggaccacatcgatctggtccctcaagaagaagaagaagaggcctggaggcagttcaaggaaagcttccgataccctacagaggccgaggcaggactcaagcggcagactatccgcaagatggggaattgttggaaaaatttcaagacaacgttggtcatggagtacgtcctcaaccccgcccagccaaaaccatttgggaaatacccattcatcacccgacccatgtgggatgagttccatgcctccaaatcaacgaaagagtctcgggcaaaaagccaggcctaccgtgatctgcaggcaaggaaccttcacccgcaccggcttggcaccggaggctacgcggggaaacagtctgaataggacaaggaggatgaagctgcagcggaatctaacaccccgcaagtgcttgctgatatcccggtccagcgggcaaggaactgggcaagggcatgggtgaagaagaatagtgacgaaactctttcgttcccaaatcccgaagatcaagcggtgtaccagaaaattgtaagttgaacacatagaataagtttcattatgttgtatcgtattcttcgtttaacgcgtcctaactgtaccgcaggtcgaactgaatgctgagagacaggcctcccaagaggtctgctcacaaaaacgcgaggatgacatcttcacgaaagcgttgggaaacgaagaacaccgtggacgaacaaggggcattggctccaatgttccatgaaagtttgggtttccccaatacgtgtggcagtacaagaagcacaagctttccaaggcgtagaaagctgcacgcattaaggcccaacttcgggaggagcttaaagaagagcttagagaagagctcactgccgagctgttaggtatggaggctcggatggaggcacgcatcagggataggtcgaccgatgccactcccggtcccatagtacaagtgagccccacgcagaggcgtagcagctgcacatcaactgaggctcctgcagaacagcttgaaggccctgccgcggtggtccacataatggtaaaaacaacttaataacgcatatactgtattagcaccacaatacattgcaacatatactaaggacactaatgaatctatcgcaggaacccacatcgtgtaccctagtcattaggatgacaccaggatttgcaattcctgccgcagagggtcaagcattcaagcctaccccggagacctgagtgcatggggcgcagctgctagccagcaatgccgaagttcaggtggacttagtgaagcccaattgggttggctacactatcccacacccacctaatgatgagattctgacccttggggctgcacgtgggacctttattcaatggcccaagcacaacattgagatcaatataactccaagcaagagggcgaaatcttctccacccaagcttgacacacgcagaaaagctgctggaacggggagaggaaaagtaaaggtgccattagccccaaataagcttgatcttggcaaggcgtcaggagctcctccaaagcctccagccgaattcacattgggcatgccattggtcggagacgatgccttattctagatgggcctttcatgcaaggagttgcatgggtactacatggagaagtccaacgcaaggaggaataatagagagacctccatggtaggccagcacggtggtcagccgttcctcaggcctactgccttcatcgccgtagacttcaaagatctatgagacctctatagggtgcgagcgatcgataccaacctccttaagtgctactccttgtaagtatttcttggtacgcgatatggtagtgactgtccataaattacacttaccgtgactcttgtcttgctcgtaggttaacctggaagcatgtccatcgtaaagcaccccatgttgccttactcgatccagctgtcatcaatgagacaacgctgaaaaacgatcgagcaaacatagtgggctatatcaaggactgcttatttgcccatcaagacaaggacttcactatgtgtgcctacaatcaacagtaagcgtgtaccgtacttatactcaaatactcgacgcgtacaactgtagtatgtaactggcaatttaataatttcgcaggcaatattggattcttctggtaataacgccgaagtggagtttgatacactagcttaactccaatatcaagccagaaatatacgattggtcggccatcgaatctaccttgaatgaggcatgggaccaatacgtggcaagaggcgggaggcataaggatgggcatcccaaactcggtcacaagaaagacttcccaatacgccaacaagttggcgaccagtgcgggtttcatgtctgccataacatgaggagctttgcagacaaagtgacattgctcgaccctgaggtgtgtaattcaattgtttatacacacataggatgacaaatttacaagtatgtagactaacttggcgctgaacattcaggaatttatttcaaggatttcggaaatcaacatcgaaatcattagagaggagatagcacaattcatactagatgatatcttgtcaccgaaagggatgtttagagtgaagtcctaggtagctcgtctcggaatggcagaacatttgcaatgcatatgcgacaaacatttgatttttgtaaatattctttgtaatacgattatattctttagagtaatgtcctaggtagctcgtctctgtatatacttgcatttctacttacatataaaattgttccaatttataacttagttttgcaggttttgatgcatgtcggcggtttggagagaaaaatggatgtgaatgacatatatatgtgaatgggttgtggatgtgaatgtatatgtgtttgattttgtgaattggctatgctgtgatggaatatgaatgtgaattggctgatgtgatgctgggaatggatctatatgaattggctgtgaattggctgtgatggtatatgtgaattgatgctgggaatggggttgctgggaatgggactatgtatatatatgcttctgtcatttttgcagcgggcatggctagcaaaggcctgaggctagccaaaaagacaaattttatttattttttggttctaaactcatccctgacgggcatttagctaatgcccgaaagagataactcatccgtgacgggctatagagtcaagcctgttagagattagtcatccgtgacgggcttttagaatacacccgatagagataagtcatccgaaccgggactagtttgactcaacacgtagggtcaaacctatcggtgacgagctctggctaaatgcccgatggagatgactacttatccgtgacgggcttagtggtgtgcccgattgagattagttatccatgacgggttcctaactatggtggtttgactggtcatactcatctatgacgggcttggttgtcagcccgattgagatagcatccatccgtgacgggctttagcccgattgagatattttctcacatcagtgacctgtgcccactgacgggggccttacccgatagtgatgaggctttcagcccgttagagataagcgatcccgttctagtgaggttggatttccttacgtttccctcgtttgaacttacaaatgtacaacccaactcgtatgcaatatataaacttgaaatacaaaagttgtctcgttcagttttttgttccatttataatttgctgtctttgtgagttcacacatatatgtttatacttaaacattgttatccttttatgcttataatacttggggtttccgttagcccgtagtaccaaatgcctagtggcactactacaaaaaaagctcatagagatcggcactgtaggtgccggaccagctaaaaccggcacctataatgcttttccctcctctatagactgaaaatacataaaaccgacacctttaaacaacaataggtgcccgttctaaagaagaacctacacctataatataagtgccagttttctttaatataatataggtgccggttttttaaagaaaaccgacacctataccataggtatcggttcttctttagaaccaacacctataataagttataggtttcgacttatttaaaaaaaaggcacctttctaaaccaagccgagccgagccgagccaatccatgccgacgccctatatgagtcaaacttatcggcctcatctctatctccctctctctcgccttctctcgcctcctctcttggttctcgtctctctctcgtcttctctctgcggcgggcgacgggcttcggcggcggcgtgatggaaggcggcgggcaacggccggcggcgtgatgggaggcggcgggcggtggcagcgccctcccctccacaggatctagccagaggggaggcggcgggcggcggcgtgatgggaggcaccgggcgatggccggcagcggcgccctcccctccgccggatctggcgggagggaggcggcgggcagcggcagcgcccttccctccaccggatctggccggaggggaggcggcgggcggcggcacaagaggggcccaccggcggccagcccctcttcctccctcatctcttctttgtagatttttgattagatgttttgatcaattttggtgacggtttgtgaatgattatatgtgatgtcaatcaattttggtgacgatttgtggataatttggggatttgggtttgggcacatggctacggtgctcagtgagttcggctcgattcgagccggctcttttttttttctcgagcaaagctaaaggtgccggtttatattattggtgccgaccaataggtgccggttggaaaaccggtacttatagtcgattcccaaccggccccaataaccctttttgtagtagtgtggacaacactttaaattgccggggagcaatgaactacctccggcgaaaactcacacgagagcatgcacacaagaaataaattttgaggattattaacacacaacgggatatgatgacaaacaccagccacgcacactttttcttattgcaattcacacacttggtgacaaccaagtgatacacggcggcttaaggttgcgttcgtttgtgccggttgagagtttatccctccggcataaaaaacggaacagcttattagcacataattaattaaggattagctaaaattaacttaaaaaatggattaatatgattttttaaacaactttcctatataatgttttttttacaaaaagcaaaacgtttattagtttgaaaagcgtgtacgtggaaaacgaaggagaggggttggaaacaaagggtgccgaacaaagcctaagtagcctcgtgtacatgcattctgcagcttcaacgacttggctaactcatacgaatgcatcagccatcctcgcaagtcatgctacgtgctccactcatatatatgcatgcagctacggattctactgcaccacttgctgatcctatatataatctagctataacagcctgagacttactcctactaacacatacagcacacgcacgtgcagttactaattgagccatctacacttgcacgctagtccagtacatgacatacatgaatcctattagatgtctaatacgtgaacacccataacatatatctagctaacataaaccttgtcaagattagtgctaacagatcatggacactatggactggggcatggtgtatatgtggtgtactcgaatcttagacgatggtcctatcttgttcaaccttggcttctagttttctcctttacaagtttgaattcatgtgagcttagtagtgatgctgctcacgcctgtttgtgttggaaacacgctcgcaggcctgtgtttttcctgcttcgtcgtgccgtgctcgtcgatcgtgacctgaacgtctgtgggacggcacggatagtgatgaccatgacacgtgtttagggtggcttgaccacatcatgataatgtgtttcggatttgtaagcatgcagcgagagaatctcggagaagagcgctgcgaattgtntttttgggggggcaaggccaccaaccccaaaacctttttggaatttgatttgggtttccggggttttcccccccccattttggagtttcacgtgtgtgttgaattcgaccaggagagctgatttaatacaacttggaagagatcgagctttccgcggttcaagttgcgccgatatgttagcgttggagaaggatgcatagaatgcatacaaaatcttgtaaaatcgagaaacttggaggaatggatgctatttttttcaattgagaatgttccattgaatcaaatccatgtctaatttcctgcaaaacacactaccaattttcatccaagtgcacaaactgggatcgctggggtagaaaatgtttaagcagactatccgtatccctgtctccatggctgtatgcttgagctttggaagccctactaaacccatgatgcatccacatggaaaaaccagcccttatatatctgaataagaatcatgtctgaactctgacgagaggatcgatgatgaaaaaagaagtacataagtaaccacgtacgcgaaaatttaattcatgattcagccatgtctctgtggaaggcaacaactagctagctagctgcactctcagtccaagggcttgggcccaaccacctccatcgtcgcacaaataatccatggctgcctgacacagtgagcccagggccctagcccgaagcccagggtcgtcagacattggctccgacgcttgctagagtaacgtaagaggtaggcagatcatgcagtatgtttcttttccaatgccatccattctcaagtaaactgatgtaacagtgttgctgtagtacgtgtatatgttacaaacacgaacagtgctaaatagaaagcattacctatcacttgccagggatagatctagagtctggacagacgtacgacaggaggaaaatcacttacttggatgggatgatagtttgcttcctgcaaaggatgaagtagatggatagaaaggatgaagtagatggatagaaaaagcttatgaatacgagagtggaagtagccacgggacatataagaagaatcaatactcggttggtggttgtagtaagtatactcccttcagactgataatacttgtcattttagataagggtgaggtcaaactttacaatctttgattatgaatcatttttaaaatatttatctttcatatatggtgattacatgtatagattagtcttaaaaagtactttaataaaatcatatattttttaacattcttatacatattataatgaaaaataatggtcaaagttgtttttttgagaccatgctcttgtccaaaatgacaagaattatcaacccggagggagtactttcttaactttgaagaaagcacggctagaaaagcaaatttccagacgatgacatttttttcaggtaggtaggcctctccgagctaaatgaccacctgcgaaaatgacaaccgtgaggtgaaatcgttgtccacctgcaaaaatacacttaagttgatcagaagttgataactatatataccatgtaggccatataaaggaaactgaacgagatggtctttgtttttttttaacgaatcgcactagagagtgtaaagttctactgatagagtaggaaaaaataacaaaattacaacccttgaagatggtaaccaggaaaaagaaaaaaaaagtatactaccactcacacacccacaacgccaacacatagactcaggagaaggctagcatcagaccagccaccgctaagtgtaaccgacagccactaagccgtacaacggaacacagccgacatcgcccaaaacccgaccattacaactgacacaaaacacagctctatctaaatctttgggattgagggtgagagggtgagagagaagaatgcagccattctccccctaagccctccaacgtggccaacttgcggaagctaggatgccgacataagagaatatgaattagagagagcttgcaccaattgcttgggagattttggcaagggggtgcctacacggcatctctaacgagaggagcgatggatacaccgccgccgttgtccgtcaaggcctcaagagggccaagactgggttttcacccgatagccccactggaggtgaaggggcggcacgacaacgccctcaagaagggtaaagacgttcgaaaatgccgtcgttgctagcccggccaaggccaaggccgggctaggtttttacccgtcgcctaccgcctgcgagtctacaaatgatgccccgttgctccaccaccgtcaagcctccacaggcgcgtgggcttcactgcaccggctctccccaccggttagcctttgcgtgccgcgccagcctccaccacctgccgaccgcgcctcgacgtgctgcgccggcctccgttgccaccggtggcatctcctcgcgccgtgtcggcctccatcgccatcgtccgcgcctcctcgcgccgtgtcagcctccggccttgctccgcagccatcaaactgctcacgccgtcgctgtcgcccacaacccaccatgcccgcatgcggccgtcgctctccttcttccccattgccggtcacctccttcctcgcctcctctctggctatcgccgtcgtcgacacgccagtccaccgcatcctcctcccgtgcgccggccgtgtcccatctccctgcatgccagcgcagctccagccggcttcgcgcccgccgctgctagcagccaccgtcgctgccgccagcaccactggtcgccgccaccaaaaccactcaagcccggctgccatcgccagccgccatccccgccagatccgaccggcgcagcgcggatctggtcggggtgctctgccgccgccgctgccaccactcagcccaaccgccagcctccaccccacgagatccggccagaatggcgcggatctggacggttgccaccaccgccgccccgagcaattgccccgaccaccggacgcacgctgggcgcagccccgccgccgccgtccttgcggccacgcggctttgcctacgcccgctcaggcggcggcgaggcagagaaggaagaagggggaggagggagttggcggtggcgtcacctctcgtgttgcccatgtggagagcgacacgagatcttatggtctttctattacatccacaaatgttttcttttcaagtaatgttaattactgatctttcctccaatttttttttcactcactaacatatatatgcacgtagaatatgtagtttatacttgtagcacatattattagtgattttctcttaccactttgtttcttttttgtcaccaagagatcatctctaaagctttgtggtctgtatggagtcgtcaagtaccttcattttgagaagatactaatcatttctcatgtttactagtcccaaaaaaaaaagtacgatcgttacggcagatcggaattgtatcactgtttgcatgcacagttgcccttcactcgcaagctcgtaagagaatcccagcgcattcttgtcatcaacgcatgcccaagttagggacttggctatctaccagcttcggggacaaaattgtactgccagctacacactgagccaaattcagtcactgagatcaagagagaggtccacgatatttcatccttttgccttaattccaactcaatgagctcagtgtcccgactcccgagccaccgcccgggatcgccagctggtggttctgctggtgcatgaactgtcatgcatcctaaagtgaacatccagtcctcttcttctccaatgctacccgttcttaaaatgaaatcttttagcaagctctttacaaggtacatgtttcagaactaaaaaattacatgtaaatagcatgagttgttttatatggcagactgatatatatgagttgatttttttttttttgcacgcgagagcatgtacccacagttacaccatgtatatatacaccttgcacgaatcctagggcagttacattaaggtgctaacaaaatatacctcgcatgatgtttcctttatactatattttttcaaatgtaaaacatcttgtttatgtgttttttttatttcttgtattttatatggttgccctattaattttatatgtttaattgcttgagatgtttttccttaatatgtttgatgaactgtaaaacatggtagcatatatatatcatttcgggagtatcatttttgtaagatgttaacctggtgaaaaatatattatgcaatttttcatgcgacgcttctgttgtatatatatgattcgtacctgggacccatctgtcgacgtgtaacatcctttctgtatgaaaataatattattctgatgtctcactataaaaaacaggtaattcatatttggcattgtagatataacttcaaatgaaaaaaaaagcattaactataatgttgtagatattgccgggcagtccaaatttcatatatagcttttccccatacgacgtcatttgaaaattttaaacattcttccgtggaaatagatcccaacactttgaacatctaaataaaaaaaatacatggttcaatctttcgttttcggtatttgtattaggggtgccgatatggtgatatttccgaaattttggtccgaaatttcaaacaaaatttagttaaatttaaacaaatattgctaaaattcatgagaattttttttaaaaaataaaatcgtatcggtgggggtggggtccgatatgaccaaatcttttgaaatttcgttcggaaattttgaaccctgacacaaatggatccaaggaagttgtagaactcgtcgaactctacgattttgccataaagtttttcataaaaggaaaaaactatcatttgaatatgtcggccttttccaatattcaatggataggtccgaactgtccggtcaattgagtataaatgctggttcatgttatgaagaaccagtgatgcttgtttcctatcactgccgatttataacaagaacaactagcagtgatacaatagtaatggttcataacaagaaccaagagtgatattcaagtatcactgctggttcagagtagtatcagtgactgttctaaggaaccaacaatcatgggccggtttgatttatttgaaatgataaagtatgtcctagaaagaaaactaaactggaagatggaatctgtcaacaaatttattttctcgatatacaggagaactacatagatgcattaagaattgtcagtaaaatacaatagctgcttttacttcctgcctactatacttttatggtggtgtttactagtagtagaaatgattgacaattgatctctcttttatttagtaaaccatatcaatttaataacaaatattatagtgaacaggatatagttgtgcaataaagcaagagcctcataaccaatgccacgaatcgtttctacttgcggtaaagaccattataaaagtggccataatggaatacatatggattcaaaatagaaatcaacatatttttcttttatagtcatactgacaacctacttaaagtcgagctattgacgaacccgtattcttcatggagagctcatgtgaataattaaccaaaatgtatatatggggtgtgtctgcaaattttcaactgccgatcgttactgcgtggctcttgtggcagccatcacatacagagcacaattcaaaaaagcacacccttaaacaaagttatgcttatttgccatatgcagaactcacgcaaattaaaccttatccagtattgtgctcatgctcggacgcaggcacctccactccatggatttgatcatcgctctgatactggcttcagtactagtgcacataatgacctgaaagtacataatgacttgaagggtgcattatgctcctttcccgatgccacacattctgaaatgatgattcaactcgatccatcaggtaagggcaagtgctataatagatgtgactaccacctctaaatttatctattttattcactcataaaataagagacaacctatacaatgtatcacctctagtactaaaaataccaatatatctaatactctcacactcttcttgaaatttgtgtagaggttacctcttgatttaggggtggctcatcatctctctcctcacttctctcctccatctcatcattcaatccaatgtgacactcttagaggcaatatatgaagtattatattacttgccctagctagctgagcaaaggagcaggaagcggcggtgcgcgcgtgcatccaagacgcaaagcaggcgctgcaccggcccccttgacatagcagctgcactgtgaatctctgctactttaaaagccagcggtgatggtagtgtctgcctccaccacttatagtttaatataatatatgttagtacaacaaattagaatgaaagaaatgagagaataggatagtagtataatatggataattttgatccattcttcgtgtatattataatatacgctttacaatatataattaagttatctttctttaacttacgtacgattgcaaggtatggacatttaattagctagtttgaataaatgtcaatatctacagttttttcactggcttattgctaagtgctaagtttcttttagataatggataatatctgagctttactttaacggaagctacaaccacatatatagttcttagctgaaaaccaagtataataatttttaataaaggataaagaaacgatacaataataaatgccacggtaaaaaaagagagacacttattcaagaacaatcctattgttaaatctccatccaaagttaacaaaaatttgcatagcggttgtctccaattttcgacatacagcgtgaataaccaccaatgtcctcttcacacctttgtagttgggtcaaaaccgaaccagtatagtgctctgatgagtacatgcatataaactttagttggtattttattaaaaaccatatcattcctatttaaccatatagccaacataaaaggcagatgctctaattgaaatatgttttttggtctttgagtaaatcccaatcagccaattataaaacatatgagtattgtaaaccaaattaaaagacataaaaatggttctaaaaaaattagccatttgacaatcaaagaatagatgttggacataaaaaacaacatctagtactaccattctaatttcttcttactaaattatcattgattaattagaactaccctttagctagataacacatgaaaatcttaagtttgataggaatcttcaatttccgtaacactttattcctatcaatatacccactgttgatcatagcaagatacatggatcaaacagaaaagataccattttgatgaaggttccacctaaacatatatttattatcattaaggttaatacgtacaattcgagcaacaaaattttgccaattaactatattctggcccactagttccctatggaaagaaacattcaaaggaactgtattcatgatagttgcaactgacgcacttttccgacgcacaatattatataaagatagataccaccctttaaaagaagagtttccaatccacttgtcctcccaaaatctacattgaggacaaaagattcaaaacctagaaatttatttttaacttttattagacccggctagaaatgagagtcacctgtttttttaaccacttgagtaattgtctaattatgtagttatttccttcagagcatttactgccaaacaccatcctcattaatcaatttagacaagcatttactaagaaaatattgtaccttttgctcttgttttgtgggtgcagaactgcatagtatttgaagaccaaatttagccatggtccagtggtagatagtgatattttttgaatgcttgcttcttcttatgcatgtttacaaatgggttgttaaatattgacttgttgagtctaattactaaactataatatcaatatcaatgccattaaagataactcattttaaatttgcaagcatggccatgggccatttggccacacctcattatcttttcgtcatctgtctctggtttcatgtgatggatgaactagatgacctatcatagaagacctatctacgaagtatataaatagggtgaggttatgcgagattgaaaaatattatggcaatctaggtcttcggagaattaaagctaaaaggaagagatggcatttgtgtcctaagatacaatgaatgtttttttaataccttgcctctaaaaactgtgttgcaatgtatgaaataagtaaatagatcgtggatcaatatttatggatgagaatcttacatttaggagaggtaaagggatcttcttaaacaaagggaagacgcggggcggggagcggacatagtaggtgcactagtattattatctagtactctcttaaccaactatgaaagctaaaacagaggttgacactcccatcattcacaaatgaaaggaaattaagtgcatgtttaaaagtaaagatgattgctatctctaatttagtgtacatcatctacttatccaataaaaggtaacatatacaatagactacctctaatacacaagctccaaaatataataaatcttcatttattcatttccatctaatccactactatgttgattttaactcttttggagttatatacaggttggcgctcctttttcctctcctcccttctcttctccaccaggggcggatccatcatgttagctatggtgtcagctgacaccaataccttttggtccatcccatcactacaagataattgagctattccccccaaattattacaacaaaaaataattcgtagcaatatattatactattgcaatgataatttttctgtggcaaataattatatttttttgcaacaatctacaatcgttgttttatttagtatttttgttgcaataaaaaatgagatatcgccacaaaaagtcttactgttgcaaaaaaaaacatgttctatcgccacaattttaatttttgtggcaatttacatagtacatggtacttttcactattttttgttgccacgatcaacaaattcgttgcaataaaaaaattatcgtctcataatttaacttatttttttcatatggacacaaattgagacaaattttatatgggaattatagctgtcgatgagatctacaattttataggtgacaacattttcatttgaaatcttttagatatttaaatctatgattcaaatctcagttaggtaaggttcaaatggaacgatatgtattttccaaaagaattgatgcgtgtgtgagttggtaaaggaaagcacgcgtgaagaatagatcttgggttcgaatcctagccaagacacaatatcaaaaaaataaatagataggatgataaattaatatttgaacctttaatttggtacgtagaactaatgccaaatatggagtggtggcaatagcttttattataacgatgtgaagtgttgcaatatgattttttgttacatccattccgtggcaacatcgaaatttattaccactaaataaaaatcgttgcaataacctattaccacgctatttattacaacggctagcaacaattttaaaattgtggtaacatatatctattgccataattttagtattgataccatgatttttttcgtggtaacaaataatttttctagtagtgcatgtaacctgttctagtctacgatgagtgacaccagtgcaccttaccaattaacgccatactcacacgaaaacagcagtaaccactaattgagcaccatttgttctgcccataaattacccttactaatttagttggccacatgcccacatcggcaggcggccgcagctagcagttctactgtttgcaactgccagccaaggccctgagcttctaattttcttccatgcatcaggttcagtaaaacaaattagtggcggtgctattatttacatgtgtatctaataaatttagttcatagtagtataatttaatttcaccaattggacatgcggtatatatagaaactgttgttgaaaatatttttttaaacatggtatttagatataaat

SEQ ID NO: 9236 - DNA, 70247 bp, Oryza sativa
ttctccatgcctgcgccgcctggagcagcatctcagagacgtccagcgtcggctcgcccaccgatcgccgccctgatacaatcaccacactgaacacacaaagaggaccaaattaacagtcacgcatcccaggcattcgacgaaacccaagcagaggacgtgacgaacagaaacagagggcgttctcctaccatcctccgccgcgccaccgccgacggccaccgcgttcctccccgtccccgtccccgccgcgtccgctgtcctcgtcggcgccaccaccgcgcccgcgcgctccgcacctcgtccgcctccaccatgagccgtccacgtcccttcctccccgcctcgcccccgcattctatcacccccctcgcctctcccacccgcagcagccacgggacgacggggacagcgagacggaagcgcggccgcgcccgcgcgagcgtcgccgcccccgccccactccgcccacccgcttctcggcggctcgctccgccgcgcggcggcggcgatcaacgcctcccagcgatccatcccccgccgccacccgccctgcaaatcaccccaccaccaccaccaccaccaccacgcccaaaaaacccgcaccaaattagctgttacacacatcatccaacacgccatcacatcacaacacgacgaaccgaagcagcgaacacgaagaacaacacagaggcgaggcgtacggactcacctcctcgtcgtccagacaccggcggcgagagagcgcgcggcgaggccgaggcggcgagccggcgagcacggcgacgcagttggggtttttgcgcgagcagcgagagagagagagagagagagagacagagttggtggggccgagaagagaaggatgggtgatgattggtgaggcgaggacacgtggcgggcggacgccgcacctgaggctgaaggattgactcgggtccgactgtccgagaccaaactggtccggctcggtcgcggtgcacgtggctgacccaacgacgggtgggttgtgtgtttgcttgcaacccgcctggcgcctcctgcaggtggttcgctagcttctcgttttatactggtgaggtttgtactgtaggagtatttactgcggcgtaaatttttactggactggttagtgggacgttattgctgtaatgatattgttctacgatggttgatgctgaaacgactgctgctactcctgccgtttcattttgggcctattcattttaatgtcattttttattttatcaaattttagtaaagttgctaaaaaaagtggctatatttagtttgctgctaaattttagtaactatataagaaatcctaccaaaattttagcaaaatttgataaggttttttttttcatcagagtgaacaggcacttcatgatatcattagtcgtttagtggaagaaagcgaggagggagacgtgccactggagcccactatttttttttagattgagttagaatatctggggtgtataatatctattttatatagtttatgagtgtatttaatttctaacggtggcaaaagtttagaggggttaattcaaactttttcctagttcttactggggtaaaaacgagatgggcattttccaaccgcccatgtgactcgaggctcgtaggaagaatacaggacataaaatggatattcaatattatccgaattagaatccgaatccgtgaaaagatatgcttgtatttcccatgttattaaacacatatggaaatatattataagtccacctacaaggctacaaacatgataaaatattgattaatcactattttacaagatcataggtaatattgtatatttttttcttaatttatctcttttaatactttaattgtccatctatatttaatatgcatgaattgcacatagaaatagatttccgtgtatgaatctgattccgaggaaataatatgagataggatacgggatgagtgatatgttatctaatctaacactatatctgtacatggttttaaattaaaggaaaaatataggttaggataaaaaatgccgtgatccaaccctacatgaccccattttaccctagttcttaccatggaataattcagtcacgacgggtttacttgactccaattttccacacgctggatcaagccgtccacagttcagaactgagaacacaaaccacatggggtcatctagcacggaacgaggcaggcaatctacctgtactccttgaaggtacacatgccagaaacggtaagggtactcactgaagtttcccgggaaacaggaagaaagagggcaaagcttatcttttgcaacggaatcatatgtccactactaccaagaagggtttcctaggcggctagaatttcttttcacgcacaactacgaaaaacatattttgtagcaaccaaaataggttattgttggcagtcataagctccgccacataccaagggtccatacgggtggtagagcatccgtgcgcgaatttcttttcataaatggttagggcatccacccgaaactagatgttggtaaaaattagtaggatttatatatacggctccacaaccatatgtaaaaacttgattttcttcatccagagagagatatggtttgtttgttatggaaggatagtggtttcccaccaatttagctttgatggtttacttgactccaaatttccataccgtgtgtcaagccatcaaacaatcatatatagcacaaatcacatggactgtttggtcatcttgcacaaaatgaggcaagcatcctacctgcacctctagaaagtagtaccagtagaaaacggatacatgcccaaaacggcatccattattccattaagttccccggaaaacacgaagaaagagagggtaagcatatcttttgcaacggaatcgatcgaggtcgaggtgtcttaattattggaaaccatatgccaatatcttgccatcatgtatgtatttatgtgtagtggtgtgatgatatatatatatcgattgatctacttaaaagaaaacgagaaatgtgaaaattataaaccacaagcaacctagtgctttactggttgcacctacctacccttcgataaaaaatggaaaactattaattggtatagctaggttgtacattgcacgaaggaaaattttggtttgtgctaagagtcggaaaactgtctaagtctatactttgatctatgtaggctaggagaaattgttaggtctaaatgttagtacgtactgcttttctatgttccggctatcaatgcgtcaggcgcggcagtggcgacggcgatgacgggagctcgggcggcagtggggctagggtttttcttttggaattttatatttttgtgatttttttctttttacatgcggtcggcttaagcgcccgctggttgtgctagctgcatgcaaaaataccgattttcacataccttttcacgcatgtggctgcagcaaccgcatgcaaaaatcagtttcacccgtatgcaaaaacgtgttatgtagtagtgatggtttacctagtggaacatacaaaataaaaacacacccccacaatatttcgcaaatggtggtataaaatagggagagaaaaatacatatttttagcaaagtcaatttagccttatggttatcaactactacctccatcccaaaatatttgacgccgttgacttttttaaaaatgtttgaccgttcgtcttattcaaaaaatttaagtaattgttaattctttttctatcatttgatttattgttaaatatacttttatgtatacatataattttacacatatcgcaaaagtttttgaataaaacgaacggtcaaacatattttaaaaagtcaacggtgtcaaacatttaaggaatgagggagtatatcataaatatactgataattttactagagttaccaactatatcataaatataaagataacaaattcagtaagacatcaccctgcaaaattctaagcaatagatactgaccataacatgctcatgaagaaactggctatcagtatcatcggctcctgcctcctgggtgcactgcaactatgcagcacgcagatccgtggtgaactgggtcaagcaagcaaggcaggattctaatgctcaagtgaagatagaaatatgtacaacgccgcagaagtagatctagcactgagagagtaacaatgatcaatcaaaattggagcaataatcaaaacacatctggaaggatttgtggtgttgcatccaaagccaagcagccagctgaaacaccatggccaaagacgactggccatgcatatgctaatgtttggtattggagctgatctaatacactgtataatttaaataattatgtgattagtgggttggtataaaacataagctagtttgttgggcgaggcattggctccgcctctggggtttagctagcaagatagtaacacagaatgtcctttttattactatacggaagaaaatagtggtactggttctgtttggtaatgctgcattacagatgtagccggctgcgctgcacagccggagctacacattttttaccgtgtaatgtagctgctgcagtctaaacaagtactctactatattttgcaatgtaaattcactactacaaaacatcaaatagatatcggtactataggtgccggaagtgctaaaaccggtacctataggtctttttccactttcgcaggttgaaatcgcaaaaaaaaacgatacctttaagcaattataggtaccggttctaaataagaaccgacacctattctataggtgcccccttttttttaaaaaaaatggtacctttaatatattatagatatcggttaattaaaagctgacacccacagaaatcgagccgagccggcaggccccaccacgacgagataaggccgaggggataagaggttcgctcgcttctcgatctctctcttgcccctctctctctcactctctcgctcgctcgctctcgccccctcctccttctccccacatacggtgtcggcggtggtggcttctctcccacgacagatgcggcggtgggcgaggcggcctcgacggcggccggggtggcaacggcgggtggagccgcagtcgaggtcggcgtcggcggcagaggcttctcccaaggacggagtggtggcggcggtggcggctcccacgacggatctagcctcaacggtagccggggccgcatccggggtcggcgtcggcggcggaggtttctcccgcgggtggagcggtggcggcggcggctcccgcgacgaatccggcgacgtatcggcaacggtgatttgtactataaatttgattttgtttctatgaaattgttgagggatctgtgatttgagcttctttcacatgtgatttgtgtgaaacttttatgatttgtgctttgagggatctatcattggatggatcaaagatggtgctttgagggatatgtcttggatggatcgatggtgacagtgtgtgaaacttctgtgatttgctttggatcgatggggtctcgaggtgatggggaacggctcgatgcatcgagacccccccccccttttttttggattcttgggaccaaaaaggtgccggttcctaaaccggcacatttgaatattgttggatagtagaagagagagatatactgtgaatattagacacgttgtattgagcctcagggggccggtatatataggagtacaaggggaggagataaggaaggaatccacacatatcaatcctatcctaatatgactctaactaccatatactctaacatccccccgtagtccatgcgtgagcaaagcggacacttggattggagaagaaaccagcaagagtgctcaagacgaatgattgccctttgtgccatgtcgatgtagccaaagcgaaggatgcgaaggacccgtgggcgacgaagccgtgcgtaaagtagccatggtcgatgtagccgaagtcgggaagctgatgtcgaggtacccaagccgcagagcgcgcatggggcgccgtagagtggtcgtggacgcacaggagggcgtcatggaccaaggtgcgtgaggatgcactggagacgatgacggtgacccgatcgcggcagtcattgaggaagatgatgccaaagagccgatgtagtcgaactgtaaagaagagatgtcacgccgggtttgccagactcgggaacaactcgggacaaacacgcgcaacagtgttgccaatatcgtgccggcaaggcaagggaccaccgtgaatcatacgcaaatgtcggaggagactagcaaataatgcctccgggacagtcgtggcgtgagaatgacgtagagggagaattccggagcagcgcgcagttgctgaagaagagcgaagtgtagtcaagaaagatacgacgacgctggcgatgaaacatgctggacgaagaagaaggcaaagtaggaccaacggcctggacagcgacatcggtagctatgtagaggtagctagaccactggcctagaacggcgacagtggcagcttggagacacggcggcgatgctcgaagtagacaaagaagactcgagtggctgacgatgaccagtgcggatgacgaggttgtcgatgcacgaacgacgatgaagacgacgagacgggcgacactatgacccgaaggggtgatacaggtgtagctccatgttgatgcagcgacgtgaaatccagcggcggtgaggccacagtgaggaggacgtctctccgtggaccacaggcggcaacactgcggcccgagagggcgacgcagcggcaacccaaagcttgatggcgtagtagatatgctcgcagacgatcagttgcagaagtcatcatgtatgtgtgcttgatcaggtgatcagaccgaagttgcacacaacggaacaatgaagtcgaagccgaagttgatgccgatgtcggagacacgtagatgttaacgaggcggtaggcgacacaaacctgatctctggtcgggagaaagaagaaagatacaagcaacaacacagtagcagcagtccacaccacaccacagccctccaacgcaactcatgcaggtctggtcaccatgacgtcaacgaagtcaacaagcctagatatctccacaccaatcagtctctctcctctcacttggcagcaacgcacgagatcacagcagagacgatggctagtcaacagggtcaaaaggaggcactgcagaaagtggtcacagggcgctcggccaacgactgtccagccagagatgctgacggagggcgtcggcgcagcaagacggaggcggtgcggaaggagtccggcggccgggtggagaggtcgacggggtggtgccggcagagcgcgccaggccgggggcggtcggggctcggcgacgccggccgtgcacctcgacgcggtgaggaagaagcgaccgtccacccggcggcggcggggatggctcgatgacgagaactcgcgacgcgacgaccggtagatccatgcgttactgcggctgatgcttgactcaaaccaccatgacgccgacgagggtcactggagaagatcgagatcgatccctcacgggcaaccaccatgacgacgaacccaaaaaaaaaaggaaaacaaaaaatggtgcccgcccccgtgagatcgaaatgctccccggggcgacgagcagaagcgcgagcggcggcgaccctacatcacccgcttggataccatattgatagtagacgagagatatactgcgaatattagacacgttaccatctttcgtcggtcgtccaaaaacataatagtcctagtttgaataggaatcgggactaaaaattattaaagattatttttagtcttagttcaaagaagttggcgggtctgagtcaggccccaattatcttttagtcctgattggtataaacaaccgggacgattggtataaacaaccgggactaaagatctatttttaataccggttgtttatatcaaccgggacaaaaataaacagccgagtcgcgtgccgatcttatcttctcggtatcccctcccctttcgttctctccttcattaagactcggtatcccgaacagatcgatcgatcagagaggcctcttccccttcctttccccttcttccaccttcccctctcctctgatccccctccccgcctcctcctcctccttcccctctccgcggcggccgggcggcggcggcggagcgagccggccgcgcggcaggcggctgtgcagcggacgggtggcggcggccatgtggcagccggtcgggcggcggcggctgagcgagctggctgcgtggcaggtggccgggcggtggcggcggcggcccacgctggatgaggccggcggtgactggcctccctaagtgtgaggccgggtaagttcaattgttaggagcgagttcagatcttggctcctgacactaaggagcttttttttttattttgtgaattgatgtgtagatttgtttgttgatttggggatgattggtggattgcggaagggcatgtatagtggatgattgtgtatgatttgtgaatggttttcttggatgatttatgtgtgtgatttttgtgtgattgtgctcgagatataaacaacaaaacaacaatgaaaaaaaaaagagaaaaaaagtaacaccaaccgagactaaagatccggttatttcaactggtccggattcatagtcccagttataaaaccgggactacagggggttaccaatcgggactacaaaaggtttcttcggtagtgtaaggaaggattacaaataggaaggaattcacacatatcaattatattctaatatgactctaactaccatatactctaaccaatattcatatatgtgccgcttctatggtgctggttgagaaaatcggtaactatgtggggttcctaaccggcactgatgtggtgtagtgattttctatatcttatggtttgatatctccctgcagtgatcaagctaggcatcaaatattgaaaccaccgtcgatatgttggtggagacgcagagtggagttataggtgcataagcataactacttatcaaatgtagttcggttgtgcctaaggctgtgcatgttcgatacattgagttgggaactaatctcttgcgcatgcaaaacacagagcgacttattagcacataattaattaagtattagctatattttttaaaaaatagattaatatgtttttaaagcaactttgctatagaaaatttttacaaaaaataaactatttagcattttgggaaacctgcgtgcggaaaacgagaaagaatagttgatattagatgacaagttttatagtcacatctaatattatccatatcatcaactaatttactaggggacattgtgaaaaggttgctttttacatgaggggtcgttcatcctctctctcctcttttctcttctctaccttatcatttaagcttatgtgttatctaggagctcgtgggctcgtgcttagatgcttatagtacttgccgatactgatagataaaaataatctcgttaatcttattttataggaaggatgtagagtattacggttggaataagatcactttgacttcctcaactgaccaccaaatctaaatcatatccctcaaccgcaatactagaaattttgaacccccaacttacaaaaccggtacaatttgactcttttggtggttttggagagtggttttgctgatgtagcgcacacgtggcagtgttgacttggtcttcgtcccacgtggcgttgacgtgacacttatgctgcattaaaattaaaaaatatatgcgaagcccaattgtcattcacacaaaaataattgtgggccccactgacatgtggttcctacatgtcatcctctctctcaccacccttctttttcctcctctctcccttatttctctctctccccttgacatgagccggcggcaggtgggggctcgagcggcggtgcggtcggagagctcggcgaggagcgcgttgacggagagcagcgcggcggtggagcccgcgatgacaccgagcacgacgcctgtggtgcccaccaccttcccgggcaccggccactcgatcttcgacatctcctgcgcgacgccgacccaccacccgctgctgatggccgcggtctcggcctccttcagctccgccgccaccgtctcggggctcttctcccctcctcctccttcccggcctcctctgcgccgtccaccaccgtcatggacgcctcctgctgctcctgctcttgccccttcttgttctcctccgctcttgcgcccttggacttggagccgcgagggcgaggcggccgcggcagctggcggcggcggagcgggagagggatagggagatcgcgggagggtagaaggtggagaaggaagcgcgcgaggcagcggcggcggcggctgggacgaggcgggcggcgtggtcgccatggcttcccggtttgatgggtccagcggcccgtccgccaccgccattcggagctctggatctaggccgtcgccaccgccgattcggacgccgctccccacgcacaaagagaaagagggagagatagagaagggaggagagggaggaggaagaagggataaagagaggatgacacgtgggacccacatgtcagcggggcctacaattatttttgtgtgaatgacaaatggacccacatatattttaaattttaatgccatgtaagcgccacgtcaatgccacgtgggacaaagaccaaatcaacgctgccacgtatatgccacatcagcaaaaccactctccaaaaccaccaagggagtcaaatcgtaccgattttgtaagttgggggttcaagatttctggtattgcggttgagggatacgatttagattcggtggtcagttgagggagtcaaagtgatcttccattacggttacggtaaatagtttatccgatccgtttgccttggtggacggcccaatacatcatcacggcctatcgaagttcggcagcccgtacgggcccatgactagcgaccacagtccgggcccacacccacaccgcccaaccaccccactcccctccccgccacgtcgccattcttcccgctcctgacctttctctacccttctcctcttctcttctcctctcctcccccaaataaccaaaccaaaccctgtataggctcgtataggccaaggcagaagcttcccaaaccctcgctctgcccgtcgatctccgtcgccttctgatccccgcgcgcgcggctgcctatatataagttgcggtgatcggcgggcggctgcaccggcatggggctggagatcatgacggacgaggctgctgctgcgccttcgcccgctgcggcggcggcgcgtgtcgagatttacccgctctgccgctactacttcggcgccagggatgttgccgctggtggcgcgggtgcggggttggagaccgccgccgaccgcgccctccgcctcaaggccaagtacgcacgcgcgcgcgcactacccgccacctgctcgatcaaatgcgtgacgatcatgtaattttgtgtgtgtggtttgattgatctgtgcagcttcgcggcgcacgggctccggaccagcgtccatggcgtcctgctggttgagctctttgatcatccgcacgtgctgctcctgcaagtcaggaactcctccttcctcctccccggtggccgcttgagaccaggggaacaaggtgctcatcaatcatcattgctgcaatttcccaagttttcccgtaaaaattttaggaatggattgaattgaacctactattgaattcttgccatgtgcaagtgtctactgccgagtaggatgtgattttctcctcgtgggagataatgctagtgcaccggtacacttgcaatttggatgacacgtgtgttgcctggtatctctgcttcagatgtccaagggctcaagcgcaaactttcaaccaagttatcggtagctggacatcaggatgacgaagacggcgacggggacgacgaatggcaggtaactggagtgaacagagatgttcagtaatgttgggagtgagaccaccagtatgatccagcaaattattcatccttttcacgttgattatcggctatagattggagagtgcattgggatgtggtggagatctgagtttgatgctgctccatttccatatctacttccaaatgcccgtgcaccaaaggtaaagagcttgacatacactccggttcatccatgaaccatgtggtttcctcaaataatattaatgtgcttataacctgagtgaatcattttattgttgcctgtcatgaaggaatgcataaaactgttcttgattaaactgccggtgtctcgccaatttgtcgtgccaaggaacatgaagctgctagctgtgcctctatcccagattcatgacaatgctcaggtcagtttggttatcaccatccaacacaagggattttaccatctttttttaagctcagctgcttcagctgactctttttttttttgcaggtatatggctcaatcatagctggaattccaaacttgttatcgaagttctccatgaacatcatcagtgactgagatgcatgccacatgccgttaagagctgtcacggctttacatgagactagcatattcgatctagtagtagaacatgttgtgtataaactgtacctggtagaaatataaactttggaattcacgagctggtgctgtcctgtatgttgtgcaatcttttttttttcttttactgtatagaggtaatgtattgtatttgtatatgttatcaacaccaggtgtggtgttatttttgtaacccttctgatatggctgtagaaatgaaacagttctgtacaagatttgtgattttcattgccagtcctgacaaaagctgaaccaagcacacctcgctgcgaggaccaaacatgtcttttcgattgcccaagcaaaagatagagatagaactaaacaaactttaaaatatgatcgttagaacagccacacccggcacaacctttcgaagaacatttgtgttgtacgatcctccatgagcgtacaaatagctttagcccaaaaggaaggctacatgtcgtgctgcagcagctcgttcactgtctgagcaaggttaggctcgctcctgatgctctcgatccatctcgcgctgatacggaccctctcgaggctctgcttcagtgcacgctcgaacgatggtttggttttaccggcgaagaactcggaaacttcagcagccttctcctctgtggtgaactgatcatgcagagaaaacggcgaatttagcagcagagcaaggagaacaatgaagcaaaaagtggtcggtgacttcgcgtacccgtgaaacagtagatttgacgaagtccgatatgagtgaacttgatggccaggtcttcaagacatgatcccagttttcctgcatcatgcacagatgggctcatggtcataaaagtacaacttactctgaactcctaatcagacttgctaaaaataacagaacttattaatgtaacttcttcgtttagctcattattactgcctctgtcccataataattgtatttataggatttgaatttgtccaaaaatagttatcacaacagaatactaatggtctcattaatcatttcttattcaaatttctctctattttaccttcaactaccctcccactcttacctatataccatttaataaggggtatcatagtctttcttcttaaaccttaatatatgctaaacaacctagaattacaattattttgggggcggaggtagtatcaaatagtgtgttatgcaggcagcatctcttctataaagtggaaaaatgtgttctattgttattcatacgctacaagcttggatttccctcgaatagcagagagctatgcagaattgtggactcgtgaatgggtttggagatttaaatctcatggaggtgatcatcgaaatttttttagataatggaataagtttcccagccattggtaagggcacaaagctcattagcagcatactcctatttggtgcaactgcataaacggcttcagttcatctgtcagaacagctttcctatgatgtactgtgtatctcagtaaaaccttttgcttttttgttttctggttggctaaaagagcaggaccaatgatatttggtaaaatagattgattgcgccagttttgggtgaagagacctaatcgtgcaaagtgtgaacagggagggaacatcattcaattgcagtaacttggatattggcacggtcggtgcaaaggaagttttgataatttcatcttccctatttcatctgttttagttccatcgttaacttttaacaaattatttgttcttgtattgagatagacacctagcatgcattggcatttggcagaacaattgaactttgaacccctcacaacagtaaaaatatatatatattgagcaccacatacagtgcttatgttttttctttcaaaaatatcagaaatgtgtgcgttgtttatcagataactataataatccactttaggtaccctgcaactataataacataccttcaaccaggcccatgcaacttctcgtccttctaagctgataccaccaaggacataaaatgcatcttgattccgtacctaacaagcaagagagagattagattggcttctgtaccaatggtgtataatggttctcattctaccatttactatctggaatcatttgttcagaataagtaaaatataaatgattcagagggttaacctcatcggtaagcatgaagtttagtgcctcaagaacaatatccttatccaggcatgaagacaatgaacctaaaacagaagaaacgttactttccaggacaactcatcagaaaattcctgctgtcgcttaagctagacggttggaatgcacaaacctaagatgcgtgacttctcctgagcttcagctgtttctctgtagattttcaggagggcatcataaccagctctgctggaggtagtaacagtccgcatcacagcaagatatgaagcctgcagaccaatgcatatcagtatgctagatatcatagaggtaacactgcagtagtatgttaagcaaaagcctgaacctttctagtgtctgggggaagaatgttagttttgcggtcttttatgaagatatggaaccgcctaactccctcatttatagtctcatcatgtccaagtttgacaagggcaatcaagagcaatgatctaagcattacatcaagatggctctcgccctccttgggatcccagcctagtgttctgatatttagaagtacaagaaggatttcaatatgatcatagaaagaaaacagcaggaatatagtagacagaagtttattaacagaaacaaattcaccagtggcatgcgccaactcagaagtaaatatacaaatgcacataaatgataatatccagattcgtgaaatccagataaacatgatgatgaaaatggtaaaacattaagtttgttagcatacttggcagctgatagaagaagattgatcaaaagctgtttgatatctctggacaattcaggagtagcatcaactgatattttatcaatgcctaagcatacctgtcaaaaaggatgcatgtatttaatattgagaacaatagttgataccatagaatcaatcaaagatacaaggtatatgatttcattggaggtggcgaaaggtttacttacagaggttacatgtgaaagcacagtgtaatcagactcattgcgataagcattcagcaggcgaagcaaggatgtcagtgtttgcttgcgagccacagaaagggagtatgaatcttccacaatacctgcagcaaaatattgtgtttctgttgtcaaaatcttgacaaggatatattatacgagtagtattgaaaattcatcttgtcattaccaatcttatccattaaagagagcttattggctttgattgccttttcaagtccagctgcaagttcatcatcatacttcactctataaaatccagtttggtcaacgttcaatttgatccaacagttttcacccttctctcctccggcattttgggaggcagtgaggtctatatggaccttatcagtcttgcccttcaagagaaactttttctgtgcatcatatgagccacaacatgatgttataggaacaatccacaagcctggaccagaggatccgtccgatagaaactgtgcctgtaatagaacagacttcagtaagctcctctttttgcaatatgaaagcactgatatgggccagaagaacgaaattttctagttccaatacttcgaaatctataattttgccagttattggatgcatttgagaaaaaaaatacaaccatacacttgtgaataaagacatcagcagaccatacatgaataacgaaagataacatgaaacacaaagcacactatgatattctcatctccagttattatggttctgagtttctgatcaaggtgacatgcatgttgtcctaaaagtgtgtatgaggaaaggtgaggtcctctagacaactatgagaagttaaaaacaaaagaaacaaactaatataagattagatgtatgaataaaagtagaggttctggaaagaagcgatcctgaacaagtgactagtacagctaaaacttagacatataccacctcaaatccaaataaaagtcattttagtcttttactcttttcaatctctctaagtgcaagttactgtagaatttttgaggcagttttctcttttttccctccattctctttctacttgaaagctactactattatgaataaatggatcgtgtttttaatggaataaatgaagggaacaacaccattttgctacttccttagttcttgggaataaggccaaaaagacttagatttcagattggacgaagcataaggcaatggaataaggcaaggccgatggatacatatattcagttcttcatgtatgttggtataacatgagaatgagaaatctgccagaaaacctgttcaaggtgcaaatcatgtccatctagttttgcataaataacagggtatccttgttgcttagtccatgtagtcatcaaatccttaacaggttccccagattcctcctcaagaacagcccatagatcttctgttttggcattcgagtaagcatacttctttatatatgatgccaaagctttctgaaagagtaaaaaattcacaaaatcagcacctgccgaagactaataaattgtgataataaatacaaagtcaataacatgacacaatctcatagaaagacaacaatatgctaatatgggtactaaaattctaaacgttgttaccgagtattcaaaagaaatgatgtaattgtaaaattatgaatatcttttctttatttatttttcctgtaaagagactcttatcttgggtatagtaaagctggatcaatcttcatactttggtctaaaaacttatgagtatctttcatgaaaaaatcactcacaccattgtttatatatctcaactatatattctacagcctttggtaaaagttgatatgacttgttgaccgcatgcattctatgatatcaccttctttactggaaagaataaacaaaaactaaaaaagaaaaatccaaactcaagatattcttcagcagattcaccacagatttgcaaaatgaccagaaacaaagtcaaagcaaacaattacgatgccctttattatttttggtcaacaaaattttcttaatcaatctgagttaaatgcaatctggacttctgtagagccatctagcgctgagttgtttatgaagaatataaatataacatgcgtggataagagtgtcaattcaagagcgctgatatactagcagcaggagatgctggaggctggaccattgcagaaaacaagattttggtaaattcattcaaggagaaagaagaacaggatttaacctgaaaacgctctgcaccaaggtaactttgcagcatgcgaatgacggaagcgcccttatcatagcttatggaatcaaaaattgcatcaatttcagaggcatggtttatgtcaacctgaacgaacataccaaatagccagattaacaactgggacaaaggtgctaactctgtgaagacagaaatagtaaaaaatgcatggcagcatattgacatatttgagtttctacccaaaaaaaaatctaatttctaagcatcaacacctgaataaattaagcaaagatttataaaaatatcaaaaattggttgtattgtatgactagtcagtattagggatgaaaacagagcagatagttcccgtccgctccggagaaaaacgaatacggatacctttcggatcggataattcttggatagttcggatacagatacgaatacgaatatggtatcggagtttctatcggatacggataataattcagatatccgcagaagccatgaggcataccccgtttctttatctttttagattttaagagtagttcatctcttaacactagtccacactattaatattatttaaatttttaaaaatatttataaattatactacattttatataaaatgagctaattatatatgttgatatttgtttctattagaagttgagttggcttacgtgttccgagaaaaaatttgtttccgtatttgtgtccgatcatgttcgattcttattcgtattcgagataatccgtatttgtttctgtattcgagctatccgtattcgtttccgtatccagcaaaaaaatatgaaaacgaatatggtatgagcattatctgtccatatccgctctgttttcatccctagtcagtatgcatgcacaatttgtatccttgttaattcacttatcttactgctttcatgtacttccatatctgtaatgcatatttgtgcagcatcaaaatattatgtttcttatccatcagtgacttcgccaaagcatactgaagaagattacctcaataggatgagactctgcaagtgcatccagtctgagaccagaggtcgtctcatcaagaaattgtgtccagttattccattctggaaataatgcttccacagccaaataactcacctgttgaaacatatggaataattagccggtaagatacacaacaattggacaatatttctaatttctcaaacaatagttttcagattgaatacccaggaagcaaaaccctcatttagccacaagtgagtccaccactccatggttacaagattgccaaaccattgatgagccaattcatgtgcaacagtgattgcaacctaaagagaacagatgttaatttttctttctttctttcttttttaaaaatagcagtttacctggccaaaactacacatgaggattcaagtgcgagactaactctccaatagtaaatgaaacaaatgaaattgataaagataaatataggcataacctgttgtttattggatgctgaggataacagctcatcataaagtaaagctgtttctcggtaagtgaccaacccatagttctccatagctccagcagcaaaatcaggaatagcaaccatatccaacttcggtagcgggtaaggagtggcaaaataactgataaaagaacattattagttattgtagtgaaataggcaccatccatggtattctgcctcatctttagaaataaagcttagaagcaagactatgttggaagcttactctttgaataaatccagtgacttcactgcaacatctagtgcaaactttccttggttactcttgccaacttgagtatacacacgaactttggtgcctacattaaattaacaaaagccaatgaaaaaatgtgtaaagaccaggcaaagaagggacatatcatatagtttgaatgaaagagagcaaacaatggagacagaaactgaaattctaccttctaatgttgagccctctatgtaatcaaataaaccaacaactatagccactagataagttgacataagtggcgattcctcataatagacggtcttgagaggtccatgaactgtctccttaattactggcatgttggacagtgctaccaactctgatggaacttccagtgttagcttgaacttagcctaaaccagaaataaccagacaagaggtaatgttattttagataattgatccaaccttccaaattctacagagcaaggagccaaggaccatgaaaatattagttaagacctgtgtaaaaactagaagtgcaaactgaatttttctttcattacaatattttcctgtctgaattacatcaaaacactcctagggaaacaacattgtagcatgttaaacaccttaaatgcaggttcatcccagcatggaaaacatcgtcttgcatcagcagcttcgaactgtgtaactgccatatttcttgactcccccttgtactcatacttgctgcaatcaaacacggaaacaccacccacaatgcattaaaaacagatcacaaggatataaagaaagtacaaccggtgcactccaaactacactgattatgtaatgtatacagctttgttacaaaaatgaagataaaatccaaacatggaggtcctggataatatatacagtatttatacatcacactccaatcatgaatcttggtgacacaaagacaggacaggagtaaactaagacttacaaatggtatatagcacaggaaggtactagttacatcaaattgtggcaatttcaaataaaaatggaaataaatatcccaaaaactatgtttgctatccaagccctataatattacaacatgccaaaaaaatcataatcaaaactacattattaagatggatatacatatgctaatgctctatagggcctggtgaacagtgggtgctaggctgcgagttatggatggtgttatggtagtatggagagcagcatactctaccaatagcgtatagtgtgtgttttgaagacaagatcaggatcctaggcagacacaaatggttcaataagtttaatgaagagtgtttcaggattaacaaagagtggatggtcgatcattataagataagattgtagattcaagctcacatcctaaagatcctgagatcttagtcactttctaggacattaccaaataagatatagatactatccattgtcttagcacatcaagcatggcaacaatttttgaaccggtacacctagcccttgttgttaaagttcatgtgccaatgctattgattgcttccaaacacacacttgcagtttccatcaagtcactgctcgaagcctagttactcataacaacgaatagcagcttcggacctcatctagtaggtgtgaaccccccatggttcataggtattcaagtggatacccaagatatttgaaaacaatgcgttatatcataaagcttatcttattgtactggtttaaagctttcttattatatatcatgtcgagggttcgattcctgcatcctcaattcttttttctcctctctttattaggtgttcaatttttttgtcttctgtttgttaggatttcaatagcttgtagtaattgtttgttagaatttcaatagcttgtagtaatactagtgttaggtgtcttggactcttccatacatcctatgtagtatgtaatatttttcttatttcctcaagtttcaattggtcgtctccagcacgaagaatagatattcttaagtcttcttttttaactaatattggagtaagaatttgaaccaattatacattttcagaaaagtagcctccaaaccaaaaaaattctccaaattcatgtaaatcatccaaactatggaaaactatttactcatttttaatggcatatcaaaaatgatttttcatagatatcgtgacattgttctctaaaactcgattctctatctagaaatcccacgtccgcgactaccatctaataaaccagaactgcaagctgttgctgctggaatgcctgttcgcacctcatgtgaacgagagactagcaacaatcaccagttatctgtaactgaaagaggtggcaacgatacctcctgtagaagcctctcatctgatcgttgagcgtcccggtgaagtccatcttgagcacgccctcgccgatcggcagatcctggccgaacccgatgaccacgatctcgtcctcctcgaactgcaccacctcggaaggcaccaaatcctacaaaaccccatcatacaacgattgagcgaccctgaaacgaacacacggcaacaacgcaaacagacacggatggttaacgggggaggcggtgcgcgcgtgcctggaagcggacggaggatccgtcgacggcgagctcggcggcgttgaggacgaggaatcgggtcggggcggagacggcgacggcgacggcggcggagccggagaaggcgcaggcggcgaggtcggggcggaggcggaggtcgtagctgagcggggaggcgcaccgcgggagccgcgcctggccccggaactgctccggcgaggccgccatttgcggcgggggcggtgtggcggtgcggcggtgcggcggcgggagttgcgacggcgagtgggggagtagagtagtggggaagggagggagggaagaagacgattatgcccctcgccgccggctaaaaaggaagggaactcttgttcggttgcttccgggccaggataagcaccttggggccgccacgtgtacagagcctgaataggtttagggccttttggcccggacccagagggaaccttgggcactgttttaaaagcctgagatccttaatactccgaccccgtttgatagggttttaaactctaactccagcaagagctaactcctatagaaactgaagtgggtacgagagtgtttggctagattagtcagctccactccaccacgttccttgtaggcattttgtcgaacacatggttggcatcgccttgctactgtcgtcgccgccgccacccacgcgtcgccctacacggccgcggccgctgtcgctcgcccgctgccaccactgtcaccactgcccgtgcaccaccttggccaccacaacccatgcgccaccgtggctcgcgcgcctcccgtgcaccaccatcgcccacgtgcccgctgacgccgccgccgcccgtggctctcacgcgccgcgccgtgccaccaccgcctgccgccgccgacgttgacgccgtcgtccgtcgctggctcgttgttgactgctgtagggagggaggaagatggggagagagaatgggaggagaggagatgtgaaggggtagttcagtggtatttttgtgtaaatacataaaaattttaaagggtagtgggtcttttgggtggagtggagctgtggagcagcaaaaatccagctccacccccatagttgattttttaggagtagctctaccagctccacttccaaaaatggaggatctggactgtttggcgcaactccggctctaggtaagttggagttgggagctggaactatgccaaacggggcctccctctgtccatattataagtcgtttgacttttttttagttagatttatttttttagttagacttatttaagtttgcaagtttaaaaataaagtaacattttcaatacaaaacaaacattatatcaaaatatattcagtgttaaatttaatgaaactaattttatattgaagatgttgaaaatgctactttatttttctattaacttggtcgtacttaaaaaagtttgattaagaaaaataaataaatgacatataatatgaaacaaagggaatagtttattttctaatttttgagctattaaatcagaatgtggataagagtttagacggtttggggaaaacgaaaactattattgatcataaaattacatggactttttctataaaattgaaaaatagtttccgattcaccaaactaattcttatctatttctgaaggaataaaaaaaatactagaattcttaatttttcaaaaattttctcattgaaacaatcaaaaattaagaataggttttgttggttaaagtcaaaaatttttcatataattttttattgcatatgctactacattttttttcatgtaagtttgagtactttttcgtattattttgtaaatataaatcaagtataaatttataaaattatttcatgtttaggatagaaaaatcaattttaagatggaactttgtttaaatatggaaattaaatgatgatagcgatgagagctgttatatttttcatcaacgaatgagaaaggtaactgaaattttacaaatgacctgaaatctaaaccctccctgcttaaatgacaatattatatcaagacaagatttttaatggtgtgtttcggtttgccgcttatcaaattattttgacagggtaataaatgaaacttgccatatagtattatccaactaggctccaaagcattgcaactgaggatccctcgagtgtgttgcatgttttctttgtagcatgagaattatgcacaaataaatatcaggacggttcacattgaccctacaagataggtttgatttagttcctaaaattcttttacccaaaaacgtcacatctaatctttgaacacatgcatggagcataaaatatagataaaaacaaaaactaattgcacaatttgcatggaaatagcgagacgaatcttttgagtctaattagtccatgattagccataagtgctacagtaatccacatgtgctaatgacggcttaattagactcaagattcgtctcgcggtttccaggcgagttatgaaattagttttttcattcgtctccgaaaacccctttcaacatctggtcaaacatccgatgtaacacccaaaaattttcttttcgcgaactaaacagggccatagctcagttcatcactcgtgaaaaaaaacatatatttatttttagtgttaaaaatgagggatgtaattaaaggagctctttcttctcaaatacgcaagagagttggcatattattgcatcggaaaaggagaaaacataatacacgacagactcaacgcatcacgaacgcaccacaaacaaaaagaaaaaagattacaccctaaactaacaataggatctttgacaccaaagatcaaagatggcttcttcttgatccaccagttaccaagcacaacatcaattatttttttatgggaattactgttatgtatttgtccaacagtatggcatttattaaaaaaatatttacatcatacaaaaggacatgaaaaccgtagaaaaaaattacaaagattgtaatcaatcaagaacattgaatcaccaaccaaagaaagaaatcaaagcattgactgagcccttgactacaatgtagtaacttctacatttgttagagttgattcttttaactctctcgttttaattcaacctgtaacagtctctcactcatgtactcttaatttggatgtaaaggaggtacacaacttaattctttaaaaattaatattgattaccaccaagtttaaccccctatagcatcaatgcagtagctttgttagagttaattcttgtaactctcttgttttaattcaccctgtaaatagtctctcatgtatggctatatatattttaaagtttgcatgcaattgacagtaagaattatctcattccatctctcgctctcccagttctttatactttttcatgcctggtatcttatgaatcatatataggttgttatcattataagacaattttcattaatggaatagatagccaggtaggttttcttgctagctagtagtactacagaaggaaaaataaaatgatgctattcttagctgaatgagactttcactcttatcctcacaacagcatgcccaaatccatacactatcctaattatagagctcaattttagtttgtatatatccatagaactcaattttagtttgtatatatccgtactacttgaaattggttttgttgtccacaagagtcaaggctcacagaaatctcaccacagataatcttgttagtttcttgagaaaggcaagctagctaagctcccattccctctgcatttgaatctttgatttgagaagcttcatatctccatttcatgaaaacatgactggtgtgttaattccaagctaatattgtgaacattgcatcatgttctctgtcaatgcagatggaagctgcagatgtagccaaggaacatcacaaggaggagaaaaaggacaaggtaaacattcttctggttttttgaaaaaaaaatttgttgacaggataagacttattctcactcatgattgtgtgagaatcataagaaatgacagtcgaactaggagagttctcacaataatacaagataataaatactagtcttcaaaaccaaaaagaaaggtgatactatatttgatgcttacaacaagaaattctcaaacaatcacactttagtcacacaaccatgtaacattgctcaccaaactctgacgaacatctgcactcctttttgcatggcaattataaatcatcatcatcaaggaacacgccaaagaggcgaaaccggagaaggagaagaaggagaagaaagagaagaacggcgaagaggcggcgaaaccggccaaggagaagaaggagaagaaagagaagaaggagaagggcaaggagaagaaggagaaggtggaggagacgacggacgtggccaagctgcgagccaagctggagaagctggacgccaagatcgacgacctcaaggccaagaagcaggagatcgtggcccgactcgtccagctcgaggagggtgcgacggcaaatgctgctgctgcagatgcggcaccacctgccagcggctgaggaggaggtgatctgggattcttaggcagttcttgcaattggacaagaggagaaattacaaacattttcagacatttgcaggatttgcagctagtgacgatctgtttctgaatggaagctttggtacagaaatttttgccttcttacgatgatgatggtctcaagtcgtctttgctgaagaccatggcgccattgagtgttgcttgtatgatatgatcaggaagtgaaatttatagcgcaaatgagtttcatttgcaagatggtgttggagattatgtatgtgtcacgataattttacgacaagatcgattcaaattttctaaaagaatcaattactacagaaatgtgctcctatacctaatttctctcgaaatttatatcattgtttctgcatgtcctgtaaacaattactagcagagtaccagtagagctgaagaagtgaagaaatgcttttttttccctcttgagttcgtgccatccgttgaaaaacaaacaggaaaaggcgaataatcttaagcacagtttcacgattttcaatgcagaaatcccagattcccatctccaaacctccgagcattactaacaatccaccaataatctatcccttaaactgaaaatagaaggtgaaaaaaccgcttcctccaagagatacctaaattgaatctcaaaaactaaaagtgggctcttctgttaaactaccaacataaattgttaaccttagttttttttagaaattgttaaactaccaatagaaatcgtttttttagaaattcgagtggaaggaggggattgggagtcgttctctcgccctcaaatacacgtaccgagaaaattggagatgggaactccaaaacgtccagagctcttttgggaatctgttggaccagttttttttaaccaaaatcccaaaaaattaggattgaggatggaatagatagactgttggtgatgctctaaggcactgcactggcagagaaaaaaagtatggtactccctccgtttgaaatacttaggccaaaggaaattcataaaaaatttaaaggattttattcttatagaaaatttttctatatatccctttgaatcaaaagaataaatcctataaaaccatatgaaatttctatgaaatgtctcttcccagacaagttttagagaaaatttaacataaggtagaacctcatggaaagaatatttctccttaaattctggtgtttttcctgtgacttaatcaaatggtcattcctatcttctactgtgttttacaatcctctgttcctatcttctactgtgttttacaatcctctgttttacacttacattcttgttagaatcatatgttttttttctattcctccgttttttcattcatgtaatttaaaggggcccttttagttgtagatttgttctgtcttaaccatcaacttttaaaaatttgtatagattaacaacatgtgaattatattttatgaaagcatttttcatagtaaataaaaaacataaaccttatgatgttaaacgaatttttaaaaattaatggtcaaagctacaaaaaagtataacttaggacaaagcagcaagaacgacaggtaatctcaaaacggagggagtatttgatatttctccacaagcagtattaaactctagcattctggaaatcatcatgacatcacataataagatgggacattacttaaggtcactaacatcaacatgcaaataattccaaacagcccggtaacacttaggaattatttacagaaacatgcaattcaagaagtatattgacactcgtctagggaaataacctcaggaattactatgaacaaacggtactgaagcacgcgtgcatgtgatacttacaatagaacttcttttgcctaagtttttatctcacaaaatatcgaatacgtagataaggtattactgcagactttcgtaatgcccaagaaatccagaacatccattccctgccatcctcttagatcaatttggcctggagctgaccatctcttatctgcgcagcgatatctttgacggcacctggcccgtgagggatgaacactgaagaggacttggatgaggctcctatctccttcatggtgtcgaagtattgcgtaaccagaaccatatccatgacatccttggcagaggtcccaggcacgttctcggagaaggcaagaacactgtctctcagcccatccactatagcctgacgctgccttgcgatacccagaccagccaagtacttggattctgcatctccttcagctctcttgatctgaagaatcttctctgcttcagctttctcattggctgccaccctcagcctagcagctgtatcatcaaataacagcagttaaaactatgttgccgtccagcacatttacagccatacagctcatctttagaaaaacaccagaccaaccaaacatatatgttgcaggcccttaaaaagcacgaaatatttacttgactagttgaccaacacattttttgttgcacacaatgtaatcaataggttgcagttacatgtgcctgtgttacttatgactgttatggtgcaagtattcacgaagttaatattcataatatgttatgtacatctatatataacttttcagtgttccatctatatataacttacagtgttactgtgttgaaagcctaaaaatatttgtggcaacaattttcagtgtttcagtataaaacttgaataaaactagacaatataaacatggttttgtttctcggaaagagaatttaacattttcatgtctaaacaggagaaaattgtttccaatgcaagctcaaatgtcaagcataaacaccaagccaaataatgtctctgaagaaatggaatgaattgatgttttaattaatacttacctgcgttgatttcattcattgctctcttaacatgctcatctggttcaatatcaacaataagagtttgcacaatctcataaccatacattgacattgcctacagagtatatactaggtcagtataaaactccactatgctctagatgaccaccaattattgaacacaaaccttttcaagctcatcttccacagcttttgcgatctcattcttctgctcaaatgcatcatccaagttcatctttggaacactagccctgatcactgcgaggaagaaagttctgttagcattgaacaatagaggcaaaacatagagaaggtaatcagaagagtatgaactgcaaatgcatcggatgcatgaatgttcacagcatacaggaaccttaccatcaaaaacatacgactggatttgctccctggtgttgctaagcctgtaaaaggcgtctgatgccttctcagcaagagcacggtattgcacagatgccacaacattgacaaaaacattgtcctgcagatatccacaaaatggtatacatcgtcagagagctcagaaaaggtgggtttattctttgatgcatcatgcattagtgtaagtgaagaataaggaaaacagagatatgtgcacataaccatcatcagtatgttatcataaaggagtaaacgaatggaacaaaatgcaagaattttgagaaccattttttatcatgcctgacaattgctccagacacttgccatgaaatataaaagaaaccagagttaagaaaataaactggggaaccttagtctttgtttcacaacggacatccagctgctgcacacgcaaggaaagatatccagcgatctgcttccctatgcaccagggtaaaaagtggcatccaggctcaagaacctcatcaaacttcccaaaggactccttgatggctactgtcgattgatctacttgtaccaaaccgagtgcttgacccatggcttatctagaaaggaagaaatgcagaattacaaatggtgccatatgctaacgaaacaactaacaactgaatgttttgccataatcttgcttatactccgttggtgttaacttctccaatggaaattcatatttcaagtttttagtacatacaaacagaaacaaaagatatgaattaaaaaagataaagccatggcttcaaatgaagatgaatgtatgtcaggacaatagattgcccaacgcatcccaaatgaaaagtcaagcaattgcaatttcagataacttagaccaaacagtgttgcaaaaaatatgtatatcttgttgaaaagcatatcatgataacacattactcaaacttatactgtgtaatcattccctgaaaaatgcctaagattactactccctccgggctgataatacttgtcgttttggacaagggtgaggtcaaactttagaatatttgattatataaatcatttttaaaatatttgtctttcaaatatggtgactacatatatagattggtcttaaaaagtactttaatatgatcatatatttgttaacacttttttacatattataataggaaataatggtcaaagttgttttttgaagaccgtgcgcttgtccaaaatgacaagtattatcagcccggagggagtacatcacaggctcacagaagtcaacagggtaatagatgtagccatacaaaagaaaagaaaacaattcaccatagaaatgcagtaatgaaaaagaatgacgcaaaagaaaacctatacgtgccgatcaacttagtgctgatagcctgataggataaatctgcttcaggatgttcttggccactacagactacagacaagccaaatatatcatataaatagttgaagctaaagattatgctaatcctgattatacttgggggaatgattatacttttgattaaatgccagcgcaagccagcaaactctggcgatgcaagccaaagggcagacgaatcaaacaagacacttgccaagcaatcattgtttgataaaagtcaagagcaagaacccacagggctccacacgacgaggtgacaactaagaaagtcacaatctttagcgagtagtattcatctgcgtcataactaaacaagaataaacaatacagccacttggatactgttgttgagaattattattatttttagctgaggtgggtacagttcgacgttaacctccatctcatggcctagtctagcaaaaaagatgtgcttgacttgactgaaaaaacctcctgaaatttccaagcagtatgtggacaaagctggaacagcacaccatcgaattttacccccactcgcaaagcgcaagccctaaatctgtccgcacagaaagtggaaaaaaccaagaactcaaaccgcgtccaagaaccaaccgcaattcccaggctaaactcaaggaaaaggaccggagaatcgacgaaattacccaccacccgattccaacatccccctccccctcccccctccgacgaaattatccgcccaatctcctccacgagagctaaatccgtccccaaaataataaaaaaaagaaaaaatctagaggaaaccccaagaaacaaacgctcgccaagaaattccaagaaatcgaggtcggggctcgggctgggcgcccgccgaaggggagagaggctggagaggagcggggtagggcttacctcgaggaaatctccggcggcggcggcggatgggacgggatcgtcggagtggcgacggttgcctcggcccctcccaaaaaaaaaaataaaggaaggggattgaagtatagaagtgaggagggcaaattctgaaaatcgtgggggcttccgccgctgcttatcaagtataaaccgtccctgtttctttgtgcctatccgcaagcatgccaaaattaatactccctccatccaaaacgagaactgcttctaatattaatactaatgtgacatatcagttttatgttgatatttattcgacggatggagtacgtcacaaataaaaaagctaaaattacacctctatccatatgattagtcatcaaagcattttctcgataaccagaacaaatacttcatctataaaaatacttaatctagtattctagtacaacgtatttgaacatactatattgttttttttttttgataaaaatgagtatacgctagatgacacattcgcaggtgtgctcataagcatttgtatttgctcggaaaaaaataacttcctttattattctaaaatataagtatcggtagagttttgatatttataccgtaatatattttttaaaatatatattctaatgaatggaaatctatatatttcccgtcactaagatgttaggaaagaatttaacgactaaaataactataaaagagaatattttctctctacctttcgtttcgctaaagaaactaaaaacgcttaaagtttgaaacgggtgatgtattaggtaaagtcgtcaatctatacaatcgtagtatcttccaatgccaatctacatactatagtcaacaatcatgcggataagacgagtttagtgccaaaaggaagttgcgggtcagagggcaccggatcacagagaaaattaattggactgctagtggataggagttgctgactagggggtgtttagatacacggcggtaaagttttagaatgtcacatcgtatattatatatggtatcgtatggagtgttcagacactaataaaaaaactaactgtagaatccgtcagtaaaccgcgagacaaatttattaagcctaattaatccatcattagcaaatgtttactgtagcaccgtattgtcaaatcatggagcaattatacttaaaagatttgtctcgcaaattagtcgcaatatgtgcaattagttattttttagcctatatttaatactttatataggtgttaaacgttcgatgtgacagggtgaaaaattttggggcggaatctaaacaggacctaaagacgtttcctaattcttactccctccgtccctaaaaagacaaccagctctcctaatataacgaatctagacaaccctctgtccagattcgtggtactaaaagagggtcacatcccctcctatgttgctttttttgggacagagggagtatgcactatcctccagggcaatctgcacttattgctagtagatataagcggagtttttattaaaagaatatccttgtctgttacagtgaaacagcatcggactcaccacgcgtcgtcctcgtgcaggctgcgggcggcttgagagccctctcatctctcctcttctccacctcaccgttgtcggagcacactgcctagagaacctagcggtgagtcatgatggtggcgacgaggctaaaccaaccccgatacgcttcacctcttgtgcgggtgaggcggtgtggagcttggcaagccaggagaggctacagtggtgaaccattagtatggggttgctgatacaacatcatcacgactgatctgatggggtgtccctagtccatcatctccacgtcaaatatgactagggtcaaacggcgggggcaatgggaggctggcgtggtcaggccaacgacaattaatggatggccgacctcgccggtggcgacaatagtgggaggcagtgctgggcagccggcatggcaggtgggcgtgacaactagtgcactcggtggttggtgtggatgacaacacttgtgatgatggcatgtttgttatgttttttttaaccttactgtgttgtaatgttgtaatttttgttatgctatatcaaaataaaactttgcactatatcaaataaaactttgcaatatctaatgtggatcattttaaaaaccttgatctcaaatatttcattatccatcgttaaattcaacttggccactaacgatgactttttatacggttagactactatgattgacaaatctatcttactatatagttggtgctcactaacttctaaaactcaatatgcaagtatgtcatattatcatccactaataattattatctagagtattttaaatatcatgcaaacatgacatatcatttacaattttgttgaattttttagaactcaatatgcaagcaatgtcaaattattatcttcacatcatttccagattatttaaagatatacatttaccatttctataatgtataacatgtattcatctacatatctcgtaacaaagcgcatggtatcaactagtaatattaatgttagcatgcaacacgctttaataataaaacatcttttcagatatttaaatttgtttgtgaacagatcgtgatcaaaatagaaatagtatcaagcaattatttagatgagtaaatttcacaaaacttctcctaataaaattcacaaaactatatatatatatatatatatatatatatatatatatatatatatatatatatattgatcaaactatcataaaactacatatttaatgcattgtatcacaaaacaacaaatttagcgtaaaatttatcaaaaaaaactacagatttaaagccaagtatcacataactatatatttaatatcgaagttatcacagaactacagaatttagaggtcaaatccttagcactatcaatatgtttgagctataaacgttgcagttttatgattaaataaacactaaacctttagttttatgataaatttgctacttaatctatagttttgtgataaacttaacactaaacttgtagtttttttatataacatcttaaatctatagttttgcaatagtttgatgaaaatatttgtagttttataaaatttactctatttatatcaaagtgcaaatagtatcaagcaagtatttatgaatggagggagtatgaattactctgtttttctctattttgaccttgatgagatgtggagtgaagttaactagttcggaggtatggatggtttactacataattaattatgtattagctaaaaaacataaaaaatacattagtatgattttctaaagcaacttttctatagaaaatttttaaaaaacacgtgcgcgcaaaaaataaaggagtagaagttggtaactcggaaaaaagaacatagcctagggctagttcgtttcctcggtttggagggagatttccagagcacaccaaacaagaaatattattagcatatgattaattaagtactcatttcatcttattatatagaggattataccttttttaaaattaataaagtagcaaaaggacatgtgataggaaaaaaaatgatgggtgaaaaaagtactcatttcgtccctaaatataaggtattttggttggatgtgacacattctaaagcctatctagattcgttgtactaagataagtcacatccaaccaaaacatcttatatttagggacagagggagtagtacaaaaggtagatgagagaataaattattacaaaagtgaatagtgatggaataaaacagtacaaaagttggtaggttgagaatacaataccagcttaggatcccaagatctcttatattttacaaaaaaaaattgaaggaaaaaaccatctatgttatgggatggaggagtattaaatattttaaacatgaaaaataaatttatttgatttttaaataacttttatatacaatttttttccatgcataaatttaatattttgaaaagtgtactattataggacgagaaatttgaagtttagagttaaaagaaaataacaaattgttaattaaagtcaatataacaacatattgttattatattgtctaatattattataccctcttgcacgtatggatattttcatatagtaacttaggagttaataatgtcttatgatataaaatgaaatggaggtaataacttatcataattataaattgaagtgagtagcggataaatgctactgcccccaaaaccaattaattactcttcatagttcatgctttactagaaacagaaagtcagttttgtaaaatttgcaaatgtcaccctaggaaacacgagaatttaccatccacccccaccaatccatcgcccatccgctggctaagctacgcccactcgatcgccgctaaattagctaaaaagctacttaaagcaagctcacgagaggacgtgggcggcggcgcgcgcgtccatggcgacccggacgaacacgtcctccagcgtcgcgtccgccaccccccacgccaccaccggcgccgcccgccgcgccgcctccaccgcgcccagcacgccgtccagccgcgcccctcgccggggcacctcgaaccgctgcgtcccgcccacgccgtacaccttcgccgcgccggggcaccgccgcgccaccgcgcgttccaccgcctcctcgtgccccgccgccgtcgttatcgtcagcgcccgcacgccgccgtacctcgccttcagctgcaacatcaatcaatcaatcaatccatcaatcaatcaatcaatgcacttattactgaatagccggcaaaaaaaattcaaactttcagatgaattaattctgcatttgctttttttaactgagtttttgaggtgtttaaatttgattacctcctttggagttccgaggcactggaaattgccgtcgacgaagatgccgacgcggtcgcagagctcctcagcctcctccatggaatgtgctgaaatgttcagtgttcatgtatataaattcagttctagttgctaaattagtcacaaatattgcagtttgcatgtatagctggaaagaaaaaaattaaccaagaggaggagtaattaattactggtgagaatgatggtgcagttcttctttgctctcttaatgacattccagagattgctcctcgatgtcgtgtccaatccggtgctcggttcgtccatgtaaacaacctgttcaacatcaatggaatcaatgagagatagttacagcagaagttttttcagagatgtgagtggaagggaatgaagaacagttcatggtaaatttactacctttgggttgccaatcagtgcgatggcgacactaagccttcttttcatgccaccactgtacttgttcaccgatttgtcgccgaaaccgctgtggaacagatttacactcttcagggattcattcactgcctggatcaagaaaagtaaaatctgatgatcaaatactagaattgtttccaatgtcatgtgtagtactacaaatggagtgaacatttgcaattttacttgtaagaagtatagtaggagtatgagatttgaaactcgcagtttgactgtataaagctagtgctgtaattttacatgttctttccttttttcatggcttcaattaaactaccttcagtagagcagcacctgtgagattcttcagtcggccatagaacattagatgctctcttcctgtcagagtttcccaaagcaaactgcacacacattgaacaatttcttttttgttggcaatgatatcactaacaaaaccatcttcagaagaaatgcaaaagaactagccacttgagatcatactcgtgctgtggacatacaccaatgtttgcatatatttcattcatatctctcctcaaatccatcccatgtatgtaggcagttccataagttggcgccacaagtccaatcatctgcaaatataaattggtccaaaaggtgtatttgttaggttttttcatgttatttcactactaggaaaaatggataaatttaagtactacttgattcatgtgaaaaatgagagctactttgaagtgttgatgaagcagatataaatgctattttgacaaaacatcataagaagcacaagaatattgtgaaatattcaccatgttgatgaaggatgttttccctgccccattgggaccaagcattccaaaacactgtcctttgcgcaaagcaagcgacaatcctttaacagcaagcttatcagggtttccattctttccagggtacaccttcttcaggttatggcatatgatcatattcctcatgtccatttccttcagcaattttttcaccaccttgcgctgaaaagtagaattttgaacaacaatttatgacagtatccttgttgcatattatagttctgcattacttcattatacttctatcttggaaaacgccatctattaacttctatagacgtgtatttaatcacacctattgcagataaaaaaaaagaagcacgccaattcagatggattgagatcctctaccttcgaaatcaccatgcctttgtcccacatgtcagtgacaaagtcacatgactttgaaggtaggtgatcctgatcctattcggatgtatgcttaactaacctcaaggaaaacatcaggttttgccatatcagcaaacacctttctggacctctgtttcactttgtctggtatgattgttggtgaagagtgctttgttgacataaacccaaagaggaacagtggatgccatgtaggtctatgatccagtaaaaatgccacaggaagcagaagtatccattctatagacattagaagcaaaacatctttcatcccattgatggggtcattcaagtccctccattgcatcccaggctttcccatttgccttcctgcaaatgcatactctgcgagctcgtaaaatcctcggtagagggcgaacccgggaacaagctccattgtcacaagccattgttctaataaacaggtagaatggtagtttttaatgagtatccaataaatattcagaataattcctgggaaaaaaatttatatgggaacaattgcagaagtgcttatacttacttgggaatgtaatatcttcaatgaacaattgcagaagtgcttctccaagaaggcttgatccaaagacataaatgtaactaattactgtaacacagaaaatatttgattctgaggtcacttgaagagctatagaatgaacagaacagaaggtttgaattttactaaccactagcagacttgacagacgagaagaaagacgcaagcagaaaggcgagcacgatctgaaggttgatatatagaaaatagaatacaaattgtatgctgtagctatttaatctgaagatatctagccctgtaataccaaaaagagttctctcagtgatttcgaagattactcgaatgtgctaaattctcaatttccatactctgtagttaactagcacagtacctataagggacccaaacatcacgaagaacatcatataagctgctgaaagggacaaaaaataggcgtaagatatcatccaataaggtccatcctttagcccatgcatcttcatcatcagtcttaaattgtgctgcttctcataaacaagatatgtcaacattacctgaaaaaaccattgaaataaattggtaaataacttatgtatgaatccaagatagctttgataagagattgattgtgggacgcgataaagttaactcactggaaggaggagttgaactgtccatgtaaagaatagtgcatcaaggagtgtggtaaggtctagcctgattttcattgcagcttttggcatttctttcaaatattccaggcgcatttctacattaggtcctcgaagaaacttcagatatgcggtggatgcctgatgaaaatgcataacagtagtgataatactaagttatttaggacctataacagatgaactcatttttaggaaaggactctgaaaaaaaatggcacatatatccatctgggcaacaaaaacaacacaaatgacaagaaccatgaagtgttgttgtagaagatgtgctgtttttgctacagtagccttgttttgatggaacagtacaggagtgcaccatgccttttatgtagcacttccatttctagttcttaccatatattttttgaatgcgggtatccccattttccattaagcgaaatggtaaaaatcatgttttccggttcttactatataatgattgatatttctttagttcagataaatgccctttaatattcaatggagtattcctctacctaaaagtgaaactgtaccacaacaggcaagttaagtaccatattaaccaaccgtgcaacacgcaaaactgtcatgggatggtgtccattgtccctgctgaaggtagagttgtatgagacatacacatgaaacctcctcttgcttgtatcaagaaaatcatagcctgcaaaaatggaccttaaaataagttagttgttcaacccgccaaaaaaaaactgaactgctactttagtagcacagttgcaaggaaaactaaattaaagtaccagcaagatattcgttcgatgtcctcctcttattcccacccttataacccttatacaaatggtcattcatcaccgctgaattccggcaccacagtgataaaccttgaacgcacttcacatctattacaattaaaataaaaaggagtgcacaaatgcacaagtaattcagggttgaaaacatttcatgctagttgctacgacttcatacaagcaagaaacaaacaatcttttaccgagttgaattggcatcgcatcagaacttctagaagtattgtgcgaatcccatatacattttctttgaatcacatatagggtactattgggcacaaatcctggttctatgaacaatacatgcgctggtaatgtgcttgtaccctggaagaagaaatattcggtatcacctttccatcacaaatcagagttaaaaaagtatcgaatcttttgtgtaaaacgccactgatcactcaaaatttcaaatattcaactcacagggactatttttgataactcatcaatataagatgaattgttggaattgggcacaccaagatagtatgaaggagggacatctgggaaaaatccccttccaaggcctggcaaaaaaaaaaagttccattcacaacaacaaaagcaaaagcaaaagttgtagcaaaacacgtgtgatgtgtgtgcgtagtggtgtttgtaaggaaaatgatcctctggcttaactgcatgtgtaattgagccactgacatgtgagctatagtaaagtgagactcacatgttagtgacttaactgtcagaggatctgcttcctacgtgtgaaatttgacattatgccattgtcacaagtgggtttcgcccaaataccattctccaaaagggattcgataaaatgccattatcaactcatgcctactcgctagaatactatttgggaccaaattacccctccactcctcttcttcatccatccacagctccattccctctccatcaaggatagtggcagcggcccggcgagctatggccatcgcctcctcctcctcctccctctccaccggggatagcggcggtgccccggtggtctccggccatcgccacctccaccttctcctccctctccactagggataccggcggcgcctcggcgggcttcggccatcgccgcctcctccctctacaccggggacaatggcgccacctaggcaagctctggctatcgcggcagggagttgagtgcgacccctctcttctcgtcactacgcatgagcggctcgtgaaggatggcctacatcaagcattgcctcgaccaggttcgccatcgactccagtgtaggtcaccttgtcgtgcacaccgagtgccgatgacgtggcctctgctttcttgctaatggttagtgccctatctcgctgactttgggcctcaccgactctacctctccctctagttgttggcccaccggcatttggtcccatcgccgatctgctctcctctcctctctcttgtcatgtaaggggaaatgtttggactagctgagaggggggagaagagtggagggtaatttggtcccatataatattctagcgtgtaaccgtatattgatagtggcattttatcgaatctctttttgacagcggcatttgggtgaaacccacttatgacaatggcataatgtcagattattcgtgtatgggtgcgtctttcatacaataaagaaaaaacaaatttaaaaaatcgaaagaaaaaatgcagaggagctacatgaacaacataaaaatatactacatttgctggtttgcatgcaccttcagtcagccggcggttctggccggtggtgagcacggcgaccgggcacggcgcctccgacgcgccgctgccaccgtcgccgcgacacctcgccgggtgcacgggcgtcagcgcgcggtacggctcgtccggcacctgcgtcaccgccggccacctcggtggcgccggcacggcgcagctgagcgcctgcgtggccgtggagtgctgcacgccgcactccgtcgccgcgcacgcgcccgcgcccgcgcggccgccgtcgcggcgcacgcaggcgcagccgcaccggaacggcggccggtccagctcgccgtcgatgacggcctggatcgtgacgagcagcacgcacagcagcgccgggaacgccgcgatcgccgcgttcgccttggcgttcctcctctgccatcccaagaacacgaaaaaaattcagcaagctcttgataacatattaacatctcaagaaccaaacattatcttcatccaagaacaagtttgaaatcgatttcaagaaccggattcgtggatggatgaaacagcatttgcatcaccatcacctacctggaaagagaggttcttgaggaggagcgcgtggacctgcctgaagaacctggagcaagaacctgccgccgccattggagcaagcttctccgagctctgacagatcaaactcgacgcaacaacaacgatcgatcgatcagcaagctcgcatatatagcaaattagcaacggtttgcagatttgcagtgttgactcaactcaaaccgaccagctgatcaccacggcgcggcgccgtgagaatcacgcgtcggttgccgccggggcatcaggcgccggacagggagagatcagcggaggattgcagatgaagcttcactccttccatggcagcaggcaggagcactctgatctcactccaagaaaagctgcgtcatcgtcccttaactatggcgggtgttacgcttgcattttaattgtttaactcaagcttcgcagtaactgaagttttgcttcatcagttacatgaggagagcagagagattgacaatggcatggctgcattgggatttgatccatgtgtctagcaaggagtgacatatatatgtatattaaatatatactatatagttaattagtgactggtcctaaattcttcagagtttagagcattgtcacagtgcagaagtcccttctatgaattcagtttactagccacctttcttgttttggagttcagtttgggacttgggagttatctgaactcatggtagctagtagctgagacatcaagaagagagggacagggattgatggaataagacaagccttgtgttcatcgcttctaaaacggtactaccaaatggactaaatcttgtggttgcagtaacttcccatgactcatctttcaaggaatttagattatcatcagttcatgcttccatttttttttatccccttgttattctattttccctctgatgctctgttacgcaagagttttcgttggtacgaagactgatgctctccatctccacattgatctcattggaagaaagaaagaatggtattaaatgatattagcagagataggtttaggttcttgagtactactcaccttgggttcgtcagtaatgtgatagcttcatgtgaacgaaaggtatcaccgtatcagtactgtagagtgataaaatcatccttggtgccggcaaattcaaagatggatcaaaggaaagcacagttaccaacataagcaaattgacagtatcttagtttagaagttagagcaacctcccttcgattccagcaaattgacttttgtttacagcatgacatactaagcaaaacagttgacagatgtctgaggactcttatatctcctccgtttcaaattacttgacgttctagatttgtcctaggtcaaacatcaatttctctaaacttatatagtttaacatcataagatttatattttaatatatccatcacaagaaataatttcatgatatataattcgcatattgttaaactatatagatttatagaaattaatgctcaaaaatagaaatatttgatttaggacaaatctaaaatgacaattaatttgaaacgaagggaatatatatatgagagtgatatgacttgtacttgttccatgtgaatatagattttagatcttacagccaaaaatctaatgatgcattctaagataatatatgttgtgtgacttctgtaagtcctggactattagaaattcaaagagagcagatgactgtagatgctttcctccaaggactcttaaaaacaaaatcttcaggttcttattttttaacaccaagataattatttgactaatgacaatagtttattcttgtggttggaaccagcgcactaaacaaaaacacttcatgtggtagctgcacaagattacagcatctgaaatccccaatcaaataaattattcagatagatcagtacccaatgctattttgcttgcaatttcagttacggccaccctataattactggtcaaaattcaaaagattgacaaaataacaagaccttattcagaggcacaacatctcagtatgagaagaggtttgaatccattatctatcctattccaaataaaataatactctagtttttttttaaaaaaaaattccgatgctcccacaatgaaatgatcattggtaactatagcagtataaaatcagaataagtggtctctttagttctcagaagctattaatgtattgttcaggatgtcattgaaggataatgaatcaaagaaagatacaagtagggactaggtaatgtgctttcttaacattgttttcaacattttactaaataaaataaaatcgcatatagctttctgtttgcgggaaaaaaacccgatatagttttaaatatgcacattctgctcagctggttttagtcaaaatcaactaccactaaggccatgttcggttaatccccaagagggagggattggaggggatttattgcacacctattgtgatgtggaattattccccctcaaatccctcaaatccccttcaaccccctctaaacccaaaaaggcctaattggtgttatacattacaatatgaattccatggttgctaaatatacaactttaccatactacatgaacaactcaatcacaatgccaagtaaaggttagcatatagttcaaacaaactatatacaacacatgatcctatgaaggaaaaaaaataaccacctatcgatccataatattatttacgcgatcacattgactccttgtgctcctttggcaaccttgatgaagacatcctccaaggtggtgtcgacgaggccccaagcgtgtatgctgaactgtctttttgccttctcaactgcatggaaaacgtctgctatcttcacctcctgttttggcagctcaaatttctgcgtccctgatatgtgatatatcctgtttgcacttggtgacaaatgctgaaccagctgtttgacctcctgttcatgttctgaagatgttgtcatagtgaacacatatgtgccaccatatctagctttcagctgccaaaacagaatgcaatccaaatattcagatattaacaaatgtttataataggcatgttacattaagtgtatttatttgtttttgcaggtaactatgtaaattacctcctttggattcccaaggcattgaaaaccaccatctacaaaaataccgagtctatcacatagcacctctgcctcttccattgaatgtgctgaaaaaaaacatactggattatccactattattgttcatataggcaatttaaagaaggtcaggaaagctcattacttgtaagaatgatagcacgatttttctttgcctccttcacaacattccacaagttatttcttgatgctggatctagtccagtgctaggctcatccatgaaaacaacctaaaagaactttttcagttgcacattccattgcattatgtgcagttgaaaatcaacacacataaatcatattagtaccttggggtccccaatcaatgagattgcgacactaagccttcgtttcatgccaccactgtacttccccacttgcttatttccaacaccaccgtgaaacaggttaacattcttcagggagtcatcaactgcctgatagtatgctatttgtcagttcaaatattgatatattcatgtgtaatattggaattgttaccacaagacaaaattaacacaccaatttacagtgaaggaaaataaagagatgagtgtgaagataactataccttctctaattcagcgcctttaagattctttaatctcccataaaacaatagatgctcttttccagtcaatgtttcccaaagtaggctgtattttaagcagcattagcaaccacaatatattttgcaatggattaccataaaaatggtactaaataaattagttttagagcaagaatcatactcgtgttgtgggcatacacccatatttgtgtagatgctatccatatcagtgtttatgtccatcccatggactaatgctgtgccagatgtgggtggaatgagcccaatcatctatggaggaaaaaacatggaaagtatatgccaagtaaggatcgtgcaacattgtctattttttttgtcagaattgaagagctacttgttgccactgtaccatgctgataaatgatgttttcccagctccattcgggccaagcataccaaaacattggcctttagggagggcaagagacaaccctcgaactgcaagtttgtccgggtttccatcctttccatggtaaaccttcttcaggttgtcgcatatgattgcttggcttgcatttggttccagcagaagttgctcgactacctctctctggatacaatttagcaaaatcaggaatgaaacatttatgcaatttgagaatatgcaacaacacgatttcaacatatatacaaaatcaggattaacttacttcttgggaaacatcagggttgtccatttcaacaactactttagacccttgtctcccaaagctcctccgcagtgatacagcacgatttttgaaacgtttcaagaagaacatgggtgttttacgggctccactacccaatgatgagattttatccaaataaaatgctaatgggagtagaatagcccattcgacaaccatgataatcaagacattgcgcattccattctcagagtccctcagattagtccactccataccatttgttcccattgcatttccagagaatgcatattgaccaagctcatataaccctcggtacagcgaaaatccagggatgatttccatgactactatccaaccctctttgaatggagaaaacaatgctcgtcatgcataagatataaaaaacaatagctaaaataaatagaaaagaaacctactcggaaaactagtagactccacaaaaaacctcagaagaaatgcccctagtaagccagaaccaaatacatatatataaccaaccactgcagcacagaaatttctcaaattagtcatccacgagtcttctttggaagttgagcatttgaatcacaaacctgtggctgtttttacagaagaaaagaaggccgcaacgaaaaatgcaagtgcgatctgaagatttatgtagatgaagtagaaaacaaactgaatgccgtagttatttgttttaaagaaatttaaacctgtaaggaagaaagttaattttgtaagcatgataaatttatttgcaaaaatacaatggattgaagaaatttccagttgattacctatcaaggatccaaataccacaaacactatcatatagacagctgatagagcaaagaagtaagaatatgatatcatccagtaaggctcatccttcaagccgtgcatcttcatcataattttcagcttctgttgcttctcgtacacgagatatgttaagataacctgggaacaaaatgaagtaccaactaatttgatgtcctctgcaacttatgtaagagttaagaaaggttgcatctcatactcactggaaaaagtagttcaatgatccaggtgaagaacagagcaccaagaagagaagagagatcaaattttggtttggttcctacttttggcatatctttaacgtattcaagcagcatctccactccacttcctttaagaaatttcatgtatgcattggatgcctataggaaagatggaatgagttgtattagtagttgtagtgcatatgaaaattgttagacttgaggtagtggaagttcagtgtacgtaccgtgttaaccaagcgtggaactcgtagcaatgagatgacgtcatatgcagtgttgttgttatatgtagagttgtaccaaatgtttatttcaagaccattgttgtttgtgttcagaaaatcatagcctttggaaaaaaagcaaacttagacataaggtaaggaaccattacatcaatagtggcagacacttttctctgaggggatcagaagatgaaatcacctgcaataaattcatttgtctttcctcctccacctcctccaccttgctgtctataacctctaaatagttcattattaatttgtgatgcactttcacgccataatgataagccttgaacgcagtctatatctggacattgcgaaatgcatatcagatttggacattttcacaggtgtaggaaacatatatgaaagattgaagggacattgacagactttagtcttactgttgaagtataacactggaattcaacatcaacagaacattgctaatcaaacatatttaaatctagatttttatagtcaaatgatgttatagaactttatgccaatatggctttggtgtcttatttaataatgcctcccccagtcccaaatacatgttgtcttgaacatatacacagtttctaaaatgcatctttgaccgctgatttctgttgcaatatatttataaaacgcgatagacctataatattacaaaagagcatttcaaaacgacttgtatttcttactggagggtataactgacaaataacgcggtacgactactactctttttaccaggcattaagtctgactattgataatgacgaggaatactgtgcaattccaggtccgagaatataactgtgaccagtgctgaggtagtaattccaaatggcaatgatttttttataatattatcataattacctacttattcggtataccatatgcctttacttcctagtacatattaaattaaataagttaggcctagcaagttaccctgttttcgctacctgcttccttcaaacaaagatgcagctgaacgaaaaactgtgaaaagaaaagcaacttactgagttgaatgggtacaggtccagctttgttagaaattgttcgtgataaattggacgaacactgaggctggaccacatataaagaatgccctggggtaaataccggctctatgaactgcgttgtccatgtccatgtgtctgacccctaagacaaataaatccaatcaagagctccacacattagagaacatggcaaccatgactaatgactgtacaagcaattctgccattaggcacgaataaactcacagcaacaatcttggagaacgcgtcaagataatccgtgaaattcagagagggaggcacagcagggaacaatccaccccaaagacctgccaacagtaaagcatcaatgaattaatgaacacttttgatccaaagattgaacaacaaatcagatgtttttttccccttctagtatgtcttcgaactaagaacatactttgagcaagcgagcggttcattccggtgacaaggacagaggcagggcaagaccctgtgtccctgcaggtcgggtcaggcaaaccgtcgaacggctgggaggcgatcctgacggcccgggactcggggcgggggacctggaccaaggccggccatggcgtcgggctcttgatcgggcagctccccacctggtccagcgtggagtgctcgacgccgcactccgtcctccggcaggtcccgtccggcgcggcgtccacgcaggcgcagccgcactggtacttgggcttgttgatctcgtggttgatcaccccctggagcaccacgaggatcacgcacaggaacaccgggaacaccgtgatgcacgcgttcgtcttcatgttcctcctctgcatcaaagcaagaaatcgcaagcaagcaagaaacggtgaggaaatcgaaccaaaacctgcgaaatcggggagacgcgccaagaaagaaagagggaggaggggacctggaagcagaggttcttgcggaggagggcattggcctgcgtggcgaatccggcggcgcccctcgacgacgacgaggaggaggtgtctgccatcgtcggaggcgaaggaggtggggggagaagctacgctgcaccggcgatcgccttcgtctccgggctttatagccgccattttcaaatggctcccgccaaatctgcgtcgtcacgccgccaccgtaaagggaagaagggggggggggtggtggtcgctctccgcgagggaccgtattgtaataaagagaagttgggagggggttggatgcaaaatctgttagccgttagggtcactgtcctccgtcagggaggccgttagcccacggttcagtacacactgcctcctgaaatctgaataccgttagcatgtttggtaataagaaaaaggttaagagatcactaggatgagtgccaactgccaatgtactgctaaggacgaattgatcaagagttgctatttggtgaaatctaaacatgtttgataagaaaatacttttggcatttcccgcttgtgttaagtgttagaaacatgcgtaactggcctttttgtcgaaactaattattggagcatttgtcgagactttgggtgtcggtccgttgttattacgcaccctaggtttgacgagcattatgtaaaaataataaatttactattggcattcactaatcactaggcttggattcgaggcgaagaaagaacaaaatctgcgttgaagaacaacaagatcgaagaggagaaattaattgcaacgtgcatctaaaccatgttatcgtgaagagagaatctttgacaaatcaaatgaaatatccaaaaaccaagtcaaagtcaaacatgtagagcgagaggggaggatttcgtacaaggggcttgtacttgtacctcacaaagtgacaatggacttcaagtgtgtggtataggttgaatttgtttaaacaactctgttatttaagttggaaaaacgataccctgcggcatgatgggattccatatacgtggattgcaaaaggtccactcgtattgtataatctgtggaagggtaggacttgttaattactccatccgtattttaatgtatgacgccattgactttttaacaaacgtttgacctttcgtcttattcaaaaaaatttatgtaattatcatttattttattgtgatttaatttatcatcaaatgttctttaagcatgacaagcatttttgtatttacataaaaaaaaattgaataagacgaatggtcaaacattggttaaaaagtcaacagcgtcatatattaaaatacagagggagtacttgcttaacatttccttgggcaccaagagatttagtattaaatttattgtgctattgatcatatgtggttgctaagatgatgtgggattagcagacaaattaaattacacttagaataatatccaaacaaaaatatatctaccgtaaacctcgcaatacttcctcgaagacctaaagaaagtgattttatacttacatattctagtgtaatttttttatctcacctagcgtaaatgtgatacaagcttagttccaaattttatgctggaaatgtaaaataactgtagaatttcacctaaaaaaactcttgaatttaacgtggtgcaacatcactttctacttaggtatagccaaatttggcatgtattagtaattatatttttttactaattgtgctgtctattgtattttgtgcttaattattgcacaccagaatctctaggagtggacagctgattgttttacaattagaggggaaaattatagatagaatgtcaaaagcgatgagcttaatttgagaaaattccaagaaacaagtagcttttcacgcaaaaaaaaaaaacagaagaaacaagtagctcttggcgttgattagtaatcaagcagggtatatagccccaaagcaaaagaagaagtaggagtatattacacataagaaaaacaaaaagtccatttatagtcaccatcacacacttggtcacaaatcacaaaacttgcatctgattgttcagatcaagtacaattcaagcacgaagacatgtcaaaactaaactattatatcacgcgctgaagaattttcatgttgaacttgtttcgctaccgttagtaactattcaattcaaaatttcaaatatggcataaaagggttcttttgatcacatggtgtgccctcgcatatatatgccaaaactatcatgagaccacatccagtttattgtaattattaatcgatttcagaaacttcacttgagttctcatagctagttgtaaatatcgccgttggtggtcaaaagataagaccattagtatattatgaaaacgaacgttgataacagcaaaattgtcaacatatgtggcactacgagcgagctagcatgcacatgtaatctatcaccatcacacacatgcaattcaaacttggattatttgtgatcccaattattttgtacatttacaagtcacacgtattggataatctgtggttgaagagatacgagtttgtccccgtgcagatcatgatgtaaaatcagcagcaaaggtacataagcattctatatatattcttataataataataatgaaaattttcctcacaaaaatggaatttactatgtacatttttgccctgtttagacccaaccccaaaatttttcaccctgtcacatcgaccgtttaaacacctgcatgaagtattaaatataggctaaaaaataactaattgcatagattgtgactaatttgtgagatgaattttttaagcctaattgctccatgatttgacaatgtggtgctacagtaaaaatttactaatgacggattaattaggcttaataaattcgtctcgcggtttactgatggattctgtaattagttttatacccgatgtgacatgccaaaactttacacccctagatctagacactccctttgggtgcctattcctaatatttgacatacagatatgctagaaatttaacactaaaaatgacgtaacttaataccttcttatagtcctaagaaaactattaattggtactaacatgccacattatctaaactttgggcgccatatttggcatatattagtaattaaatttttaattactaaatttcctactatattgtgcttactgcacatcagcagctctaggagtggacagatcagcatattgcaattgggaaaaacatttcatttttgttatgaatgttccatatgatctttaaatagataactatcaaattaagttacaggctaactattatttgagaaaacacagagcaaccagtagctcctcgtgtagattggtattcaagaagagccaaacaaagtcctcaagaaaaaaaggagaagaagagccaaacataatatattatacagcagagaaacagaagtccaaatagtcatcatcaaacacatggtcacaactcacaaaaacttgcatctgattgttcagatcaagttgaattcaagcatttagacatgtcaaaactatcatatcatgctgcagaatttccatgttggatttgttctttaccgcgtgtaataaaacaacacaaagtttcaaatatagcataacggttcttttcacatggtcgtgccatcacacacacacacacacacacacacacacacacacacacacacacacacatatatatatatatatatatatatatatatattcctaatttgagtgactatcatgagatcacgtcgagcttgttgtgattattaatcagttttaggaaccttcctatgagttctcctagttgtggatatcactgtaggtggttagaagataagagttgaaaacaaacgttgacaacagcaaacttgtcaacatatgtaatactagctactggctagctatcatgcacatgtaatccgtcaccatcacacattgcaattcaaacttagattatttatggtccaagttattgtgtagatttatataagatctcatgtcatggtaacatgtcatgttgcggaatgttggtattgttaaggctagtaattgtttcttaccaagcattgaaaaatactaaactatagtcaaataataggagtatcaagagctctttgtagatgatgtatctgtacctcccaaaaattatatccatgtgaggctcacttgtctgaactcaattatcgaagcactgaatttggtggaagtttcgttatttttggagcatatataacttaacctacgcgtactttgttcagtttaattatgctctcagacatgaactgttggccaaatgccaatggtattagacattggggagtctatttggattttgtttaacaaaaggttaaactaaaggcccataacctgggactgccaattggattggaaagtctaggtatctgctggtttaacttaagctcatgggatataattatcagatgaagctatacacgcataattaggtgtcatctttaaatttatataaggctcaacttgtgttataacccacgtatatataatttatctatactatataaagaagctaatcctgtgctattaaaagaagccaatgatgattgttagtgattttgcccccattagcatatctttaattggtctatatttttctgccaaacaaatagatcatttgtgaatatttataaatttcatacatagaggacaaacagtcaaagtttataaatgaatttagtccccgtgcttaattatttaaaaatacgaagtactccctccgtttcatattataagtcgtttgatcaaagtttttgagatttgacagtttataagaaaataacaacatttacaagactaaatcagtttagttaaatttaatattgaatatattttgataatatgtttattttctattgaaaatattagtgtaagtttgattaagaaaagagtcaaacaatttataatataaaacggagagagtaatatatacttaagattatttgatgagaaagatattaaaaaaggctaggatattgtctatgtgataattttttaaaaatatagttaacatgggatgtaatatttttttttattatgtttgaagacctaatttagatagatcctactcaagccacagataagagagaagctcatatgtatgtatgtacaaatataataaccttttaatttttaatttgaggattttatgggaaaggactaatatagtttgttttcaagcatacgaagtatgcatgtttttctcagcgaatatctctcgtacgtatgttttccgccttttttttacgaataattatacgtatttatccttctcttatatgtacaggaatcgggttttccatgaccgcatcccttctaatcgtacagcatggaactgatctccatgctgggaatagcatcgatggagttagtttgcatacttacttggcttaaagtatgtttacgataaagttggtttgcacgaggcatactaagaacatttgtagagtattcaatggacttttacggtatatataatacttcttctgtctcgtaatatagttacctataggatcggataagaccctacgatacaatgaatctagtcgtaggttcttacatacgaggatggagagagtatataagatgcagaagggtagtacagtcatattttccaatagaccctttgttcatctgataccttcactatgatcagtactagtaggaaattaattaaatgcaagttgatcttcttcttaattaagaagaaagttgtcgggcatgcagcaaccaatgcaagctaggaaataaagtaaaaatgcataaatataatgcagtttatagtaaggatccatggtcgatctccatacaacttctttaaaccaaagcatgacgacgttcatttaaccaccaataggcactagctagcttaacttcatctccaagcatccaatttccaaaacaaaccaaaaagaaaaggatatgatccaagggccaaataaaagtacagttaaatttgaccgtgcgacttgttcaaactaattaactagtaataattaattagtgcaactcttgcatggcagttctgtcacactatttatcttgcaattaatattgtgagacacatgaactgatcagggcattcccttgcatcaggtcaatggcatcacttaaaatttgataaccagatgcaacctgctgcgattgttaattgactgactcacatggcagacaataaaccgtgagcagatacgccgtctgtttttggtgtaggcagcctcaatctttccgaacattcgttttggatccttgaggactagatgaaagattccattaaatccacttgaaattgaataaattagcgctactacaaaattaatttttctggacgagaccctccttatatagatcataaatactatatagtctgcaaaaatcatttccccgtgttaggtttatgagccgaacacgaaaattcattttcgcagacgggcccattaacagtattttagtatatgggcctgttaagtgacccgcatgcgaaaatagcgcgcatctctcccactcccatctctcccaactcttttttcttttctccccacttatctttttccggcatatatattctccccttcccactcctcccactccctctccccctctacccactcccagcgatggcggcggcatcggctagggcggcggtcgcagtgacatcggcgagggtggtgtcaactagggtggcggcgacggtctcctggcaaccatggggatggcggatccgtcgccggccactgcggggagggcggatccatcgcccgccaccgcggggagggtggatccgtcacttgccaccacggggagggcggatccgtggctagccactgcagggatgacagcggcgggcctcgggtaggcgacgacgatgactgcagttgcggcggtggtctcccagcaacggcagcgccgagagcagcgtcggatccgtcgccaccgggtctcgggcagctagatccatcgctagtgaccgcggggacaacagcagcgggcctcgggcaggacgacggtagcgggtcttgggcaagacggtggcggttggattagggttcgagggctagggctttgatttttgttttattttgttgcaattttatatttttgtgtacggatgacttaagcgcccgcacatccaccgcacgaaaaaatcggatatttgcagactttttgttgcagacgaatgggtgatccgcacacaaaaatgctgttttggccgtctggaaaaacctttttttactagtgtggtttaggtaaatttataatattcgtgtccccaaatacctcctctgttcacaaatatatgtattctgaatgtttaaaatttgttcataaatataacagagtactacttattatggatagttagattttagttatgtagaggtcataactctacagatattaaattttcactcagctggaaacatctgtttcttttccgttgtttttttaagaaaaaaactgcacaccttctttcaaagaaaaaaaaagattgcacactgtttgattggatcttgtttgcctaacggtgatctctcatgcaagttgcgctctgtggtggtggtgtttgaatcttctaaagatgaagatgaagatatagattaagtgtttcacgcaaaacaatatggtaataacatgtgattaattgagttctaattattataaacttgaaaaatggattaatctgatattttagaggaactttcatataaaattttttcgtacgaaacgcaccgtatgtgtgatgtgtcatatgtgtgcagcacacatcgttccaatcagtcaaagaatttgtgtagcattaagatctgtggcttgatgcgtcgatcacaattattatttttaacttgtggcatttaatttgtatttagattgcctaaacttttggttgatcacaatatatagtgaattgtgatcgatctgatttctttggagcctaaactttgcatgcttgtcgccaagaaacttccttcgagaaatgaacatgtatcttattattgtttggatgtacgtagatcaacatttgcttcagataatggcaaccagtaattaattggccttggtaggatgtgatctagcttgcttctgatcgacctaagtacagctgacattaattttttttccttcgttttgaggtttgactcgatgtgaaaatattataatactccctccgtttcacaatgtaagtcactctgatatttcccatattaatattgatgttaatgaatctagatagatatatatctctagattcattcacatcaatatgaatataaaaaatgttagaatgacttacattatgaaacggaggaagtagatagttgtaacaagaaaaaaaaatagtatatgcgaataggattgttgtgtacagtataggcttaaacaaaacaagaacataattaagtgggggaaaatgttcaaatactaaaaataacagcgagaaaaaacagaggccagttggatatttcccctttaatttccacgttctcaactgttggccaatgcaatattccgtttcctattttttctttcaacataaaccaaagcaagacgaataaaggaaaagaaaaatgaagcgacgccacctttcatcaagttttaaaaatctacttgaaaaaagattagattttggactaaaagatatcttactagcaaatttgattttcaaacttcttgctagtaaataatcctactttactagcagatcctttcgagtttcaacaatattttacccttaggctcgctcgcggaaataccaacaaactcactaagggacaatgacgcatttctcttatggccagtcaaggatttgacctagaaaattcaagtcatgtgagcctctccttccatatctatcagaaaactctgcttgaagaatattatagccagatcctacttactgatcttccctggataattcaattcaaagcaaaagcgtgtttttgcttgcatatgcaatgcacatgtaatataatatcgatcttcttccatgagcttagcgtatcatgcagctgacttctatcttaactacgaccgttgaaattattgtttgtagcgcccatcattaccataaaacactacttaagggcacccgtaatagttatctataagctctctacaagagatccatatcagcatatttttctacttagaagagattaaatgaagagagagagcaaaactatctattaacctggagatagtctatagagaaaaacgaggcaatgcattagagaactatagatacctatgtagacataccattgaagtggtttactattaatctagtctattgctgagatgtacatattttgtagataacatattactttaccattgcgggtgctctaaggtgagtttatcagctcctgtgttgttaattaggtcaacacactttagtgcccaagaaattcccacgaagttaagcagcgagcagcagtagacgcgtcaaattcttcacctccaagcatcctagtaagtcgtttatcgttccacacaataatgtatcattttttttccgggaaatgcagtaatgtaattcaaacatatgtaactaatattttttaaataatttatgaagtagttagaaaaagaaaataacgtacgtgcgctgtgttatttttttaaaagaaaatactcttgccatatgaaaataattgttattttaggtattaaatgtgtctcaataagaatgatattctagagtagtccttgttctccaatcacctatcattcatttttttcccatcttatcctaatcattatttcacttccaactatccctggtgtaatagagagcatatatctaggtcatactccttaattttgactgtcaaaaggaacatttattttaggaggagaaacattttcgttacaccaccaatatatagagctaccatccatgggatgaagtagtgcctctttgcaattaccaaaatctatgtttgttttaaagaagtatagatttcatagcttgggaataaatagtctacatgcttcatttagtggcacccatatgtctggtgatagtaggagtagatggtgacaccaatttcaagtctccacgtgtcagttggtgggtggtaacggattcatcactcatcaccatcattagagttttttaaaagagttgaatagttggtatcaatataattataattaattattataaaacttgttccatgtaagcctaggggagggtatttaactttttctttttacaaaatagctttctatctaagcttaaaactcaaaagatacattttattttttattaataacatagtttaaaaattaaatacccaccgtgaaaatcatgcgccgggctctacccttcacatggtttcacgttatcaaccaatcagagccctcggattaaatatcactagttacaggggataaccgaaagaagaggacatgatcgaagactaatgcaaagtagtcctactactccctccgtcccatagtttttgagttttttttacaacgtttgaccactcgtcttattcaaaaatttttaaaattattatttatttttttacttactttattatctttattatctatggtaccttaagtataacttttcgttttttatatttgcaaaaaaaaattaaataagacgagtggtccaacgttataatcaaaaactcaaaattctcttatattgtggacggagggagtatacacaggtcaaacctgcatgaatccctaggctgtagtacggttctctaaccagcaggatggacggcctcggaaactcacaaatacgtacgtcgacggcaacacgttttttacagaaacagaactcgttcaatctacacttacacacccacaatttttacaataatacttctcgatcgagtcctggtttatggacctttctgtgtttctttagaatccagagggcgtaggtaaaaaaaaagcttaactgttctctggctcacgcagtcccacagcttattagccgcctaaaagttgttaactatacagtaatttttgttaatttgcagatgatctcttctaaatttattatcatgaccgttcaattttatcatacggctgctttcacttcacatattgaggatatagtttcagaaaacaatcaaacgattaacattgacgtttgccgtccgtttgttggcttagatgtaggtaaggtcgtaaggatacttccttgctattccttctgagcaaagaaacgtgtatatatttgggagctttgaaatgcaaatattatttttttaaaaaaacaattagtatggaaattgtatgtctagatttgtgctgaaaagttgcttttattataggacgagactaccgatcaggtgccgcacccgatccaggcgtgcaaaaatcaggtgctgtcactagtggagaaaccatctttcgtcggtcggccgatttccacagtagtcacggatgcaataaaaaccggggctaaagatgatctttagtcccggttcaaaagggtaacgggcatatttgatctttagccccggttcgaatgctgtcagggcatgtcaggccccccggaatctttagttcccaaccgggactaaagtcccacccctatatatatatatgtcttcttcctcctctagctgcccgagcaagcttcaaaatttcttcaaaaaagaggggaggtcatgccaaaatttctattgaatttattttggtgattacatacaaatcggaggtgtctaaaaggtttgcaacttcatcctccaatgttttttttgtcatactacatttgcacctatgttttgcacacttttttttgtctccaaaatttagttgtaagttgatgagagagaaaatgtgtgtggggaagaaagaatatatagaaatttagttcatttgctaaacaaggttttataaaatagttgagaaggaaaactctagtgaaagttaatcttaaataatagaaaacaaactaaaatgaaaattaaaagaagtaaaacacattaaaattagtttaaaactttacaaatagtttttaagaattatttggtgtaatattttatgatttttgtatgaataaagatatcttataattattgtatgactgtcattattgtaagaataattatttgtgtacggttttttttgactcatgtagatggatcggcaatggatgtacgctgaccagcggtccaaagagtttattgacggcgtgcactattttttgagagtggccgaagctaacaggcaaaggggttttatttgttgtccatgcaataattgtaagaatcagaaggagtattctgcatccaggactattcatttccacttgtttgagtcagggttcatgccaagctataattgttggacatcccatggagagcaaggtgttgaaatggaagaagatgaagtggaagacgacaatattccggactttgctcagtatgttggatttgaagaaaatcaaatgggcgaggaggaaatagctgctgatggtaacgacattgcggatgatcttggtcagatgttgcaggacgccagggaggactgcgaaagtgaaaaggaggcccataaattggacaagatgttggaggaccacagaagttcgttgtacccaggttgcgagcaggggcacaaaaagttggataccactctggagttcttgcaatggaaggcaaaaaatggggttagtgacaaggcatttggcgatttattgaaactcgtcaagaacattcttccggggggaaacaaattgcccgagacaacgtacgaggctaagaagatagtctgcccgttaggactggaagtttataagatttacgcatgtccgaacgattatatcctatatcgcggtgaggagtatgataacctagaagcatgccctatttgcaaagcactacgatacaagattagacgagacgatccaagagaagttgacgggcagctaacaaagtagagaattcctgctaaggtgatgtggtatttccctataataccacgactaaggcgtttgttcaggaacaaggggaatgctagaatgttgcgatggcacgctgaagagtgtcaacaggacaggatgctgagacaccccgccgatggttcgcagtggcgaaacatcgacagaaaatttaaagaatttggaaaggacgcacgaaacatacggtttggtttgagtacggatggcatgaatccttttggagagatgagcagcggccatagcacttggcccgttacgatgtgtatctacaacctctccccctggctatgcatgaagaggaagtacataatgatgccgattattattcaaggccccaagcaacctggtaacgacatcgatgtgtacctaagaccactggtcgaagatcttaaatagttgtggaagaaggaaggtgtccccgtgtgggacgaggacaaacatgaggagtttaacctacgagcgctgctgttcgtaaccatcaacgattggcctgcacttagcaacctatccggacagtccaacaaggggtacaaggcttgcactcactgtatggatgaaacagaaagtacgtatcttaagcactgtaggaaggttatattccttgcgattccttgcaacaaaccacccggtacggaagaaaggcaagcacttcgaacataaggccgatcaccgtacgaagcctaaacatcgcagcgggaaaacagtgtttgctatggttaaagatcttaaagtagtgttcggaaaggggcctggaagccagcctatagagagcgaagatggtcacgtggcgatgtggaaaaagaactctatattttgggagttaccatattgggaattcttggacgtacgccacgcaatcgacgtgacgcacctcactaagaacctttgcgtaaactttcttggcttcctaggtgtatacggaaagtcgaaagatacactggaagcacgtaatgatctgaagcatatggaacaacgcggcgaccttcacctggaaccaaaggagaaaggaagccattacttgagtccagccagctacactcttagcaaggcagagaaggaaagtatgtttgaatgcttggagagcataaaggtaccgtctggatactccacgaatatcaagcgaataataagcacgaaggagaagaagttcacaaacctaaagtctcatgactgtcacgtgttgacgacacaactgctaccagttgtaataaggggtatccttccagacaatgtccgggcaacaataacaaagctatgtgcattcatgaacgcaatttcgtagaaggtcatcgatccggatagattagaagcccttcagaatgatgtggtgcaatgtctcgtcagttttgagttgatatttccaccttcatttttcaatataatgacgcatctgctttgtcaccttgtgaaagacatccgtattctcgggcctgtgtacctgcacaacatgtttcctttcgagaggtacatgggcgttctgaagaagtatgttcgtaactgtgttcatccagaggcaagcatcgccaagggttatggaacagaggaggtcatcgaattttgcgtagaatttatcgaagatcttcgcccaatcggggtacctgaatcacgcaatgaagggagactacggggaaagggaactctcggaaggaaagcaataatgacggtagacaacaatttattccgtaaagcccatttcactgttctgcaacactcttcattggtagctccttacatcgaggagcacttggctctagttcgcgccaggaacatcggtaagtccgatgcatggattacacggcatcacattgatactttccccacgtggctacgacaacatctcatgggtaacgagtcgatcaaccaacaacttgccttcctggcgaggggaccgtctgggtcgatcgcaacattctagggatatgagatcaatgggtacacattctacacgagagcccaagacatgaagagcacgaaccaaaacagcgctgttcgtgtcgatgccatgggatacgatggaacaactgccacgtattacggtgccatcgaggatatatgggaacttgactatggtcctctcaaggttcctctgttccggtgccaatgggttaggttgactggtgtcacgcccagaaattcatgaaccagaatttctaagctgaatgtgtattaaacccctgtccaggaccagccagggtacacaaacgataattgttgacatacagatctacgtcttacaaaaatatgaaagattacaaatgcagcggaaaaagataaaagcgagctgagcctgaagacttgactcctgcagcgagcgattccattccacaggcaacccttgacggcagcgatgaaaccaacctcttcaagacatctccaactgagaagaacttcaactctggtgtgggggaaaagagcaagactgagtactacccactgtactcagcaagtcataccggaagaggaggtatgatgcaggatataaccaacggaggctaggggttcatttgcataaagcaggcatttaaaaccagtagttgaaaacagtaaaaacagttgtagtaattaagcaatattaaccagtcactgtccaacgctacgccacgttgcaacaggcccaaccaaccacctgaactacactagttcattaagctaaactaggggtgagactaatcacggtgaatctggtcgaccgcccataaccgcgggcacgactattcgaatagttttactctgatcagaggtgtacaactgtacccacaagacacagccccacgacacgttcccgtgcgccgacatgccaccacgacataccggaaagaggccgtgacaggacccttcgcataaccctctctaaccgatcgcaccacaccttagggttcgcccccgtccccagcaggcaacgggtagcccccctttcgtgccgcggtgaatccggaagccgatcaaccggacaccccggccgacccaactccatcacgcccaccctcgcctgggtacgttggctagagaaaagctacactacaaacccagccgttgcccacactggcttgtggtaagtacgataagttcttccagggcatcccgcgaaccggtccttaatcgccatgggcacgactagcaaaaccatgcacccacagcccaccatgtagtgtattttaattaaccaacaccattgcggtggcactaatccaaagctattgccaataatcaaagtctatgctttagtgtgatccccttttgtgcactagttgaactaagcatggctaagcatctcctaaaccagcatctagtcattttaatacccaagttatcaatggcgtaagggaaacaacatatagctgagtaataggacccatcccacatgatattgtaaaacaatgcaatatttaatagaaatacgggacatttgtaaattgggtacaatatgatcaattgcaatgtatgacttgccttgctctcgcactgatggaaccacagcaacgtcttcgagaaaccacgaatcgacgaaacgggcgaaatctacgcgacaaacaatgcacacaagcaaaacatgctataagactactgaaacaggaaacaaaaccatttttaatggattctatacatttttatgaatttactgagacttgaatggtcttaatcggagctcggatgaattagttatgatttttagaagattatctgtgtttttactaataaagaaaaagccttaatgtatttattgcgcaatattgccccagggctgacgtcagcaaggggggaggcgccggcatgcgggccccatgagtcagcggctcaagagagagagagggaggggcgccggcacatgggccccactggcagtggcacaaggcgggaggggcgcggctggtggctcggctcggcttcaaagccggcaggccaagcatggcaagcgacggcggcacgcgcggtcgccggcgacggcaaccggcggcgcggacggcgatggcagacggcgcgaaaagcggcggcggcggccgaagacgacggtgcgcgcgcggaggacggcggtgcacacgggagagagggaaagagggaggagggggagtttctcaccgaggttggccggcgcgagtggagacgacgatgaacgacgacgacgagcgacgggaggacgatggcgatgggcggacgatctccgggacctcctagggaacaaaatgggaaggattagagggagatgggtggtctacggcgggcagaaaccatggccgaaggcggtggcaatggtggtactcaccggcgcgcggggagaagcgggccccgacggtggatttggccgggcggatggcggacgcgacggctcacgggatggtgaacgcggcggcgtcgacggtgagactcggcgcggtggctagcgacggctagcagcggccggagcgcggcaggagggcggcggtgatgggtgtagcggtgcgggagtgatggagggcacgggagagagcggcggaacgaggaaaaaggtggaggggagtgcggggaagctttattggggctcgtgagagatggacgtggccggggtgctcccgatttcgccggtgacgtgggaggtggagagagagtgggaggggattcaaaatttgaatccaccccttgtgggctcgtggcgcgggcgggaaggcgtgggcggcgtcgcggcgacgtgggcgcggggcgcggagtgggcgcgggagcagcgggatacgcggcggcatgggcggtggtttcggcggcggttggcgcgggcgtgggcggccggaggttagggaaagggctgacaggtgggccccacctgtcagcgcccgagagggagagggaggccgggtgaacttcgggagtgggagggaggagcgggccggcgcgggaagaaatgggccggcggcccaagaaaaggaaaaaggagggaaaagaaaagataaaaaggaaaaagaattttcccagggatttaatattgcactttgcttattttaattggttaaaattatttccaaggctctgaaaattccactaaaaatcctgttagcatattttgacatgtagaatccaagaaaaattccacatgccgattccgatgattatttgcatttattaattaaggattcaactctaggttaaagtaaacaattacttcggacgatttattttatgaatttagagcaagggaggggaacttcagggcgtgacaactggtgaggcgtaatgattgatgacagtggtatgacaactgttgaccttaacaaggttggatactcggacgaaccttttgtccttgccaatgatgtaacgcaagtctttttcgtgaaggacatgtctagcaaaggaaagaagggcagagggcctgacgagcctaagcgtcaagtggttctcccaggcaaaagaaaaatcgtcggagttgaggacaagactgacgaggattacgatcagttcgatgggcaatcccctttcacggtgacgattgaccctagcatcctcctatcaaatgaagacaccccttactcacgcagcgatcacaaggagggaacaatagttaggagaaagtacgtgcggtcaaccgtcaccgccgatgtaatgccgtaattattgtgtacacgatgtaaactattttggatgtattgattatccatataaatcaattgatgtatggcataatttactatcattcatatgctacatttaattgactatcattcatatgctaattataattgactagagaatttttaaaagtattaaatcattcatgtggcatttacagatgttaattagagtttttcacaatttaatttactatctttcatatgctacttatatatgactattcgaatttttaaaaggtttaaatcatgcatgtggcatttacatatgttaattagagtttttaacatttaatttaatataattcctacgctaagtatatatgatgattacaatttttattaattttaaatcatacagtatgtacatacatatcttaattagagtttttaccaatttaataatatcattcatatgctaagtatatatgattattggaatttttattaattttaagtcatatatttgcttattacgatttatccacttaatttattacagacaaaaataatttttcgaagtaattgtcattaatctttgtactttaaataatgttaatgcattaacttctattttagaaacacatatgtaagcaaaaataatatgcagtgctataatgtttagtcccggttcttaaccctaaccgggtttaaaaagaatttgaaaatagcgggaaaagatctttactcccggttgggg

SEQ ID NO: 9237 - DNA, 88329 bp, Oryza sativa
  unsure (1)..(88329): unsure at all n locations
cctctgtttctgttcgtcacgtcctctgcttgggtttcgtcgaatgcctgggatgcgtgactgttaatttggtcctctttgtgtgttcagtggtggtgattgtatcagggcggcgatcggtgggcgagccgacgctggacgtctctgagatgctgctccaggcggcgcaggcatggagaagccggcgcacgcagcgggaagctcgcccggacgcgcttccacctcgccatcctcctcgtcccgtcgccgcggatgggcgcgggggctcaggcgaggggaccagtagagcgcgggggcgcggcgaggaggggacggctcgtggcggagatggcgagatgatggcgctggtgagaacagtggatgtggccgtggccggtggtttggccacgctcacgcacggcggcgagcgggatgctggcgcggcggtggcgacggaggagaagagaaatggcggcgaggtggggacgaagagggggatggaggagcgggccgcgcgttcgccgccgccgcccaagcggagcgcggtgtcctccgttcgccagcttcctccaggttgcggaagggacgccgctcttccactcgggcgccgccacggccgcggccgcgatggcgacggtggtgttcctcctctcgctggcaacagaactgatttgccgttggaagctgtggtggatggtggtgatccaattgcaaatgtgcatcaaatcttcagcaaatcttcgcatgctacggatgagaatcaggtcgcttgcaaagttggttcactggaggatgttgtacaagaaggggcagcaaatagtggtgaattgctggggtggaagcaagtgttagctcaagccgcgaatgtgcttcccaagaggaggatggtatccgcgacgcgccgcttccctcctggatgtgggagggacgttaagactggttcaggtttggaattcatggctgttgatgcttcttgtggtggtgtgtcaaaggaggtggtggcttcggatggcggtgatagtttggttagccaggaattggaggagggtgaggtggctgatgaggcatactctgatgtagattcacaaaatgttgctgtggatgattccatggctgcagctactgaagatgttaaggtgatgaacaaatgcaaagggaccttacccagagccgctgctgaaccttgtgctgagggtccttccaaagaacattttaagggtacgagggagtgtgaaaatgataggatgggaaaatcatccatgaatgttgcaacagaagtatttggtgattgtatgatgagaagtaagatactattgacagctagaaaagcagtcaagtcaccactgaacattctgcatagacgtcccttctctaagggaaaagaggagtgtgttgtaacaaatagtgctccatgtggtcctaagaagaagttgaaggtaaaaggtgcatatcaaactaaagatattcctatcaagattgtctctacacctggattagggggcaaggacaaccttgtcgacaaagaggctttgatcttggaagatgatgatattttgaaggcactagctgttcatgatggaacacttaagttgtatctcaatgcttcctcatctgtgcagcatcacgggcaacatggaagtgggaatgctgatgataggaggaaaaccatgatgctgtgcaggaggtttcagtttatacgccaggctcttgtacaagctgtcaaacagggctcgttgaaggttctaagagctgaccttgaagctgataaaatcgttcggaaattgccgggctttatcaaacctggacctattgtgggaaatgttcgtgttgtcgaagttggtgacgaatttctatacagagttgagctagcccttgttggtctccaccgtccataccagggaggaatcgataccgccgatcataatggagtgcttgttgctataagcatcgttgcttctggaggttatcccgatagattgtcaagttcaggtgaactcatatacactggttctggaggacagcctgctggtaagaagaaaagtgaggatcaaaagctagagaggggaaatcttgccttgaagaattgcatcaagacaaagacacctgtccgagtgattcatggattcaaaggccaaaatggcaaggatgacagttattcaagggctaaacaaatctcagcatttacttatgatgggttgtatcgtgtggtggattactggagagaaggtctaaaaggttctatggtcttcaaatacagactacaaagaattcatgctggtcgatgaggttgatcatctaaatcttttctagtaagcttattatttagtcttaacaaatgattcaggcagtaaatggtacaatgagattcttttctacaccatggatacttacgccaatctaaactctcttgcttgttaggtacagaatcaagatgtattttttttgtcctgggtgatataattagcttagaaggacaagaagttacatgggcctggttgaaggtatgttatagttgcagggtatctaaaggggacattttactgtacccctattggttatggtagtagtgtagtaggaagcagatcatctaaagctatggctattttagtcatgtacttcgttaaggtgaaggggcaatttagtcttccgattatcccaatcgaagcaaaacaggactcgttggtttgttagatcggcccaagcctcattctgcatctcgacgcacgacggccaaaccacagcgccgtccatatttgtatgcattttccagaggtatctttgcgataacaaccatgcaatcttagatatatttgtgaaaagaaaaaagtgcatgcattggaatataaccgtttcttgccttgtgcaaaagctaccacttctccttcagtgtgtacttggatcatagaaggtgacaccttcaaaatgcaccagacaagatgccagtaacaagaacatgagtatgtggattggattgtcaatcaccaaaacccctgaattcagctgtgcaccacagctgccgtgggttagctcgtataagagtgtgcccaaatatgaaaatcacactcatgaaaatcaaaatcatttctattaacaagatgcagtaaaatcatgacaacatcctgaagaaaatttggttagctgatagaagtcatagaacaaaatgtatttcaaaatatattccatcactgatttcaatttcaggagcccaatttttgtactaactatttaactgtaggaaagcttactataaaccaatgaaaaaaagaaagcattatatgatgacttgtctgaattacagaatatgtggcgtagttgtccacttacaaatgaattcatcaactaattgatctcaaggttattccagattgtagataggagcacatctcaagcttcaattaaaaatccatccaaaatacgaattgaaggacaaaagtgaccagaattaggaatgcatactctaatactctattctcaggagtcaggacagttagataacctgctggctgttgtgctggtagccttggcattttcaccttcacgtgtcaataaaaaagagtaaatatgactttcgtggagaattgcttgagtacagtgtacactggatgggatcacctatacatttgtcgacaaattctcttctaaaaatttgacaaatgaaattataggacaattgtgatgtaggctgtgtttagtttacaccaaaattggaagtttggttgaaattggaacgatgtgacgaaaaagttagaagtttgtgtgtgtaaagttttgatgtgatagaaaagttggaagtttgaagaattattttggaactaaacacggtggtaatttcactgtaactattataacttgtatgtaacttttaaaagtttcttcgtagtatactatttcggtgaaacggaagtcgtgggaacgaatcctctgacatatgtgtgtgttatttttttccttcctcacttgcacaaatcttgaaacaaatctaacggtccaaaattatgtgaaagttatgtataagttagactgtagttacatgcaagttacagtataattacatgtaagttacattataattacattacgattgttctgtattacatctgccaaatttttaggagaaaatttatcgacaaatgtatagcaaaattgttttgtaatatattgattagaaaattctcaatctcactcttcatagtatggttttgaatctcaagggtgatgttttccggtggcgaaaatgggcgtgaagtgtcgctcgaactcctggaaggggtgagagtcgaagcactagaacacatgcgcaagtacacggaaggcacttcggcaacctataacaagaaggttcgaccgatagaactccggcccggccatctcgtactatcctaacctatatttttccttcaaatttaaaatcgggtataggtagtgccggatcggataacatgtcacttgtgccgtatcacattccatattaatttctcgaaatcggatacatgaaagaatttctatgtgcaattcatgcatattaaatatagaggggcaattaaagtaccaaaagagataaagcaagaaaacatttatgtaatattacctatgatattataaactagtgtaatcaatattttatcatgtttgtaggtgaacttataacagattttcatatatgtataataataatatgggaatacgagtggacacaacttttcccttattaaaacatatcttttacgaatttggattcgaacttggatagtatcgaatatccattttctctcccatgttcttgtgagcctcaggccaggcaggtggtcggaaaatgcccgtcccattttcgcccgtagtaagaactagaaaaaaaaatctgaatttacccctgaactattgacaccatccgagtaaccccataaattacaaaaccagacatatctacgcccctaaacttttcaaaccagacaacaaaacccctaactcaatccgaagcggtttggattttaggtgacatacatgtgttagtccaaacaacaaaaagtaataaaaaaatagtgggctcggtcagtctccctcctcgctttcgtccacttccatctctctctctctacccccaagtcctaacagaaaggagggaggtggcggaagctcagctgccggaggaagaccgtggcaaaggaggcgtcctcgggcatcgaggtgcatcatgacctcccgtggaggcggcggaggcgctagctagcacagagcacttgacgactttggtcttgcatcgatgcctcgacgcacgcgcgactgcttctaggatagatggtgatgtgctcgaaaatggctcaccaaagccatgatcttgatcacttggtggatctggaaggagcacattgtgcgtatcttcggcagagttcagcgccatggtgttgcagacctagtctagtgtgtggcggtagctattagcggtttaagaaccttgaggcggtcttgctttaagcggtatgagatggtcttaccttggcaaaactagtttcctgagattttatattctaaaatccttttaaaatctaacaaaatttagacggcgtccttcgaccgctcagtgaaaaaaactaaaaattatggtcgaagttttagaattggaccaaaattatctaaaacataaccaagtgagtacaaaatctattaggaaaacaagaggagtgttactatccctaaatagtatggtctccgtttcatattataagttgtttttattttttttctagtcaaacacttttggtttgatcaactttatagaaaaatatagtaacatctgcaacactaatttagtttaactaaatataatattaaatatattttggtaatatgtttgtcttgcgtaaactggatcaaacttaaacgactaagagcaggtacaataacagactataagccagctataaatatattttaaggagataaaagaggaaagataagagcagcgggctacagatttatagctagctacaacacagactccaagacacatgtgtgtatgatagatgagaccatatattgattgtgtagtatatgtttatatgtacttcctccgtttcaggttataagatattttgattttggccaaagtcaaatagctttaagtttaaccaaatttgtagaaaaaggtagtaacatttttaacacaagacaaatttattatgaaaatatattcaattattgatttgatgaaactaatttaatattataaatattattatattttctataaacttaatgaaacttaaaataatttgactttaaccaaagttaaaacgttttataatctaaaacggagggattaactattgtataaattggctattaagttaattattaatgatttagagccaatagtttactataccattaaacttgcactaatgatatcatgaaatgaaacggcgggagtagcagcagccgtttcagcagctaccatcgtagaacagcatcattgccacaataatgcccactaccagtctactaatttacgccgcagtaaatactcctactccaatgcaaacctcaccggtactatataaaacgagaaggcgccaggcgggttgcaagcaaacacacgacccacccgtcgttgggtcagccacgtgcaccgcgaccgagccggaccagtttggtctcggacagtcggacccgagtcaaccttcagcctctggtgcggcgtccgcccgccacgtgtcctcgcctcaccaatcatcacccatccttctcttctcggccccaccaactctctctctctctctctctctcgctgctcgcgcaaaaaccccaactgcgtcgccgtgctcgccgcctcgccgcctcggcctcgccgcgcgctctctcgccgccggtgtctggacgacgaggaggtgagtccgtacgcctcgcctctgtgttgttcttcgtgttcgctgcttcggttcgtcgtgttgtgatgtgatggcgtgttggatgatgtgtgtaacggctaatttggtgcgggttttttgggcttggtggtggtggtggtggtgatttgcagggcgggtggcggcgggggatggatcgctgggaggcgttgatcgccgccgccgcgcggcggagcgagccgccgagaagcgggtgggcggagtggggcgggggcgggggcggcgacgctcgcgcgacggcgattccgtctcgctgtcctcctcgtcctcgtcccgtggctgcgggtgggagaggcggggggggtgatagaatgcgggggcgaggcggtgaggaggggacgtggaagagtcatggtggagggggacgaggtgcggagcgcgcgggcgcggtggtggcgccgccgagggcagcggacgcggcggggacggggacggggacggggaggaacgcggtggccgtcaacggtggtgcggcggaggatggtaggaggacgcctctgtttctgttcgtcacctcctctgcttgggtttcgtcgaatgcctgggatgcgtgactgttaatttggtcctctttgtgttcagtggtggtgattgcatcagggcggcgatcggtgggcgagccgacgctggacgtctcggagatgctgctccaggcggcggagacatggagaagccggcgcacgcagcgcgaagcccgcccggacgcgcttccacctcgtcccgtcgccgcggatgggcgaggcggctcaggcgaggggaccagtagagcgcgggggcgcggcgaggaggggatgactcaagtggccgtggccggtggtttggccacgctcacgcacggcggcgagcgggatcctggcgcggcggtggcgacggaggagaagagaaatggcggcgaggtggggacgaagaaggggttggaggagcgggccgcgcgttcgccgccgccgctgccgccgcccaagcggagggcggtgtcggccgttcgccagtttcctccaggttgcggaagggacgccgctgttccactcgggcgccgccacggccgcggccgcaatgccgacggtggtgttcgtccgttggatcaggcgactgctcctcctctcgctggcagcaaaactgatttgccgttggaagctgtggtggatggtggtgatccaattgcaaatgtgcatcaaatcttcacatgcttcggatgagaatcaggtcgctcacaaacttggttcactgaaaaacggtgtacaagaaggggcagcaaatagtggtgaattgctggggaggaagcaagtgatggctcaagccgcgaatgtgcttccaaagaggaggatggtacccgtgacgcgctgcttccctcctggatgtgggagggacgttaagactggttcaggtttggaattcatggctgttgatgcttcttgtggtggtgtgtcaaaggaggtggtggcttcggatggcggtgatagtttggttagccaggaattggaggagggtgaggtggctgaggaggcatactctgatgtagattcacaaaatgttgctgtggatgattccatggctgcagctactgaagatgttaaggtgatgaacaaatgcaaagggaccttacccagagccgctgctgaaccttgtgctgagggtccttccaaagaacattttaagggtacgagggagtgtgaaaatgataggatgggaaaatcatccatgaatgttgcaacagaagtatttggtgattgtatgatgagaagtaagataccattgatagctagaaaagcagtcaagtcaccactgaacattctgcatagacgtcccttctctaagggaaaagaggagtgtgttgtaacaaatagtgctccatgtggtcctaagaagaagttgaaggtaaaaggtgcatatcaaactaaagatattcctatcaagattgtctctacacctggattagggggcaaggacaaccttgtcgacaaagaggctttgatcttggaagatgatgatattttgaaggcactagctgttcatgatggaaaacttaagttgtatctcaatgcttcctcatctgtgcagcgtcacgggcaacatggaagtgggaatgctgatgataggaggaaaaccatgatgctgtgcaggaggtttcagtttatacgccaggctcttgtacaagctgtcaaacagggctcgttgaaggttctaagagctgaccttgaagctgataaaatcgttcggaaattgccgagctttatcaaacctggacctattgtgggaaatgttcgtgttgtcgaagttggtgacgaatttctatacagagtttagctagcccttgttggtctccaccgtccataccagggaggaatcgataccgccgatcataatggagtgcttgttgctataagcatcgttgcttctggaggttatcctgatagattgtcaagttcaggtgaactaatatacactggttctggaggacagcctactggtaagaagaaaagtgaggatcaaaagctagagaggggaaatcttgccttgaagaattgcatcaagacaaagacacctgtccgagtgatccatggattcaaaggtcaaaatggcaaggatgacagttattcaagggctaaacaaatctcagcatttacttatgacgggttgtatcatgtggtggattactggagagaaggtctaaaaggttctatggtcttcaaatacagactacaaagaattcatgcttatagatgaggtcgatcgtctaaatcttttctagtttgcttattgttaagtcttaacaaatgattcagacggtaaatggtagaatgatattcttttctacaccatggatgcttacgccaatctaaactctcttgcttgttaggtacagaatcaagatgtattttttgtcctgggtggtataattagcttagaaggacgagaagtggcatgggcctggttgaaggtatgttatagttgtggggtaatctaaaggggacattttactgtacccctacttgttatggtagtagtgtagttggaagcagatcttagtcctttacttcgttataaggtggaggggcaatttagtctgttccgattatcccaatcgaagcaaaacaagccttgttggtttgttagatcagcccaagcctcattctacctctcgacgcacgatggccacgccacagcgcgtccatatttttatgcatttttcagagatacctttgggataacaaccatgtaatgttagatacatttgtaaaaaaaagaagtgcatgcattggaatataaccgtttcttgccttgtgcaaaagttaccactttttcctgcagtgtgattggatcatagaatgtgacacattcaaaatgcaccagttttgtttgtagcagtattcagatcaatcatggatcgctgatacgtgagatcaagcaaatagacaagatgccagtaacaagaacatgatatggattggattgtcaatcaccacaacccctgaattcagctgtgcaccacagctgccgtgggttagcccgtataagagtgtgcccaaataacaacagcaagccaatacaactaattttggtaaataacctaatcaaataactataggcctaaaacaggtccacccacactcccacaggatgtcaggattatcatgtgttttagcaatttatcttccagggactgaattggcacaaaactgaacaagaacaaaacatataggatgtgagaattaacatgtgttctgtacttcatttttcaaggacagaacaagtgcaataataaataagaacaccattttttcttctagcttgatgactgataattctcaaaggcaatgcatttttatcttcatgatgataaaccaactgtttcatttgaaaagtgacaaataaattgctttcagcttcatgaactcttctggtcttcctccatatcaccttcaccatacattaaataaaattagagtggacaaactgctaatccaaaagtactgtatatacaagatcctcaaggtcaagtcacactcctgaaagtaaaaatcatttctgttaacaagatgcagtaaaatcatggcaacatcctgaagaaaacttggctagctgatagaagtcattgaacaaaatgtatttcaaaatatattccatcactgatttcaatttcagcagcccaatatttttactaactatttaactgcaggaaagcgtactataaaccactgaaaaaggaaagcattatatgatgacttatctgaattacagaatatgtggcgtagttgtccacttacaaatgaattcatcaactaattgatgaaaaatccatccaaaatacgaattaggacaaaattgaccagaattagcggacatcgaggacaaataataaaaaggaatgcatactctactctcaggagttaggatagttagataacctgctggctgttgtgctggtaacgttggcattttcaccttcatgtaggatcgaatagaaagaactaagccaaccaaagagagtgagtaaatggttagtatacctaaaaacccaaactttttgcggaattaaaagttactctcaaatcgatgtagatcggtctgaccgaagttgatccgccggtctaaccggtgtagatctcccagttggaccgccctgaaatcgcctctgtctcctgaagccgtcgccggtctgaccgccgtatacccgccagtttgaccgccgcgatgccaccggtctgaccgccggtgtctcgccggttagaccgccgaacctgagcaaacacaaatcaaagaattctcgaagtagatgacaactttattacttctctctgtgtttacaaagtgcaacaacagcactcctcacgaaaatcttggctaaattcgaaaccctaactcaactctcaactcaatgctcttaaaagcgataccgggaagcctcacgctccctctctatttatacatgaagtaggcagcctaaagccactaatcaaactcatactagaagtcctaatccacctaaccttcccgtacaagaaacaaactttacaaactccaatcataccaaatttggactccttcaaaattcaactccgtatcccatacgcacacaatatctccattgtatgccatatggaatcttcaccaaccatgtgtattgatctttagcctaagtattccacatgatatctgactgtccggacgtcatcttatctccaagtcgactcccgatccatcaccggcaatactctcctgaggcatcaagtcacctacacatgaatcaaacaaagaaaccatattccaataccaagctatctccaatttgactcattgttagcaaacaacagtattacatacgcatagtatccatctagaagccataaacaagaaacaatcacggatatccaaacaaacaacctgaaaccgaagccgacacagagtcggccggtcagaccgcgggctggctggtctgaccggcaaccactgcccggtctgaccggaccaactatccagcagcacctgtaaatccaatcatctccaaaaccactttgccaataatctccaaatatcaaaaccgataatcacagatgccaattgttcatcacagaataaagaatcaaaaacactttgattttacacttcacatgttaataaataagaataaatgtgaattccgtggagaattgcttgagtacagcgtatactgaatgaagtaaaatacatgagttaactttgtaacccccccccccctccccccctcttctcctcccacgcccattttctgtcgaagtaaatccaccagtggatgtactgtaacctccacaattctaagcacagaattatgccaccacgggtccaaaggtatgatgcaattttagaaatttaatgtggcgcagaatacaataggtctatccaaaatctgtatagaggagggctcataagcagatacatgttaggatagggaattacaatgtatgttgtcatcagaatgcatcagcatggtaactatattatctaccatccccaaagtagcaaacatttatagggatgataacacggatacagtctggatagttcaactttgtgtaatatcttggttagaatattctcaatctcactcttcgtagtgtggttttgaatccgattccctcaggtgaagtttcaattaatcagtcaataagagtagtatatttgattattggctttcacacacatcaaacaaatcaacaataatagagtggcacatcaaataaatcttgtagaagaacagaagattgagggcttcgaagtgttgtgagggcttcgaagttcaatcattccaccaaatgccaatacatattaagtgtccatatcaatatgaataaattatttagaatttacacatagctatgtcaaatcaaatttgttaaagttcatgatttgaatttgaaaaatacatggtatagctctgtgtaaatttcaaataattcactcatattatttaggagaagaacacacccttagctggtagatcctagctttgttccctccctgttcaccttataggatcgaacacaaaaaaaccaagcctaccagagagggatgaatggtacgaatatcaagaacaaaaacttttagcggaaacaaaagtttatcctctaacctgatgaagtccttggcatagccggtctaaccactgtatgcacaccggttagaccgctcatctacgttggttgtctcatgccagcaatagaagcagagtcagctccccctacctatgctattgcctcctcctcgacctccctgcatcatccccacctctcatcccacatgagcatcatcgttttttgtcaagccgagcagcatcgctacctccttgccgagccgaactatgtcgcccgccttctctcttggcctctccttatcaatgccactacctctctatcgagacaagctgctctactgcctctaggtctagtcctgatctgcgtacctagtgatctcgagctcagaagattccaaactcaacgtcgtttggcttgacttcattgcattcttcctagcaccacatcagttttgacctcgcccacctcctcccaaaactccatgggcagcaacaacagagagagagagaggcaaggagaactgatctttgtagtcagaacaccgtcgaggcaagtcttcgtcactagagaattgaagaaaagccaaggtagtggtggagaagagggcagggcaacgttgtcctagagacactaaaaatcccaagttcacctgtcttgtttaactagggaaggctggaaaggcatatattagagagtcaaaatagaaagtttattggagcacaagaatgagggaatcttttggcatggatggttaaatggagatttggatagccaaatttgatatctcttggagatgatgactgttatctcacttagaagatagtatatgcaatatgttagctctaggtgcaagtaattttattttattcattttaaactactctttttctttccttccctttttttatgcataagtcatcaacctctccttcagtaaaatatatttatctaaaatgttctacacctacaattacgttgataactagccattatgcaactaaaataggggcaactccttacatgtcaccaagcatgtatagttagtttttagtgccttgaaaggaatttatcaaaccatgagtggcaaatcaattgtgctcagaagcctcaataaacttctgctgatctgcactctaggaagctaatggttgatctgtatacttcctgcatttcatccacaacatctgtttggcatgtggtaattaagaaaaacaaataatccaattaggtgcaatcagcacaagtaccaataaaaagaccatatcaagagaacttcaacatccttttgtgctgcagatcacttggacaagatccattcttttcttttcccggtgacgatcaagatctgctgaaaaagctgaattaaaagaaaggcaatcaagcagcacaggaagtaataatttgacactactaagctgaataaagaaaggtaatcagcacacgaagtaataatttgacactattcatttttttcattcattcacacgctctgagcacattatcctcaatcctgctgcctttttcttctctctttcctctttttcatgttcagatctgcattctgatttgatgacatacgaaatgtgaatcttctgacatctagcatatggggtggaatggtaaaacagaatttgaggaaaatatggacgggcacacggcactacgtcaaactggttggcaacttgtgatcatctgaacaattgcaacaagagtacattgcaaaatcatggtctctgctgccattattccattattttgcaatgatctaaatatagacgacaagatgaacccgtatatgccatatccaggtgtgatataaaaggaatataaaaggaagctgtacacatttgctgatactgtactaaaataggcgttctgaattcacactgcacatcaatcagatccagatcaagaaagaccataaagaaaccaaattaaaactggatccttcagctttgcaggagtcagcgtgaccttgtattccttgtttgtttagatcaaacattatttcattaaattcgaattgttacaatactctctagagaaagttcacttgtaaactaattgatacatagcatttgtagaaaaatatgaccgtattgttggagccaaaccgcggaaaaagtagtacagttctcaggagactaataaatctaacttgagaagaagagaaacctcagcatatctcaattatcacatttgattcatgtcagcttgaaaactatgcagaacgagccgtagcttcagacccagtggactcatcaggcctgatgagcacaaaactttggttagtagttgattatatggagaaaaaaaaagcaatgaagaattagggataggtcaaattaaactgaagtcggatgagaaaattagcaagaaccataaagtaaaatcgcaaacaattgatatctaaaagaacatattgctttttttatgggccatcagtttgtttagtgcatctgctgttaaaggacaggaaggtttatagtgcatatgcacaactgcaaaaaattaatcagataaaattaccatccacccccaccaaaacccaaaaaatgctcaatccattgttgctgtgacaaatatattgtacctttgaaactccttcgccaacttccatcctagcaaaattgccaactgtaacttttgagccaacttcctttgacaaatcattcaggacgctctgaaaatgttgacatcaagaagcaaaaccattatgtaccatgaattcacaattcaaactagtactacataattaaaaaaaaggaaaaggttttatcagttcaccttgatgtttgtgctgtcattgacaacatatttttgctccaaaagcacaacttcttcaaaatactttcttagtcggccttccaccattttctccatggccatttgggattttccagagctttcagcctaaaaagtttcagagtagtgtgtcactaaatcttaaataacttgaatgcagttcagtcatattccagatggatgtagcccatgtgtctccagaagatgacaaaagatattgctatttaattcatggaaaaataaacataattggtatcataaacttctaatatacggattcacattgtgttccattgcatagctcatctctgaattctaacagcccagctgtcttgcttacataaacataaaacaatgtgacaggaatactaattgagaaaattctattgtgagtcaacagtttcctttcattttcttttagttataatgagttaggacttatcacaagatatgcatttttctctcaactataggtcattattgcctatgtatgtttttctgttaagataacatcagaacacttggtatggtatgaccttatgatacctgatatctctatgtaaagcacacgcccatttcttcaattgtaagctaatcatatagaattacagtgatgctaaatttttccggtgcaaaggaagtaacatttatcagaataacgtacctgagtccggagtatgtccctctcattttcaacagctgaagcagagaccagttcttttgataaaaacaacggctttgtcgcaacgatgtgcattgcaatagatttcccgactctctgaagagcatcaagaggagcattgctgtcttctgcctctagtgtgatcaagccagcaagacgacccaaaccttatttcagaaaaaaaagaaaaagcttattcattcagtgaacgagaaattgcaccatttaccatatatcaatacaacttcatacttctgaagaacataaaatatggattgctgttaggaatcaaattaataatgcgagcaagcttggccagctcagtgtaagaggcaagtatcactaaagtcgtattactatcaatggttttacaaatgagcttgcatcctactaaataaataaataaataagaagctaaaattcatcactggacaaccctaagagaatagattaactataatttagattaaggaaggtaatgtccagaaagtccaacaaatttagatttctgaacccactgccaccccaccccccggcacaaaaaaaaaaggaaaataaataaaggcaaggacaagtatgatccatgctcagtagtcactagaaaactttcatttggttatgtgcactcaaacttagccaagaagattggaaaacatgcatgctacattcttgataaaagccaaagggcagagatttgtgcatgtacctggctggggacatgtgtgcatataagagcaaacaacaccatgtgcagttgtggacataatgaaacctcttctgaatttgacattctccccaaccatggcagcaacttctgtgacagcactttggactgttgtctccccactaagtttaggatgatcaagattgacattaaggttctgcatgattgagagtttgagacaactttataatatctacttacacatggaaaaaaccaggaaaagaagataaacatatcatatgaagctaaccaaatcatatcatgggaacagcaacagacattactgtgtgcacaggataagaagctgtgccctctgtgcaaagggcacaggaagtgagagagagagagagatcctgggctcgcacatcaacgtggcttttctctgagagcatggctctagtggagggagatagtgcgcaacagttattctaagggggggctgtagaataagcctacccaaactaaatatctgataagcactaaaatcttcatgtagtttaaaaaagcaggatatatatacatatttacaatggctacaatatctacaatgtggttgttaatgctggtattgcaaacatgttcatttgtatcatgatcatctccacatagcatcctctgtaatactagagccaagtcacatttatcatggcatttccagtccactgccatgaagttcttgtgtcacatatgactaaatggttgagccattttaacttgtttccttttatatccaacataaacagtgtgctaaaaatcagctgtaggtagcaattcggtgccaggcggcagcttggcactgcgattagcactttggcggtgagctcggcagctgccccacctcaatagtcatcctcggtccaactcagactagttgtggcagcaagtatgcagtgaagagggcgactagtggcctaggcggctcagtacaggcgaggatataagtacctccccaccctagctgcccaacctaatccccaaattggagcacgtgcaacagcggctagggtttgggagaggcgatggcgattgaggtcgccatagacgttgccgccgccaccgtagttagatccactggcagctcgcctgctctgctgcgactcctactgctccgctgcgacttctactgctccatcgtccctctgttctccccgccaggcactcaccaccatctaccatctccacgccaccagccgcttggacatatgcaccagcacaccagcacagtgcacaattatggccaacactgaggaattgagcaagtaagccatgctctttggcctttgctgtgctacagtctattctctagtatctatatactgctctgttcttgtgtgctctgctactctactctacactatcagatattcttccacaatttgcttgtctttgctgtgtgggtgcggctggtggtggtggtaaattggtgttgcttgctgccttgatggaaagcttgtacttgcttgcttgctttgcttcttgctgcacctgctttctgtggtggactggattcgaaactgctttttcgcggctagtcgtgcgcaccctcccccgcgtcgcgcaaagaggagggcggcagacagccatgcttttccttttttttttccttttcctgtttctttccttttttttctgtttctttttcactttttcgggttttttttttcggtttgttatacaaactatgtatacacatatactaagtttgtatacatgtatattttttccttttttatacatacgtatataaactttgtatacgtatgtatacaaagtttgtatattttgtatacgttgtatacaaactttgtatacatgtatacatattttttatacatcaaaagtgtatgcgtatacatataaaaaatgtagggtatatatacaaagtttacacatattttatcgtctatatacgtatgtatatatacctcatatacatgcgtataaactttgtattgtggtatatatacaaacgtataaatactgagactagatgggtagcgctggtcgcgcgggtgtgccggcgcgcgaccaatcgcgtatcaaccatccccgactggattggcttgggggtggtggtggtcgtggtggtgatttagtcaggtggatggctggatgctcttgcagctgtgtggtgggtgttacataaatatgatcacaagtatcttaatatctctatcagtacagcacactgaatccatactatttgaaaaggtagtgtgtagtgggcttaaatacagatacaccattattgaaaagataacatgagattgatcacagcacctgttaaagtagaattttacatgaaatggaacttaatgaagacttagatcagttggtttcaaatttgtaaaatgacgagtcaatcaattactggtaaaattggtggtgcttctataaattacacaataaatgcgccataacccaaattaatatatggataacttcatacctccaaatagtcaggaccaaaaggaaaaaccaattcaccaggatcccttgctgataaagccaactttgctaaagaagaagcctgcaagtttgatgagatataaaaaaaaatcataaatcaagtttaactaccttgaaaccacgcacaagcacaagctgaacaatcaaggcagttaaataagtatgctgttgtgatgtctaagatagggaaaagaatatcctacaagatacacagctatcaaagaagttcaagagtacaactgcaacagagcataatgtcataatgttgaaatactcaaataaaacctacaaaagaaactgaaagttaaaacatggacaaaatgattctgttcatattttgatatgccacaaccaacaagctatacctacatgctcaaatacactatatgtttagcatgcacaaaaagtaggcatcaggaatggcataaagatactgagataaaaactaaccagatactggaaaacatcatttcttgccacaaaatccgtctcacagttaagctcaaccacagcggcccttttctcatcttgtgcaatagcaagcaaaccttcagctgcagtccgtgaagactttttggcagcaagaaccacccctctcttccttaggtccttctgtgcaacatctgaaagaaatcaacaaactgtcaataggattaacagatacaaacaagtatgccgatgaagtaatgctaatgcaatcagaaataagcacaaaccaatatcccagttgcaactaactaaggaagccttcacatctttgattggagcgctcgtcctctccctcagctgtttgatgagattcatttgctccgacgcaggaacttcggagctgaatctcctgagaagtgtggcgctttgatcgacattgctgctcgaaaggtgagcctggaacgctgaataagagtaaccccgagcagaatgttgttgggcgcgaaacagaagcccaatcatgggctttctagcactctgactccaggccattctcacaatgttctgcaatgcagaatatgcagtactgttggtaaactaaactatcatcaataaacatcagaaaagcgagctccaccgattaggtctcaactaaagaaaagagatatgtcatcccatttctgcaactaggcagcggcggatccaacttggccaaactttttggggaacaaacaacaaactgttacttgtattaaggttaaggctctgaaattaagagaggagcttcttccagatctagaagaagagctagggttaacgaacgcaagcaaattccagacaaaagtagtcccggtgggagagagagatgaatcaggatgtggatgctcaccaggatcccctcccctgctctgctcgccagatggagatcggcgcccctcccctgttcagcagagagatgacgcaaggagcggaggagacgagacgggatacctcggcgaggacggagacggagacgcggacgacggcggcggcggcggcggcggcggcggcgacgagtggagcgcagccgcagggacgggacagtgagggagacgagggttttgggttttccgtctcggagggctggtttgtacgtcgatgggccgagcttacgtgggcctattgggttgaagcccatttggtaaaacttcgacacatgtaggaataagtctaatatgcgtccctcaactcatgcatctggttgaaatgcacccctcaaccgcaaaaccaggtataactttcccctcttcatcccacgtggcatcgacatggcgtttacgtgacactaaaataaaaataaaaagaaaattttgggcccacgtgtcacatatgcgtaaccatgtatttgcctgccaccctttagaaagccaagtgcagagcacttgttagttgttagtacaaacctatcaagacggacaccttaaatccccatactgtcaaacaactctacggctactccaccacacccaatctgagcgtatccttccaccacacccaatctgagcgtatcctgtgataaccgtattccaagtagttgggcgcctgggcctcctgttgggagtgcatgaaacaccaacattgcctcatccatgctgcgaagctttgcatacaagttgataggcactacgttacctgtatacggcaaaaaaatcacgtatccatatcggatgatacggtatcggatacgctccgatatgtgtcccgtacgtatccatgattttcacaactaacaaataaaacaaagtaaatctggatatttcgtggatacgccttgatacatcgcttgaaatcgctgagcagtacaaatccatggcaaccaccatgtgagctggctcgatcttgttcaccatttgatgcccctacaagcgcatggttcctatgctgccgctgtcggacgccatagctccacctctgctattgggtgtggcactgacggtgtccccgtcgtagccggatgtaatgcttccccctccgcgagtcggttggccgccgttggacgtattacctccaccgctgagcgtggtcccgccgccgctcgggcgctgctgctgcctactgggcgcagtggggcctcctcctcagtggtcaggcgcagcgccatagttgaacacaacccatgcaccgctgggtatttgcttattggtttgttgcttctttgatttgtttccataaagtacaggcgcattcgttttttatgtagggtttgggagtagtaaggtacggctggtaatgttgttgcagcctacaggctcactaacagtattttatgaaacaatcaagcttcatcatatttctttttttttgtcatggacatgtgtggatccatctttatttgtatacgggcgtatcccaaaatttatagtttagaaaataaaatttgtataggtgtatctccgtatccatgttttctgaaaaataccgtatccccgtatctgggtaacataggatagacgtagtcccaacatagacattagcattcaggtccaacttgacgtcaatcccattcacttgcttaccgaataaaacagccttagattgtgtacacgcacgtaggaggcctcccagaaggcagcgaagatggaaatcgtagagtcatcgcgcccgtgctgtgtgtacatggagatgaccgagccccaggaggcaggagacaaggttccgatggtgcattagagcaactccagtgtacgagtaaaatcgaaccatacttgaaaaaccgaatacaacacactacagcaaccaactgttatatgttagagcaaaaatcgaccacagaaggagagacgaactcggcgatgaaaaggtaatttgcagtcgttggctggctgcacgagagagggatggacgcatgtgattagagattctttttctacgtgggtccatgatcaatgtcacacattgcagccaacgaatcaaaattttgctcgaccatgcttattcaacatttgaactatgactaaggtgccttagatcgaacaggtgggtacagactcaccccgtcccattcccctagctatccttatctctctctctctctctctctctctctctctctctatatatatatatatatatatatatatatatatatatatatatatatatatatatcagctattcactttccatttatattacacatagcttgcactaaaagttgattaaactcaaactttatcgatcgctcgagccgtcacttataataaatatgagtaaattgcacccacggtgcaacaacttggtaggtgggtgtaatttggtgtaataacttgaaaaatgagcgttctattacaacaacttggcaagaaggtgcaatttagtataagaactttataagtgatcgtataaatacagcaactttgcaaggtaagtacgattttgatataataaattaagaagttgtgtgacaacttaattatttggagcattttttatataaattcaaatttttaagtatttattttgacaatatactagcgtggatttgtataaacatatttatatttttatcctaataactaataactctaataactaataactgaaagttaattaaactggatgtagaaattattatatttggttgatatttgagaaggtgaagaaaacaaaaaaattcttaaagaaaactgaatgtaaattgtatgtgcaatataattcttaaagattaaattcaatattataagataatatccataggattactatgtattggcatattgatatcggaaaaaactcacctagcatatgcttagccaaattgattcaccaaaatactaaattgtcaagttcttgtattagaacgcacccacttgtcaagttgttgcactcggacattcaattctcaagttcttgcactatatcgcacccacctgccgataggggtggaaacgagccaagccgagccgagctcggcttcgtgaaagcttggtcaagaacaggcttggctcggctcggcttgataaatggaacgagcaaaaagtgcagctcggcttggctcatttaaaagctcgagccggcttgagccagcttgagagggtggccgagcggcactggggagggaggccggaggcagcgcaggggagggaggcggcgccgcggcggcatagggagtgtcgagccattgaccgtcgagtgtcgctggggagggaggccggagccggtgcagccgcacaggggagggaggcggcgcatgggagggcgggccggagggatgtggcgggccggcggcacaggggagggaggcagcgaaccggcggcacataggggtgactggggatgggggagggaagcggcgccgtggtggcgcggggagcgtcgagcgccgctggtgagggaggccggagccacgcagccgcacaggggaaggaggcggcgcagggagggaagcggcgagccggcggcacagaggagcgactggggacgggggaggaaggcggcaagccgatgggtggcggcgcatgggatggagccgaaggtggcggccggcaactcctctcgctagtgacgccggtcgtgcgtgcgtgcggcggcgtgcctgcacctgcgtgggatggggaatggggagggtcggacggagcagttagggtagggttctctgttgttttttatgggccagactgagacaacttgttaatgggctaggctaggtcatgtttttcacaggcttgacgagcctaccgagcggctcgtgagctagctcgggctcggctcgatttgcaaacaagctgtggagggagctcgggctcggctcgtttagtcttcgagccgagccaagctcacgagcctaagttttttgtccacccctacctgccaagttgttgtaccgtgggtgcaatttactctaaacaaaatataaggtaatctacgataataaaaatcagactaagcttaaatacatatttttccctaaaaaatattccgcgacttatctgatttaaataagataattgccaaaaaaaatcatcgcgaactttcaattgtaattacaacatataacaacggtgtaacattatataaatatagagtataaagttacatattttataatatatttacatataaattatattgtattatagtatagttatatttcaaagctttccactcaaaaaacgtgtcgtagtttttaataattcctcaaataacacttcaatttaagcatgttgtcgtctaattctgccatgaacactaacggctcgatcagaaaattatcgacaacggttcctttttaactacaaacacttacacgcacgagtacttttctaacacagttaaaaattcgaaaatgctacacgtacatccgaaatgtcacgccgttgtgcatttgctgttttaccatttagtcgtacgccggtgggacacctagttattggaaccgaccggaccggcggttggatcggaaaaaaccgaaaccggttcctttttaactccaaacacttacatcccgttataacgcacgagtacttttctaacatagttaaaaattcgaaaatgctacacatacatccgaaatgtcacgccgttatgcatttgctgttttgccgtttagtcgtacgccggtctagtccagctaaaagaccggttgtgcaatcagcctggtatataccggttgggccgcccgatctgcattgtgcgtggtcaccttcgcagctggagagggaaaagggtgggattcgatcccaggacctcatgtataaaagtaaaccaaccaaccactagattacgatataccttgtgttttgaagggataaacaatatatttacattagattgaaccgcttcaaaccagtggttcaacactttaaccagttgaaccaataaatcattgaattgagagcatcgctggtttaatgaccggtccggtcttaataattattatgatgtgacaaagaacatcggatgcatagcggggttcttaaaaattactcatgcgtcaacaacgcggttgcaagaaaccgttggctcacgccacccgcgccgcgctgcgacccagcctccgttcgagctgcgtgcgcgtgcaccgccaccgagccgaaccagctgtcgcctgtcgccgggctcggacccgagtcaagcgagtcaagccttccggtgcggctgcggctggcctcgcgtacggccgccacgtggcctcgccgtatcaatcacgagaaggggagaaaagtggggcgttgcccagaaaccccagctgcttgctcgccgcgcgctctcttctcgccgcctcggcctcgccgccgtggccgccggtgcctggacgaggaggaggtgagggcgtacgcttcggccggtccgccggccgcgccgcgccgcgcctctgtttgttctctgcttgggctcgccgtgttggcgtgtggatgtgtaacggctaatttggttcggtttttgtgcttggtggtggtggtgattgcagggctggatcgctgggagatgttgagcagcggcgcgcggtggcagccgcggcgaagcggatgggcggagtggggcggcgacgctcgcccggctcgctctcctcctcctcgtcgtcgtcgtcccgacgtcgctgcgggttggcgaggcgaggggaccagtagagtgcgggggcgcggggagaagggaacgactcatggtggagcggaaggcgagggcgcggtggtggcgccggtgagaacagcggacgcggtgccggcgagaaatgcggtggccgtcgccggtggtttggccacgcgcggcgtcgagcgggatgctggccaggtggtggcgagagaggagaagagacatggcggcgagttggggaccaagagaggattggaggagcgggccgcgcgttcgccgccgccgccgccgccgcccaagcggagggcggtgtccgctattcgccagtttcccccaggttgcggaagggacgctgctgctccagtcgcccgcggccgcggttgtgatggtggtgttcgtctgttggatgaggcaaccgctgctcctctcgctggcagcaaagatgattctgctgttccgggtgtggtggagaaggtggcgtctgtagatggtggcgattcaatggcgaatgcgcatcatcatcatcatgctatgatggacacggtcttgatgaaatcttcacatgtttcggatgagaatcaggtcgctcgcaaagttggttcactggaaaatggcgcagaagggtcagcgaggggaaagggaggacacggcggtgaattgctgggaaggaaggaagtgttggctcaagccgcgaatttgcttcccaagaggaggattgtatctgcgacgcgccgcttccctcctgggtgtgggagggacgctgtggctccacttgctcacagagaagagagtaaggtaggttcaagtttggaagccatgcctgttgatgctggttggggtgtgtcaaaggaggtggtgactacggatggccgtaataattcggttaaccagtgtgcctcgaacattgtcggaacagtaaagtgccaggaattggaggagggtgaggtagctgctgaggcatgctgtgatgtggagtcacaaaaagttgctggtcatggagaaaaacttgaaagtgctgttcctgtaacttctgctgttactgaagttttgacaaggtgtggttctgatgagatggaagggtgtagttatgctgcggaggcaactgaaaaacacttgtcaatgggtggtaaatgttcaattggtggtcctttcaatgaaattgtccacggcaagagagtgttggggagtgatggcattaaaagggaagttcctagtcttgcaatggaagatcatggcagcattgctcatgaccaagaactggtggaggttgagttaactacaggggaccatattcaggaggctcaagttgctaccactgttaacccacatgagtctacaattagtagacatgaggcagctgtttcagcaaatactgctccagaagtttctattaggcatttttctagtgtgaagaacggaaacacatcacagcatgaggagacgatatatgcatctgcagctgctgacgttgttaaggtgatgaataaatgcaaagggaccaaatccaaagctgcggctgaaccttgggctgaaggtccttccaaagaacacttcaaggctaagagggagtgtgaaaaagatgggatgaaaaaatcatccatgaatgttccaacagaagtatttcgtgatggtatcatgagaactaagttactattgacagctagaaaagcagtcaagccaccactgaatactctgcatatacccttctccatgggaaaagaggagtctgttgtaacaaatagtgcatcatttggtcctaagaagaaggtgaaggtgaaaagcccgcatgaaagtaaaggtattcctatgaagattgtctctacatctggattggcgggcaaggacaaccttatcaatgaaaaggctttgagcttggaagatgatgatattttgaaggcactagctgttcataatggaaagctagagttgtatctcaatgttccctcatgcgttgagcgtcacaggcaacatggaagtgagaatggcaatgataggagcaaaatcaggatgctatgcaggaggtttcaatttatatgcaacgctcttctacatgctgttgaacaaggctcattgatggttcgacgaattgaccttgaagctgataaaatcatcaggaaattgccgggctttactaaacatggacctactgtgggaaatgttcgtggagtcgaagtcggtgacgaatttctgtacagagttgagctagctcttgttggtcttcatcgcccataccagggaggaattgataccaccgatcataatggagtgcttgttgcaataagcatcgttgcttctggaggttatcccgatgaattgtcaagctcaggtgaactgatatatactggttctggaggaaagcctgctggtaaggagaaacacgaggatcaaaagctagggagggggaaccttgccttgaaaaattgcatcaagacaaagacacctgtccgagtgattcatggattcaaaggtcaaaatagagaggacgtcagtcattcaagagctaaacaaatcttaacatttacttatgatgggttgtatcttgtgttggattgctggagagaaggtctaaaaggttcaagggtcttgaaatacaaattacaaaagattcctggacaaccaaaacttcctctgcacatagctaaatatcagaacactaggctgggatcccaaggatggtgagaaccatcttgatgtagtgcttagatcattgctcttgattgcccttgtcgaactcggacatgaagagactataaatgagggagttaggcggttccatatcttcttaaaagacagcaaaactaaccttcttccaccagacactagaaaagttcagattttttcttaacataccgctatagtgtcacgtctttggtatctagtgtactaatatatgtattgatctgcaggcttcatatctttctatgatgcagactgttactacctccagcagaggtggtaatggtgctctccttaaaatctacagagaaactgctgaagcactggagaagtcagtcaagtcacgcattttaggactgtgcgttctgactgtctagcttaagtgacacagcagggattttatgatgagttgtgttgtcctgaaaagtaatatttcttctattgtaggtacattgtcttcatgcccagctaaggatattgttcttgaggcaccaaacttcatggtcactgatgagtgatgaggttaagctctaaatttctgaacaaacgatgattcaagacagtaaatggtggaatgagattctattctacaccatggatacataagccagtctagtctctctcttgcttgccaggtacggaatcaagatgcattttatgtccatggtggtagtatattagaagtttgagaagttgcatgggctgattgaaggtatgctatagtttcagggtacctaaagtgggttatttatgttgctatctgataaacaacgcacagatttctgatatttatgaacgaaaaaactataagcactgttgtgatgctcaatatttttactgttatgaggggttcaaagttcaagttccaccaaatgccaatacatgttaggtgtatatatcaatacgagaatcaaatttagattttacacagagctatgccaaatcaaattatggtccttgagaaggtaccatgaggtatcactttttctattgtaaatttggtacctaggtactatgaggtatcatgaggtaacaaaaaaaataatgtaaaatttggtacctcattgtacctccttaaggaccgtaaaattgctctaaagtttatggtttgaaactaaaatagtcaaaataattatgaaatagggaagctggattatcaaaattcctttctaccgttcacgccaatatcgaagttagtgcaattgtgtgtatgttaccctccctggttgcataattaggtctctttacccaaaactggtgcaatcatttgttttgctcaatactactatcattcagtcctgctcttttagaaaaccagagaacaaatccaaaaggttttcccaagtaactctgtgatagttcagaacaaaagaaacacagtacttcatagaaaacgtgggaatcaacgttctaacagatgaagtgaagctgtttatgcagttgcaccaaataggagtatgctaatgagctttgtgtacctaccagtgcagcggttgtgactgagttatttcattatctaaaagagattagatcatcacctcggtgagatgaaagctccaaccccattcatgacgctgaatagctctgcaatttaagggaaatccagcatatcaaaatgaacgcgacatatttccacttacagaaaagatgccacctgaataatgcacatcttagaatgagcaaatcaaagaagttacagtaataagttctgttatttttaacaggcctgattctggagttcagagcaagttggatatctgtgaccatgagtccccatctatgcatgatgcaggaaaaccggttcatgtcttgaagacctggccatcaaattcactactatcagacttcgtcaatttctcgggtaagcgaagttacccccttttctctccattgctcttccttctcaggcactaaattcactccttcccttttatgtttctatttgttttctgcatgatcaggtcaccacggaggagaaagctactgaattttccgagttcttcgccggtgaagggttcnaaccatcgttcgagcgtgtgctgaagcaaagcctggagagggtccggatcagcccgagatggatcgagagcatcaggccttgctcgtacagtgcatgagctgcagcagcaggaaatgtaactttctgggctaagctagaagattttacacgcatggaagttcgtacaaaaatgttcttggaaaggttgtgcggttgggccaggtgtggccactactaaaaaaaacctagataggtgctcaaccggcacctagcaagcaggcggcacatatgagagaaatgaaaggaccggcacctttgaggtcccaaaaattcagaaaaaaaacagctgtcgagccaatgcatcgaggcatcgagctctcaatcatccatgagatccccatccaagaatacaagcacacaatcacgactaaaacaaacatccgcagacaaaatccattaacaaaatcaacgagaagccatcgccaccggggagagtggatatccgccgtgggagcctctgccactagatccacctttctggcagcgacgacggggatggcttctcctccgtcttcacccttatatcccatcgatataagggtgataccttacaatatcaggtatggtacacaagtatctatctatctatcttctattatatactaaaagtccattaaacattttataaacgctctcaaaccgccacgtggcactactacaaacgctcctaagtcgccacatggcactatctaatctcaccgttgattttcacttaaattgatggatccgttattttacacaattagattagatctattattagaaaataataacatcctcatgtttataacatacaagcgtacttataagtttgtacgttacaaatgccactgctgtactttccgtacgtacaaacgtatatgattgaaaacaaaactttcctaatctttgctagaagaaaaacaaatacacatatacataaaaaagacataaaaacatacattcataaaaatcaacggtatttaaaatatgactttctacaatataaagataaaatatattacttcacaaatataaatatattcagttaaattaagatctataataaatatccaatcaatattctttcaaagcatcttctaaatctatctattatatactaaaagtacattagactttctacaaacgcttttacaccgctacgtggctctctaataatttagagaaatcataaaaatctattatatactaaaagtctactaaatgtcctgcaaacactcctacattacattatcatgtgacgctctaataaaataagagaaatcctagaaatttagagtaaaaaaagaaaaccatccaaccttcaattttcacttaaattagtggaccagttattttaaacattggattagagctttaaagaaacggacggatttctcaaaaaaaagggattatgctactaatctctatcccggtaaaaaaaaagtggcgtgcttaagtcgtacgatcgtctccttcccaagaaaaaaacaaaatttaaatacctacaccatatatgatcgaaaaaagataaagaaaaaaataaaaagaaagcacgcacacgtacatagtagtatcggcaagaaatattgataaaatcatcagttcagcactaatttgttgtcaacaacctttaatctacgattttattaaaaataatactacatagatatgcacagttaaacttaatcgtaaacttgttgtagtgataaatatatcatggcaaatgataccaacatgtaatagttaatgcgataataatgtttcaaataatttcatatgatattttatggtttcaaatatcacttgacaaatatataacgttaatttgaatctacatatgtaaaaaattaaaataacaaaacctagaattgttttttaagtacatctatttaggtttatttaattttgggagaaattgagattctcaaagtatttggaatttttcaaaacttttcttatttgaggtgtcagaagcacaattaatagattgatgagaaaattaaattaaattttagcgagtggtaataaaacaacataattgagctttggtttttaagtggatctttttaggtttattttgggtgagattgagattctaaaactatctgaaatttttcaaaacttttttattgctatttgaggagtgagaagcatacatgatagatagatgtgaaaaaaaaataaataaataagattttagacaatcgttttgctagaatacaacccttaattcatcacaagaattatgtattttctttgccaagtagtattggcaaaacatgaataatccaataaaatacgcatcaaactacttatgatatttttttatagttgatagaaattctaatataccaggtataattgatggacgaatgttatacaccactgaacccatctataagtgcactctagcaaattagttagtgtaaataagtttgtgaaataagtacattcttagaattagtaaatgagtctcgtatagttataagcaacatatggtggaaacaaatttggcgctaaagtataaatctttatcaaaatataaataatgatatggtgttttgcagattttcgtggtggtacgtctctttagttatagttttttttaagtagtgtcgaatgattaaccccagtcatttgagaaacataatattgtatgtattccattaaaatttgagaagtacttattactaacttcatatacatattttatctattctctaccacaatcgactcaaaacttaaaaaaattattttcatcacctccttctttctgtccctctttgtccttcaatgcagggtgcaatacctgctatgccatcataaatttgcatgggcatgtacatggttgagttaaggtggtgtccatgaaaggctatcataggcaatgtaactaaagtgatgtacttacaaatataatcaattgtgagtgtaccaatagtgaactaagtattaaaattgtactctacgatggtttttaggggcatggctatatcaatgcgagacctgtatgttttaaggcattacatatggaagccttggttggcagatacagctgacttcatacattagagaggcattcatgtttatttttaatggtgttatcgtattattcggtagatatggtatatttagcttatttatacatatacgtaaaaataagtgatgaacgacaggttatgtagtgtagatgaattttttaatgtattaataatgtatcgtttgttttagtggtactaatacaatttcatttattaaaagtgcacctaactcttaaaacaatgatagtaagtagtgatgacaaacaaccagtttatatatgaccagaataaagggatttttatttaaatctaagagacactcttatcacattagtagtatattaaaatctatcatctattttagggtaaacatatttcttttttattgtaggataatctaaattctcttacagtatatatatacatagtgatatatgattccttttagcactcctttttttaataaaaaaaaagatgcatgtgcatctgtacgaaatttctttccgatttatattctggaatgttgtacagtgtttgaaacacaaactataatatatgcccgcgcgaatgcgcgggttaccttcctagttgacttcataatatttacaaaataaaaggtcttatatacaaaatatcgtaaatatttactgtgccagaaatagctatgttttaaaacggagatagtattaaggtatatatctccattccccattgtgtgaaatctgatttcatcaacttatcgttccttcctttatggcttcctctctcggcgatggcagtggtctcccctcgacgattatagcgctggtgctccaccgtcctcccttgacatcactggcgccgccggtgatgttctcctctcgacagtgacggcgacagtgctccctcgtcctcccttgacatcgtcggcaccggcagtggttgcggcttcccatgtcctcccaaccattatagcggcgtcagtgacccttgcctatgcatagcattttctctgcagtaacgcagagaaagggactgttttgaacagtaattgactttgtgtggacggtgagcgcagcaatacctatagcaggccaaacgggcggcccggcccagcacgacacggcacgccgacggcacggcccactagggcacggcccgttaggcacggctcctatagcgggccgtgccgtgccggcccacgtgccaaggccacggcccaagcacggcccaagaaggtgctgggccgtgccgggccggcacggctactgtagtggcacgtgggctggtagccggcccactagtacatgtggcccataaaaattgaaatttgaggggaaaaaaagaaaaaaggcagaaaaaacataatataaaggaaaaaatgataaatataggataaatgtgaggaaaatttaggaaatatatcataaaatatatggtacaaataggataaaatgtggaaaaaaataaaaaatatgagaaatatatgggaaaaattagaaaatcgtaggaaaaataaatgggccggtgagccgtgccatgcctgggccgtgccgtgccggtacgctacagtaaacgtgccgtgccgtgccagcccacgggctgaggcatcggcccaaacacggcacgggataacgggccgtgccggcacggcccacaggctggcgtgccgtgccgggcctgggccggctacagtactgccgtgctcgggccggcccggcttggcacggcccatttggccaggtttagcaataccttaggaaaaaagcactgttgtatagtgatgaatttactgttccagaagtaagtattggtgttacagatagtgcatacctcctatacatgagtttatgacatacaaaaatacacatatctaatattatacaaaaagtatataaagcgagtaagaaaggaaactgcttttgcaggaatagaagacgtaaaagtttggcccagaagaggcaaggtttcctttgcctatatcctaacagggttcttcgagttctacttggagaaaaatgtatctagccgtataaatatacccctcccaagaggaaagagcattgaattgcaagcccaagccagagccacactaaaagatagccaggaggaagataagccctagtgcggacatcatctcgtcgagaattactcgacggatcctagttgatgggttagaatagctaacttgctcttcgattgtaactagtgtggtacttttccagagatatacatatgaaccggagtagtgttattactcatcttgatgacccaaactagcataaaagtcattgtccccgtcttcttactacaatctcgtgtataccttggtaccgatgacttccatactctacaaataccattctcgggtatagcccgtcgatagtgttgtgcagattcaactatagctatagtgatgaggatattactagcttggatatgaccatgattaccttatatattcataaaccaagtgcatgctttctatgtgggatttaagtgtcatatatttgaacaaacattattgcactatgagttttgcgtgttctcattttcaaagatatttgcttgggtaaaggaaaagagaccgagtgcgagagccgtgtcttgtcttgcacatactcggctcggtgaatggttcatcttcgattggcatggagcaagaaaacggattgaagcagagccagcacacctcagtgaatatcattatttaggacaagcacgaagaggaagagctttgtccttcggccttgaatcagcataaagcccctcgccgagccacttctttgacattacgttcgatttcaacttcatgttcctgagttgcagagaacaatccaaattgaggcaatctttccggatttgctccgccttacagccttgcttcccattgtcattnnnnnnnnnnnnnnnnnnnnnnnnnnnnnnnnnnnnnnnnncggactcgagcggggcccaccttagaaatacatggatgatcaaattaagaagctgattgggaccaaaccaagaccttccctaagtctactcccatgttaccacgtcacttttggtccatagaaagcaaaagaagaagttatacacgttttggattcggattcggtctcttgataacatcatttcaaacgggcctagctgttgatctagaaggaatctcggggcgcatgagtacttgttggaaagcttatggaatctactttttcagatggttttggtcctacatcaaaattcctatcgaggtgttgggagtctgcaaaacaagttacgtaccttatacagtccgagtttgatttgagccttataattatgtcatgggctaagcgcaaggaggtggagtcctagggcaaactcggacatcacttatcatatttattcaatagccatcatagtttagaatggggttttgcttagattatttatgccattacagttttgctgcttgctcagtttgtagaactccaaattgaagcgcttaatcattcatatgcaattaagttgcaatctaccttattcttgcttgtgttcttcgattcgcatgtacggattgtttgaggtcaaccgggcagtgcacggttgataaccagaggagacgtggtgctacaattacagggttcggatcgtgtcgatcgaaagctgaatcgtgtgtgtcaagtttccgccaaatcgagagttatcactacctattggaagatcgggaccagtacctcatcatatagttacttagcatctgaatatctaatctaagaatcaggatcctctgaattgatctacaatacccaacattagagggaatggagactgtttgatcagatggattagatcgtgcgctacaataaatatgctacaatactcatcaatgtttgacagtattttcgttaatggatcgacattgtttgatgcattgatttattgtgctactaacatgaatagtgcacctatgcattactgcagaggatccggatccctgatctagcccatcattttaaatcgagggtggataggatgggccattgtgcaaatgatataacttgcatcaataatattccaatgtagtttaaaaaaagagataatattctaatgcggagtatcccgatccgtactgctcctgctactaagcgaatgagcaattaagcatgatgtgtacagtagaaaagggtgagataaaaagtgtggatgatcttgtgtagatcattgatgtgaagggcgcgataatttatagaattactatcttcgtgttaaaatataataaattttaattataaatatgaatatataattgtttaaatttttagctaaacatatttatattttgagatggatattaccaaacttagccgaagctgttaaatagatacgctttcctgctgtgtgattgtcctttggatagtgcttatgaataaatcagcggcgctgcaaggaggacccaccggtaagtgacatgtttgagtaaccgacatacaccgttcagggggcgcaccaaagtctgtgtgtttgctgttggttttggatgattaatggggagtaaagattacgaagtatagttacggagtaacttgcatggtgtggctgatgtctaccagaatgtgaatgatcagtgggacccgtctctcatggtaaaaaaatagctgaattcagctatactcatgcgttgtatagctgaattttgctagactgacacgagtgtcaatgacaagtaggtccaaaataattatatttcttagcaaaataatgaaataaatacttagcaagagttttaaatataattgtgtccatttttaattaactggttcctcacactttaaccattaataatttcttaaatgttttgttttaagaaaaatacacgtatgtagatttgccttaaaactatcattaaatatcataaacttaacagtaaaaaaagacatcataaagttattcgatgtcataaatgtattctaatactaaaattatggttgaagtttaaaatttgaccaaacctcatcttaaacataaaatatttgtgattggagggagtagataatatgggattagccgtgtgaaaatcataattataaacttattatggaaaatatcttcacctagccgtttcaccattgtagagtagaatcaatgccgcaataacaaccatctaaaattgtatttacgccccccagtaaatgcactacagtaatggagtactagtaccgcggcgtcaccgactcagcgtcaccgcctataaaaagagaagcgaaggttgctgagacccccaactagggctatcaaaaaagctcgaggctcgcgagctgcttgagctcggctcgctgtagactcggctcgagctcgattcgtcaacaattcgagccgaactcaagcctagctccaagcttgcgagcttgacgagccgagctcgaatagctcgtcgagcccagatttccctctgtcaagttcttaaattttcaatgcaacagctagtactactcttactcccaatgaaaagcagtatagaaacacagagcgtgcagagctgtaccgtgcaggcactagcctactagtactacattactctgcagcactagcctattagtactactagcatgcatgcagctctatttaatagtactactagttgtcatattatgcttgaaaaagctactagtactagtagtactcgacaagcatgcatgcagcctcctttcatctgtattggttatttgagggcacacgagttaggctcgagaaagctcgagactcgagcgagccgaactcgagcccatttctaagcttgtagtttaaacaggctcgactcgagctcggctcgagttggtgccgagctcgagcctatataggtaagctcgctcgggctcggctcgttgacggccctacccccaaccgttttctcaccccactcgtttgcttgcgttgcgtgcacagcgaccgagccagtcggagactcggaggttcggacccgacccgacccgagtcaatccgaatctttcaggtgcggggcgtccggccgccacgtggcgggcgaacccatccctcccggcccctacccgtatcagtcacgagctcctccttcctcccattccacatttccacccctcacggccccacccactctctcgattctctcctcgcccaaaacccccccaactcctcgcaggctcgcagcctcgctccccctcgccgcgctctcggcctcgccgcgtcgccgccggtctctggacgaggaggtgagggcgcgcgcgcgcctcgggactacttcggcgcggctctgttctcgtcgttcgtgttcttctgcttcggtttcgtggtgttggcgtgtggatgtgtgcgtaacggctaatttggttcgggtttttgtgcttggtggtggtggtgggtgatttgcaggggcggtgaatcggtgatcgatgagcgggctggatctccgggagatgttaagcagcgctgcgcggcggcatacgtggaggagaagcggatggggggcggagtggggcggcggcgacgacgctcgctcggccgcgcttccggctcgctgtcctcctccccctcctcctcgtcgtcccgcggctgcgggtgggcgtggcgacgaggggagcggtggagtgcgggggcgcggggaggaggggacgagtcgtggtggaagcggagcgaggcgcgaggacgcggcggggaccgggaggaatgcggtggccgtcgtcgccggtggctcggccacgtccggcgcggagcgggttgctgcgcgagcggaggacggtaggaggacgcctctgtttcggttcatcacgtcctctgcttgggttcgtcgtatggattgcctatgtaacggctaaatttgttgcggtttgtgttcggtggtggtgattgtagggcggcgatcgatggacgggccgacgctggaactctccgagatgatgctccacgcggcgcagccatggagaagccgatgcacgcagcgtgacgttcgcccgggcgcggttcctcctcgtcccgtcgctgcggatgggcgaggcgagggcaccagtacagtgcgagggcgcgtgctggaggggacgactcgtggtggaggcagaggaggtggaatggagcgtgagcgcgaggtggtggcgccggcgagaaatgcggtggccgtcgccggtgatttggccacgcacggcggcgagcgggttgctggccccttggtggcgaaggagaagagaaatggcggcggtgagttggggacgaagagggggctagagaagcgggccccgcttccgccgcccaagcgcagggtggtgtccgctaagcgccagtttccaccagatttcggtagggactctgctgttccactcggccgcggccggggccgtggtggtggtgttcgtccgtcggatggggcgcctgcccgtgctgttctgggtgagaaggtggcgtctgcgggtaatggtgattcaatggcgaatgtgcatcatcatgctgtgatggacacggtcttgatgaaatcttcacatgcttcggatgagaatctggttgctttcaaagttggttcaccagagaatggtgcagaaggggcagcaaggggaaagggagcacacaatggtgaattgctgggaaagagggaagtgttggctcaagctgtgaatttgcttcccatgaggaggactgtatctgcgacgcaccgcttcactgctgggtgtgggagggacgctgcagctccacttgctcgcagagaagagggtaaggtgggttcaggtttggaagtcatgcctgttgatgttggtgggggtgtgtcaaaggaggtgatggctacggatggcagtaaacattcggttaaccagtgtacggcgaacattgttggagctgtcggtgttttggatggaacagtacagtaccaggaattggaggagggtgaggtggctgatgaggcatactgtgatgtagagtcacaaaaagttgttggttgtgattcttttgatgattctgcaggtgaaagacatgagggtgttgttcctgtaacgtttgctgttactgaagttttgacaagtcacgcttatgatgagatgatgcaaattaaggcattgcaagaagggggcagtgatgctgcgcaggaaactgaacatgacttgccaatgggaggcaaatgtgaaactatcttacctgatgcttctcctaaatgttcgtttggtggtccttcaaatgaaattgtccacggcaagagagtgttggggagtcatggcatgaaaggggaagttcccagtcttgcaattgaagatcatggtggcattgctcaaattgaccaagaactggaggacgttgagatgactacaggggaataccgtgttcaggatgctcaaattgccacccatgttatcccacacgagtctacaactggtagacatgagggggggctttgtgcatctgcagctgctgaagatgttaaggtgatgaacaaatacaaagggaccttacccaaaggtgctgctaaatcatcgatgaatattgcaacaggagtatttggtgatggtatcatgagaagtaagatactatcaacagctagaaaagtagtcaagccacctgtcagagcaagccataagcctccattgaacactctgcatagacccttctccacaaatagtgcttcatttggtcataagaagttgaaggtaaaacgtccagatcaaagtaaagatattcctatgaagattgcctctacatctggattggcgggcaaggacaaccttatcgatgaaaaggctttgagcttggaagatgatgatattttgaaggcactagttgttcatgatggaaagcttgaggtgtatctcaatgttccctcatgcgttcagcttcataggcaacatggaagtgggaatgctgatgataggagcaaaatcaggatgttgtgcaggaggtttcagtttatatgcagggctctcttacatgccgtcgaacagggttcattgaagattcgaagagttgaccttgcagctgataaaatcatcaggaaattgccaggctttaccaaacctggacctactgtgggaaatgttaatggagtggaagttggtgacgaatttatgtacagagttgagctagcccttgttggtctccatcgcccataccagggaggaattgataccaccgattataatggagtgcttgttgcaataagcatcgtttgttctggaggttatcctgatgaattgtcaagctcaggtgaactaatatacactggttctggaggaaagcctgctggtaagaagaaagatgaggatcaaaagctagagagggggaaccttgccttgaagaattgcatcgagacaaagacacctgtccgagtgattcatggattcaaaggtcaaaatagagaggacaacagtcattcaagagctaaacaaatcctaacatttacttatgatgggttgtaccttgtggtggattgctggacagaaggactaaaaggttcaaggatcttcaaatacaaattacaaaggattcctggacaaccagaacttcctctgcacatagctaaagggctgagaaggtctctttcacgtccaggcctctgcatagctgatatatctcaagggaaagaaatggatcccatctgtgtgatcaatgatgttagtaatgtccatccaacatcttttcagtacatctctagaatcaagtacccgtcatggcttacaaaaagacatcctcagcatcatggttgcgattgctcagatggctgcatagattctactaagtgcttttgtgctgtgaagaatggaggaaaaatcccattcaactccaatggtgcaattgtccatgataaacccctcatttttgagtgtggtccatcctgtaggtgccattcttcatgccacaacagggtaagtcagaagggtatgaaaatccacctggaagttttcaggacagccaataaaggttggggtgtaagatccctaaggtccatctcttctggcagctttatatgtgagtatgttggtatcctgttgactgacaaggaagctgacaagagaacaaacgatgaatacttgtttgatataagccataattgtgatgatgaggattgctccaaggggaggccatcaactatttctagtctaaactcttctggtggttgctctcagaccatggaagatgtgtgcttcacgatagatgcgtctgagtacggaaatattggaagatttatcaaccatagttgctcacctaacctctatgcacaaaatgtgctttgggatcatgatgaccaaagggtgccccatatcatgttctttgctgcagagaacattcctccactccaagagctcacttatgactataactataaaataggtgaagtccgcgacctgaatggcagagtaaaagttaaagattgccattgtggttctccacagtgctgcggcaggctctattagggcatggttgactgatagtactaggtttggtatttctttgaacaaaaaccctttgtaaagttagtgttttgcttgttgtcatttgagagctttgtagatacatggataacatggagtgttagtggtaaaaagcagtaaggttggtggtggttctgtacatctgttgtcctactacagcgaaatgcagattcttgcatagtactgtggtaatatatatcttgcccgtttgcgacactgttgctgagtccagaatatatgtggaattgaataaaattggcttggtgtttgaactatcccaagaatctggacaggactgcagttgaaagcaggtacacaatcaaacttctgttattttacataacgatcatttatgtcatttgtgctaacaatgagctaggacaatcagaagatggacaagatgtgtggtgtgcttttgaaacctgggaggtagtcttttggtctttggattcatgtgtgaggttggttactagtataacattattgccgttgatatgaatgttcaatgaatctgcttgatctgcaatagctattgtgctagcgaagcaatattttgaaccaatgtatgactagatgaatcacctttatctctgctagacgttcaatacctatctttgttataagaatttcctagttgtagtcttgttatcttgtagaaggtttttaagttgcaatgattgacaattaaatcttttactatatgactaacagaacacttagcacaacttaggagctagtcccctccagtaaaaaagaatgcctatgtatgctgttttgaattctgaatttcacacttgatgtacctataatcagtgagaaatcagcatagccatatgtataccactaaaaggatcatgatattacagttttgctgatgtgtggcaattaaatgaacagccaaatatgcattttttgagacataaaattgtcaaaataagtattgcaatcaacctactgtgcaaattcttttttccccattacattcttacgcatttttttcccctgataaggtgtttttaactctttgtacactgcaaacagatgggaacacttgattcttttcagaacattgtatgatagtgtggtaaactcgtaatgaaaaccattggcaacaaatggcattgatattttttatatttttgttataactgatggacttatagagggagctaattttctttcttgtagaatctttggtcctttccttgttactgcaagattaacttggtgcttgtttgagttcttgtcaagtttgtggctatgattgtatagcaatactgctcgtcaacttgcacttcaaaatatattactgtgggtactggtcgccttgatgtgaactatgcgaatcactaggaagagcttcttttaacttttaattcagaaaagaaaataagcacaacacacaattttcactgagtcagaatggtttgcacattcaacacagggactaaaagtaataacatttccattttgttttgttttgctaatttggtcaaatctgttttgatttatgtcaatttctttggtagcttatgatcttgatataacttcaacttatttcattctcatttcaatgcttccatagtaagcctattattggactaagaatacttacaaaagaataaattctgcagaggtggatgctgatagacattttttttcaaaagtaagcgatatttcctctgaaaagagaaacattgtttatatccttctgggcagatttcaataaaaaaaagtaggttaaataaagaccaataaactatagagttaattttgcagtcaaacactgagtgttttttttagagaagggaattgaagtttcaaagtaacttgaaagcgggtatgatttatctggtttcctgaaagtttatgatggatttgctcggtttcttactttagaaaaacttggacagctttttttgatggggaagtttctggttgctgtgtgttcagtcagtatctcaattttcagatgatcatgatatgacttgtggatactgaaaccagatagttctgaattgttccaaccaataaggtgctatggtaagtgccattctcttgattccttgtcttgccagatgaggcttcttaactgaatatctgatggtgctgcttttatctatgctgctgaattaactagtcgcagttttgagcagatcttcagcacatggttggtgtttagccagggataataaaggtagtgcattatttacaaggagatgcacatacatgtgatgaaattagttcaggatttgggttttgcctaaacttgtcgtgggattacatgtgtggttatgatgttaaccattggttaccatttgctttgtcctctgcagcaaatagagtgttttactagctcatagcctctgaagtctgaaccctttttatcttcaatgcattcaggaatatcttcgaattttgactctcataattctttctaaacccctaaaattttcccccagttttctttcgaaaggtaattttcttgatgggataaacatttcctcattttgcaggccatgtgctgcaacctgtaccctaggtcgaggatcactagaagtcgcagcgagtgccgaggtagcaaagatgaactactctttgaagtcttgatcaatcggtgggcatgattactggttttggcggcaagagagtgaagttatcagtaaaaatgtggattcagttaggtaggatactgacgtgttgcatatcactactagctaggaacagatatacctttgagttcttatcatatctttctggttatcacaggaagaaatcggctgtcacaaaattctctgcatgatttgattagctccaacatgacgcagtggggttgcttaccttggacagctggatgcatcaagaccaggtttacagttctaattcatttccaaccgttgttaacctctgagattccttactgttactgacacgattatctctcgatgtgatatgatttcctcgttctcacaggctatgtgttttagaccgagtggctgatctgagaggcactggatactcaaatcagcaaccaaacatcgggtttttggcagctaggcaaaggttgaacgaacgaactcctcttgatcagatcggtgggcatagccatcagattcagcaatcagcactagcttttcacaactgtcgcagctcaaaagatgattggcagaactgcattaccgaaagattacctgctgctggtagtggttggtggtttctgcaaacccatagtttcaggctctagctttattttttttccccttctctctttagactgtggcttgactctgacggaagtaaagggaaatagttgcatcagcacgaacttttttaattttttgaaatttttaattttaaaaataaacccttctaaaacatatttctagaatctaaaccttttggtcacgtcagcgctctaacatagcaaaaacacgccgacatgccacacatagcgggcttaaatagttttgtcccgccatgctagcgaaggtggcgcgtgactacgtaacactgtcataccaaccagaccgcgtgaccaaataatgcttccatgtcaaccagactggcgtgacagtgttgttttttcacgctagtctggctagcgtggttaaaaagttcagattttaaaaataagtttcgaaaggatttatttttaaaattaaaattttaaaaagtttaaataataataaaaaacccatcagcacatgttgcaatcccaatctgaaaagaacaaaagaaagactagagactagagagagtggagttgtcatggtggtggtcaacaattttgatggcctgtgggggcagcttattttgatggccttgcgtatgacagataacagcggctggtacgtattctgacattttgattggtcaatttccattccgtacgtgttgctatcttgctgatgcttttggtttggggcccctgtttagaaatcagggtcggcttggataatagcagtttcctctcatctttgggtagccgatcaatcatcaacgtgtggtggtggtggtggttaagaacaaattttagtctaccaaattggataagtttagagagagcaggttagcgggagagatctgcaggcgtcaccgggtctgcatgtgtcaccaggccgctgctgcctgtactaaattctcttccttttctaattgctggtaaagaagaattgctctgcgttctaaggtatagtagcataactagcatttaaatttggcaaaatttaaatatccaaaatataactgccaaaaataccagatgaaatgtcaaaagacactccactcttatctctgcgaccctacctactttctattaagtgggacaaccagtgattggcaatttagccttttttttatctatcttcttactcgttattaaagactttaaaaacagctatattttaaaacgtactccctccgtactcgtataggaagtcgttttggacagcgacatgatctccaaaacacaacttttacttcttatttctataaaaatatttattgtaaagtgatatatgtatacttttatgaaagtatttttcaagacaaatctattcatatagtttttatatttttaaactcaacaacttgagagttattcatgatttatattcctaaggtttaacttaaatattatcctaaacgacttcctttacaagtacgggggagtacgcctcctttcataaatcgaattaattttgataatatgtctgtttttttcgaaaatactattatattttttataaacttgattaatttaaagcagtttaattagaaaaatatcaaataacttataatatgaaacaagcactgtactggataagataagatttggagggtacttcctccgtttcaaaaaaactcaattcctaggtttctgtgtctaacgtttgaccgtttgtcttatttaaaaaattatgaaaaaaatttaaaaagataagtcatgcatataagtattattcgtgttttatcatctaacaataataaaaattgtaatcataaaataatttcatataaaatggacggtcaaacgttggacatggaaatcaaataattcagttttttttttggacggaggaggtaaggtcaaagagcggtaaatttttaatagagcagtagcagcggcggcagcagcaagagcaaatatcatgattattcggagtactagtgtacaagctacctgtacgaataaaaacaagcagcagaaggtcgggtgcagaattattacgctttcaccttcgttgcttctcctctccgattctctcttgctttccttccctttccctgtcgcgagcttacgcgtcgttgtcccgcgggggcggagagagaaatccccactctcactccatccacctagtctaatccagcttgctgccgctgctgctgttgctgctgcgtcacctcagtacctcacctcatctcatccatcgtttgctccgtttctgtgggatttccaccggctgattctctcgccctcctcccataaagcgaccggtggttcgcaccggacggatgccccaatctttgcatcgaggggcaacgaagcgaggtcacggatgcgggcgatgccaccgccgtcttcttgtccctagatccatcaaggtatccatttctttctctcccccctccgtgttgcccgtctctctgccacttcttgttggtctaatcgagcaagaagggggatgatggtttgtgtggtgtggcaagaacatcagggcttgggtttcttggtggtggaggttgttgatcgattctcgttgtgccccccctttgctggaggcagatcgatctatgtgggcaccttctgttattaaggaattatattcctttttcacggttttcaaggcttcgggagcatcataaacacgtttatggtgttgagtgttttgggtcttttacatctgtacagttttatatgaatcctataaatggacttaaaactatttgaaaaaaaggatatttgtgagttggcaaatatggaacctagttaactcattgccgaatggtataattttgcatattaaaaactttcttcaaggatgagcagaaaatttgagttcaaaatcaaatccagttgcctagtactttgtctgcatagaagatgcagggcacaagaattggttatgtaatgctgatacttgaccaattcagttgattctttactgatattcatatgacaggaatacaggattcaacctatgttcctaaataacaataataacgttgtcaaattgcaaatatgagtcatcctccgggttctgattagatgtttgttcatcctccatgctctgattactgtgcgtgcagtgttaggaggacagagacaagaaaatgcttgtatatctgccaatatcgtgttcttggttgttcatatccttggtctctcatgctttcaagttggccttggccatcagtttatgctctgtgcattacctagctttgtttaatgtgtattggtcaatcccgagaaaaaggaactacatgatgaccttagttcatgcttattaaagcagtgtcatatctctcatttcaagccatggaactctttccattgaaaacctcatttgaaacaacggttgaagtacaacagtagaacacaagattagtatttcttaaaaattgaaatcctagaatttagccagcattttatatgcactgatatgcatgcttgcactttgtggattatgtgtttgctctgttgcttgagtttattttatcctccttctgtgtgttgctttgagcgtgcttctgttgttaaactgatgttgatgttttctgtttatgattcagtgaccagttctctgatcagtgagaataatggccgctgctgaagcaagggctgcttggcagcgtgctgcaaaccgttgcatcgttcaggaggatagaaaaagagcaccaaaactagcctgctgtccaccatcatcagaacagcagcatgtcaaaagcaatggaaattgtaggaattctgaagaccgccctgtgcccaatttcatgccattgagctggaatcccatgaactccagtctgccacctgatattagatggtggcttcagttacaaccaaatttaggagggcagaagaatcttgcaggtgagcacctatattttctgggaagagagatcagtgataaggaagtggaggattcagcacaaaagaatatacacgacgaaccattattttgtgaaatgttcgacaccaatcctgagaagattgaggatgtttttgagccttcgtggatggtttccacagcttccatgaagtattcttctgaaacaggcttacaagacttgaaaaatataggtggctattcccaagttccttcgaagtgcaaagaaaatgccagtgactgtttgttcaatgataaagaattcctggatttcaaaaattttaacccaccaccgtcgaagaacccacagaaggacgattttgatatgaatgcgccttggaaaggaggtgaaaggagtcaaccatggtggcagatcactgatgagaatgagctggctttactggttgcagaaagagcaatgcagcatattgagaattgcgatttaccaagacctacccagatagttcgtgttcagggtactgaatcacgcagtcatgaaaatatgggtaggtacagggggtcatcaggtccagcaggtacaatgtcatatcctgatactggacaatgtgaacatattgaatgcagttacagcacagcaagcacagatgaggtggatttaaccagtgatggagtttggcaacagcaggaaagaaatgttgcacgcaggtgtgtatttcttctgccttactctgtcaccaatttaccctgatgccataattgtaatttccgtaagcatacctaaattttgatgcacatctattttaatttcctagttgatatctgaagttcaggtggtgcattacttctgtattacaaatagaattgctaaatattactgtagtctgaattatttggtgctaagtaggagtttccctttgtgttcgctaaaatgctgtttggtgctagtgagatcttttgtctgttcctgttcagttctctttttgaaaggaaaacttattatactggttaagtttcagttttggttcatttcagagatacattgttgctcactgcctacaggataatggtgccattgcccttgtttgcaaaagagttcatggacttcttcaaaaaagttgcttgttatatttgtttcatttaatcaatacctagagttttttttttaaaaaaaattcctattgttgattgggaactacacaatttcacaatctacattcatctattttaagttatgttccataatccgcactcggaaacttcaaatgtgctccattatttttcagtttcttgtgtttttctggttatcatttcatccaattttcctgcagtgatgcacaagatttttctaggggcatcaatacagaaccacgaggcaagcgaacataccagaatcctgcagagcaagctcaacttttggaggcactttgtcactcgcaaacacgggcgagggaagctgagatggctgggaagaaagcacaaagtgaaaaagacgatgtcatcaagctatttttcagacaggcctcgcatctctttgcgtgcaaacaatggctgaaaatgttacagttggagaacatctgcctccagcttaaacacagagagcatcagatagcaaccatgatacctgatattccatggattacactaaagaaaaggactacaccagatcatgagaaagaagattggacaaggaagaaaggcagaaggcataaaaatgcagggagtttctgtgacgcgctcttatttgccgttggtttaggtcttgcaggtgcagggctgcttcttggctggacatttgggtggcttctggccaagttctgaagttgcccatagttttcaactgagactagcttagctagctaggcatgtattttgctgtgcgcctgtatgtgatgattcatagatgaaatctccaggtatactctccatattggagtgagatggcgaaattttagacccaagaatatgttcgtttggaagctctgctagttagaagacacgaatgtatagggagcatttgttgcaaatttgcaatttgtaaatatgggaggaggacgtctgtgaatgcttgtacatactgatcagtagagaaaaaatgtcatcggacttcttcaacagtactccctccgtcccaaaaagaattaagaggggataagaattaagaggggatgtgatctctcctaggttgatctccaggttgatgtatgtgtttttgggacggagggagtatctccacctgtacctattatttggaaaattagcagcgttactgcagattgtgtttttcaaaacagggaactaccaagcggcagttctgtctgtttttcagtgaattgcaggttatgtgtttttcagtgcaagcaattgttggttatttgcctgaaatgaaattctgtcacattctagttgtttctgcttggttcttttacaatgttcaaatatgtacagactatcttatttctttcttttaatatgttcacatttaatttttgtttgcctgcctgttttcttcaaacaaggatggtagagtgctagtggtaattaatatgttacttcacctcttctacgactacagtatacactggccttctatgaatcgcctcttgatgctccttaaagtttcataatagggattttgtatcatctgttcggggttttttttttatttttagcattcttgtcaattctgtaacatttgttcagcatttcttatgtttccaaaatactagataggtctcgccaagcttagaatcgaattgaatgcaacaaagtttcgcatttgttctgtttggttccctgagcatctatttttcctaagaccaaggagtgaggtattggtgttgaagttatcgtacactgctccttagttgtcattttatttcttacaaaaggttagtggataacaaatatccgagggactacaaagaattgaaaagattttatcatagcctcaaaattatttgttcacattcatgttaaagagaaattgggttcaaaatttgataagcatcgatcccacacaattgccgtctttttttagagatacttctgaaaaccccctttttaattttttttattgttcaccaaattttcgtttaggcaaaactcatacatggctgaggtaaaattgcacgaacataacaaatgagcatttgacagtatactcaccgtgcaccttgaaagatgatgtgttacttctttgcatgtccgcaatttattgatttgtttcccgagccctgacttacctctagtgtgaattgaacgtgaggactcatccgtcaattcgaaaactttcctacagggttagtccacagaagatatgtgtaacatcccgccttcccccaggccaggcccgcttacatctggcagcttttatataggtcatagactgccctcacagaccaacacatgtcttttctgcacactaagatgatgtgttactcctttgcatgtctgtaatttattgtgttaattcgaaaactttcctacagggttagtccacagaagatatgtgtaacaatcccgccttcccccaggctaggcccgcttacatatggcagcttttataggtcatagactaccctcacagaccaacacatgtcttttctgcacactttgtagaagatatgtgtaacatcctgccttcccctaggccaggcccgcttttataggtcatagactgtcctcacagaccaacacatgtcttttctgcacactttgtcctcactcgtgtgcacccgggaagaatttcccggtcggtcactcatcccaaattgctccaggccaagcacacttaaccctggagttctttggaaatcggcttccggaaaagaagtcttaaccctggagttctttggaaatcggcttccggaaaagaagttgcaacttgttgatatgagtattctattaattctattaagccctgggccggaatgtcacaatatgcatcctatgtccatgaaagtactagctctaatggttcattaatcgaattcaacatcatgtctaatttaattaacgcagaccattttgacctaagcaccatgcttaaatcaaaaaccctatggatgtcttacgaacacacccaaactagagcatacaaaaataaacaaatgaagcataacatatacgatcaagccatattcacatggtggtactattgagtaaaggtttggtgaaccttgttttatcttttacataactgagtgtacttaccaccagcataatggatatgttgaaatctttgaaacagtggcatggtcacatatgattgtcgatctctcatccatctgatgcggattgtagcggggcaaggcactttgaccatgccaagccaggcagctgtaacatcctgaaagttaactactttctaattatgcatcatgccagttcttatgttcttaatacctgaaagtgcatctaggcccctaatgattttgatgattgattacaatgcgattagagaggaataacacttttattcaagcaaatatgaaggttgttatgtcctcgacatgttgtaatgagatgcataccccatgaatgcaacatcacgatgcaatgcggcaatgatcaaatggtatattgtatcttttaccttgcattgtgtcgtaggaatgccgtactattaagagggataccacatgcatataattggtagaacactagtgctcaaaatgcttcatctttgtgtgagttgaaaaacctaagccaaaattttaatcccgagttgtttcacttgtcacaacacttacaccgggtttctttgcaagtttttcaacatatcttgaaggttttggaccattttttatgttgggtttgatagcccacgaaactagctttccatagagtccaaaatcttcgaaatcggagttcggagtaaaaagttattgcactttttacttgagcaacattagactatccgatttgaaatcagactatccgatgtatcggactatccgatttttcacagaacttcactctctgtctttgtttgaaaaatcctttcgagtgagtttttctatttgtcggagtatctgatgttggatcagatagtccgatgatacagagactctgaaatttcatggaacttgagtctctatttgaggacgaagtttttgcttctaaaatatcggacactccgatttaacatcagatagtccgatgtctcggaaagtccgaaatttcatggaacttcgttctctgtttcttgttgccttggaggtttaaaatatcggactatccgacgtgggctgaaagattcccctccaatggccacattttttttttgggggagggggggttctataaataccccccacctaacccttttctagggttacccaactcatttcattctcattcactttgggttgagcttggtgctaaggtgctttggatctttgagctcattctccctctctcaaatccctcctcgttcattgtgtggtgtatcttggtggttgtggatttggtatttgagggcctagtgtgtgtttcactcgatcttgagcactagggtttgaccaagagttgtgtggtgtttgttactcttagaggatgaggactcctagacggctaggtgtcactcccgagccaccgatctacgtgtggttggccgggagaagtttgtgaaggcccgatctcgcctccgcaaggaaagagataccccttagtggaaggaggagtgcttagtgtaacctcttgaggaaagggttagcaaagacccggctcttagtgagctcctcaacggagagtagaatcccctgaaggatttgaactccgggaacaactccgtgaacttcatcgttggtgatatctcttcatcctctctttagctttgcttaattgtgctgctatagatctagtcgttgtttgcgctatactcttgtttgtgtgctagatctgcttgttgtgattgtttagtggatcagacaaactgatccaacatcagactatctaatattttcggatagtctgactgtggatcagactttccgaccttaactcaattttagtttccgcataaagttttaaattagcctattcatccctcctctaggcctaattgaccctttcaataaccttctaaacctaggacattataattagagggccaactgggctttcacattgtccaccatgtgtcatgtggtgggccaggtgaatcccggcctcaccaaatggcgccacggctctcttcttgcccagttggccgaattgggtgttgccaggcatgtacgacatgtgtccagactcgcatcgtccctaatgactcagcgctactgtcttttccacgtcttttcagtcccatcggtttggaatctttttcctaaatttgtttcatttatggatgtgatcgttgggttatagctggcgggggggggggggggaggggtcagggccttgactttttcaagtcttcggccttgcccctgtgccccttagcagggagattgagtgtttttaggctagcttctcgaagatgtctttgatgaacaaatgtataatatgtagatcttgtatgcatccacggtcctcttcagaaggaacgtgtagtgtacaaggaccaaggggggccgggtcccagaccagatcgggacctaggctccatccagtccataattttaatatgtagatcttgtacgtttccacgctcatctcaaggaggtatgtgtaacctacaaggacagtgtggggcaaaagtctgccgcaaagacttatggtatcttagagtttgttagagataagtgtcgtgtccgatatggacatagtttgtaattctcgggtataaatagaccccggatcccatataatcaatgaacacacgttcaatacaatctcggtgcatcgccaccctttttactttcgttttgtttcgacgagttcttgctttcgggttgagctgcatcgatttcgatcttcaacaagaggtaaaacttgttatggcggcttgcattctcgggattagtgcttccatctttatgatactctaatcttgtttatgtaatttgtcgagttatcatatatcttacataatctctagcaatatcgctatctaacctacaatcggctaacatctgtcggtagagggcaaccgattaggttagacatcaatgttgacttagattatataggatattcaccactctatgaaactttcaatggcttgattgtctagatattgtccttcttttcatacttatagctgcatcagttgagtttgatcttataagtcatgattagaatctcaatctctagcctgcttcttggttgccgattagggtagtatcggggtttcagctgatcttacctgatttaactatatttactccatatgcttcgttgatatgttaaatctgccctttatgttaagatcttgttgcatttaagtatattaggcctttgtttgatatattttacttgctttaatatcttaatatagagtggtatcggagtattagccgatacatgctagatctatctgatcggctatgctatgaacatatatagtcccgttattaatatatattttgatctaagtgatttatactgtctcggcatggcgaccgatctatcccaatcacttgatttaagtatatatcgatataaggagtatatattgttaatatctacagccgatcgagtagatttagttccttcttatttattcatgaccgccgatcgatacatatatgacatcggcccaaagataaatgatatgtcatcggcactcagccgatcggctatcgtttataggtttaaccgcggtttctttgtctttgtttcttgttgattgtaggatcaaatcaactggcacgcttgcatacccgaaggcgagttttggacctgcactggagttaagcagatatcccaggcctcgtgttttatgtcaacacgcttttggtacgcctggtgggacagatcagaagtcagaatcacaacaacagtttttcccatggccgagaaaccgccagcatcgccgtcctcggctggtgaacctggctatgttaaagccaagatccacaagctgggtctatctgaggttgatgaagccaacattgtgcccgtcactatggataaattgacacccgagcagcaaaaggatcttgaggcaatgatgtagcaagcacggaatcagttcttgagctcattcacggagacccgcaagggaacacttgttcaaaagtacaaagtaaaagtaattggtgatgttcctgggacaggttcttctaaggatggagaagtgaaacaagctctagatgacgcggctcaaccgagtaataaaggtgctgcagatggctttcaaggagatcaaggtgatggctctcaaggagttcagggtgttggctctcaaggaattcaaggtgatggtgttcagggagttcaaggtggaggtcttaatcaagatggcaatgcaacacagttacagtttaacaacttccaggatcaggttgactatgctatgcaccatgctttgatcaatcaatctggaatattagtcaacactttgtcaaacatggtgaagataatggttgatggttcaatggctgaatatcaggctacatgaccggtttatctaccaggaggggtattcctgaattatcggccattagtcactgataatcagccagctgttcaatcaattcctcttaatgcaccatcggctcagccgacggcaccagtatcggctcctgcacctgctgcaccgtcatcagcaccaggtcaattagtgaatcctcgattgttggtgagagagaaaccacagcatagtggatagaatgtgaatcggctaacgcaggatcatgttgcagctatgttcttatctcctcaacctactgttgatccaacccagcagcagccgattcagcaaataccaccaaggcagcaggttgtacagccgattcaacaaacaccaccaatccaacaggttgtgcaaccaattcagcagacgccacctaggcggcaggttttgcaaccaattcagcagacgccattaaggcaacaaattattcagccgattcaacagcaaggcttgatgaatgcatcggctgggtttgcaacacctgacaatcagccaaggcagcatgctgcgaatcaagttgtttcagagcacttggttcatcatgtacagccagatcagacggtaatacctcaagttgtccccgagcatttggtgcacaatattcagccaaattttcaaaattaccaagggggcaatttgaattatcagtatcagcctccttcaccgcaagttcaatatcagcagggaggatcggctcaaccccagtttgttcctcaatacaatcaattcgagctcatgccacaataacctcaaggattaccaaagcaacgaccatgggccgatatgattgcggatgtgatgaaagagtagtttgggctcaggccgaaagacgctagaaatttgtatcggtatccttaccctgaatggtttgagagggttcctcttcctaaccgattcaaagttccagacttttcaaaattctcagggcaggatagtgtgtcaacttatgaacacgttagccgacttttagctcagtgtggtgaagcatcggctgtggaagccttgagggttacgttgttccggttgtctttgtctagatcggctttcacttggtttacttctctaccatgtggattaatcaacagttggcctgatttggagaagcaatttcatagttatttctacagtgggattcatgagatgaaactgtccgatttaacagtgatcaagtagagacatgatgagtctgtgcatgagtatattcagagattcagagagatgaggaataagtgctacagcttgagtttaactgatgcccagttagccgatttggcttttcagggtatgattgctccgatcagggagaaattctcgtttcaagactttgatagcttgtcacatcttgcacagaaggtaaccttgcatgaacagaggtttgcagaagccaggaagaacttcaaaagggttaatcatgtctgtccttacatatatggatcggatgatgatgatgatgacgactccgagatagcagcagccgaatgggtgaaaagcaaaaaggttatatcatgccaatgggtaaagaattctggaaaagaggagagatatgactttgatattacccaagctgacaagatttttgatttgctactccgagagaaacagattcaacttcctgctggccatacaatcccattggctgaagaattgggcaagaggagatattataagtggcataattttgggtctcattccaccaatgtttgcaaggtcttcaggcagcagatccaagcagctattgagggaggcaaaatcaaatttgatgattctaagaggccgatgaaggttgatggcaatccttttcctgtcaatgtggtgcatacagctggccgaatagccgatgggggacacgcaagaggtttttaggtgaattcggctaaaattatcgacaagtatcagaagaggtatgacaaacaacaggagaggcattacgaggaaggtgatgacggttttgatcctcattggggctgcgagttctttagattttgctggaacgagggtatgaggctgtcatctatcgaagactgtcctggatgtggtaatattgcagaaagctcaagccgatcgtataatagaggcaatcggctaaagcaaacaagagttcctgttcatcaaaggttagtcccggtgaaccaagattgtaaccaagagggcaatgaagacaggaagactcaatggtgtccttctggtatctttataaagaatcagaagagaagggttcaaagattgaggaacagggagcacttttaggaggtcgaacaggaaatcaatcatcggctaaagaaaatgaagccgaagcaggagtggcgagttaagaatcaagctcctatagccgatgaggccgcagccgatgaagcaaagagattggctaaagggaaaagtgttgtaactgcatcggttaacatggttttcacgttgcctgctgaatttggggtcaagcaagccgatgtcgatgaagttgaagaagaatcagctaaattgattttgtcaccagagcaagcaatcttcgaaaagccggaaggaacagagaatcggcatcttaaaccattgtatataaatggctatgtcaatgggaagccgatgtccaagatgatggtcgatggtggggctgcagtgaatttgatgccttatgctacattcaggaagttgggcagaaacgctaaagatctcatcaagacaaacatggtgctcaaggattttggtggcaatccatcagaaaccaaaggagttttaaatgtggaattgaccgtcggcagcaaaactatctctacaacgttctttgagcatcgatgggaagggttcctacagcttgttgcttggaagggattggattcatgccaattgttgtattcctccaaccatgcattaatgcttgattcagtggcaaggcgacaagattgaaattgtgccagccgacaggtcagtcaatgttactagtgccgatttagctctttgggagatggatggtcttgattgtttatctggaaaagtttaggatggagattttctaaaagtgtccgattctgatatacaaccaattgaagatggagaacctaagctattattttgagggcgtcgtggatgatctcgatgacaaacaaggacagggtttcatgtcggccgatgatttggaagaaattgacataggtccaggtgatcgaccaaggccgacatttattagtaagaatttatcttcggaattcagaaccaagttgatagagctgttaaaggagttcagagattgcttcgcttgggagtattatgagatacccggactcagccgatcgattgttgaacatcggctacctatcaaaccaggggttagaccacatcaacaacctccgagaagatgcaaagccgatatgctcgaacctgtcaaggctgggattaaacgtttatatggtgctggttttattcgtccatgccgatatgccgagttggtttccagtatagtttctgttatcaagaagaacgacaaagtgagggtgtgcattgacttcagggatttaaataaagctaccccaatggacgagtatccaatgccagtagccgatcagctggttgatgctgcctcaggacacaagattttaagttttatggatggtaatgcaggattcaatcaaatctttatggctgaagaagatatccataagacagcttttaggtgtcctggtgcaatcgacttgtttgagtgagctgtcatgactttcggcttgaaaagtgctggggctacatatcaaagagccatgaattatatatatcatgatctgatcggctagttggttgaagtctacattgatgatgtggttgttaaatctaaagagatataagaccacatagtcgatttgaggaaggtttttgagagaaccaggaaatatggcttgaaaatgaacccaacaaagtgtgctttcggcgtatcggctggccagtttttgggatttcttgttcatgagaggggaattgagattacccaaagaagtgttaatgcaatcaagaagattcagcctccagagaacaagacagagttgcaggagatgatctgcaagataaattttgttagaaggtttatttctaatttttctggaaggttagagccttttacaccattattaagattgaaagccgatcaacagtttacttggggggcaaagcaacagaaagctttggataatattaaggaatatcttagctctcctccagttttgattcctccacagaaggggataccttttaggttatatctgtcggccggtgagaagtcaatcggctcggtcttgattcaggagctagaagggaaagaaagagttgtattctacttgagccgtcagctcttggatgcagaaactagatattcccctgtagagaagttgtgcttgtgcttatatttttcatgtacaaggttaaggcattatctattgtccaacgaatttactgtagtatgctaagccgatgttattaaatacatgttatcggctccaatcttgaaagggagggttggaaaatggatatgttccttaactaagtttgatcttcgatatgagtcaccgaaggcggtcaaagggcaagctatagccgattttattgttgaacatcgtgatgattcagtcggctcggttgagattgtgccatggactttgttctttgatggattagtatgtactcatggttgtggtatcggcttagttataatttcccctcgggggggggcaagttttgagtttgcttatactattaaaccttatgcaacctacaatctagctgagtatgaggtagttcttaaagcattgcagttactcaaggaagttgaagccgatgctatcgaaattatgggggattctttgctagtaatcagtcaattggcaggagaatatgagtgcaataatgatacattaatagtttataatgagaagtgccaagaactaatgaaagaatttcggctggttactttgaggcatgtatctcgagagcaaaatattgaatctaatgatttggcccaaggggcatcagggtataagctgatgatcaaagatgttaaggttgaagttgctacattaacggccgatgattggagatatgatgtgcattaatatttacagaatccatctcaatcgacttctcataaattaagatataaagcgttgaagtatactttattggatgatgaactctattatcggacgattgatggggtgttgcttaagtgtttgagtgccgatcaggctaaggttgcaatcggcgaggttcatgaagggatttgtggcactcatcaattggctcataagatgaagtgattgcttcgacgtgcagggtatttttggccgacaatgctggaggattgtttcaaatattacaaagggtgtcaagattgtcagaaatttgaagcaattcagagggcaccggcgtcggctatgaatcctatcattaagccatggccatttagaggttgggggaattgatatgatcagcatgattaatccaccatcgagtaaaggacataagtttatattggtggcgaccgattattttaccaagtgggtaaaggcgattcctttaaagaaggttgattctgggaatgctatacagtttgttcaagagcatataatctatcgatttggtattcctcaaaccattacaaccgattaaggttcaattttcgtgtccgatgagtttgttcagtttgccgatagaatgggtatcaaattgttgaattcttcaccatattatgcacaagctaatgggcaggccgaggcatctaacaagagcttgctcaaattaattaagagaaagatttttgattatcctcggcaatggcatactcgattggccgaagcattgtggtcttatcggatggcttgtcatggatcgatccaagtccctccttataagcttgtttatggacatgaggctgttttaccatgggaggttagaatcggctcaaggagaacggagttgcgaaatgatttaacagccgacgagtattataacctcatggccgatgaaagggaagacttggttcagtctagattgcgagcccttgcaaaggtgttgacagaaaacacgaggcctgggagatctgcttaactccagtgcaggtccaaagctcgccttcgggtgtgctagtgtgccagttgatttgatcctgtaatcaacaagaaataaaggcaaagaaaccacggttaaatctataaatgatagccgatcggctaggtaccgatgacatattatttatctttgagccgatgtcatatgtgaatcgatcggcagttgtaaatagacaataaagaactaaatctattcgatcggctgtagatatttccaatatatagttcttatatcgatatatacttaaatcaagtgattgggatagatcggtcgtcatgccgagacagtataaatcacttaaatcgaaatatatattaataacagggctatatatatgtttatagcatacccgatcagatagatttagcatgtatcggctaatactccgatactactctatatcagaatattaaaataggtataatatatcaaacaaagacctaatatacctagatacagcaatatctcgacataaagagcacatttaacatgtcaataaagcatacagagcaaatatagttaaaccagataaggtcggctgaaactccgacgctaccctaatcggcaaccagaaggcaggctagagattgatattctaagcacgacttaatagatcaaactcaactgatgcatcattaagtatgaaaagaagaacaatatctagacaatcaagccgctagaagtttcctagagtggtagataccttatacaatctaagtcaacattgatatataatctaatcggctgccctctacagacagatgttggacgattgtagattagattatgtaagacatatgataacttgacgaattacatagacaagattagagtgtcgtaaagatggaagcactaatcccgagaacacaatccatcataacaagttttacctcttgttgaagatcgaaaccgatgtagctcaacccgaaagcaagaactcgtcaaaataaaactaaagcaaaagggtggcgatgcgccgagattgtattgaacgtgtgttattaaaattacatagggcttgagtctatttatacccgagaattacaagatatgtccataacggacacgactactatctctaacaaactctaagatactataagtctttgcggcagacttttgcccaatcatatctccaaggagattacataaaacaccctaattaatagatgcaattgccttctcaggactctatccatgtgcggcaatcaccttgaagcacctcaatccaacccgatatcatatatcaagctgcattgtcggaatcggctgtatcggcttacctagtccgactcagacccatccgatcctaatcgtagccgatttggactccagctgattcctgccctgtttccgaacttgatctccgcctccgattttgcttcgatctaatcttctttcctgatgctaatgttaccaaattcggttgttaacaaaaggttaccaaggataaggaacgagttgctcggcattacaacaagaaagtggtgcccaaagcttttttggaaggtgaacttgtatggaagttgattttgccgattgggactcgggatagcaaattcggcaagtggtcgccgaattgggaaggaccgttccaaatctatagagttgtctctaagggggcttacatgttgcaaggcctcgatggagaagtttatggacgagcactaaatggcaagtacttgaagaaatattacccaagtgtttgggttaacacatgatcggctgatgttgccgatacatgatagccgatgtgtttgcatcgccttgagatggtcgatattgttatatcacccttagttgttttcatattgtaatcggttgtgatttgccgatgtacaatggccgatattgttatatcacccttagttgttttcacattgtaatcggttgtgatttgccgatgtacaatggtcgatattgttatatcgcccttagttgttcttataattttatcaatgcttttgtcattgtaaaattaggggggcacatatatgaaaattgcagatttttgagcaaaatatggagttctattgaatcggcataaaagttatcaagataagttcgataaagagccaaagtttcttagccgattacaaaaaatttctaagacctattacacaagatatcactgagacaaatgttgctggatagccgaaatagccctttgcctgatttgttctacttcttcaatggcttgggcatcttgagcgtcgattctagggatgacttttaaagacttggtgagatcagcaacattcttgatagccaattttagtcttgtcttttgttcttcgacagattttgggagatcggctagctttttatgttccatatccagctcggcgttgcattcttcaagttgtgccaagagttcaatcttacgagcttcgagccgatcaatgttagatttaatcgggccctcagatagttgatcaagtttggccttctcttcatgaacaagctatcaattggcctggattgtggcctcgatatccttgcgctcccgacgtttagctaatctcagcttggctttctccagcttgaattgatgctgctcaagatagacggctggagtacggacatcggctagctcatctgggattagagcttgaacctcgtgtagctgagtcctaattgagccacaatcaaccactaagctgtctaacgatgatgcctctagccgctgagagatatcttcaagaattttcttcacatcatcggataaaagggctaaagctttgcttctggtatcctcttctgtctcatcaagatagtctctaatgtcaaaagagaaaagatcagctaagacctgcaataattatttaaagagagttagagctaaatagacctagccaatctaaattcttgtctcaaaaggaaacttactaggatagcaggagcagttggttgttcttcttcttcaatatgatggctctctatagccgatggagtttggtcactcgatgattgttgtataggagaaggaggaggaggaggaggctataaaaaagacaagtgttagataaaatcggctgagatcaactagtggaagagttaagaatatcttactcatggagctggtttgagaattgttattgccgatttcttcttcacagcagttttttcttctgcaactataaaatatgtgagtaatcggccataaaatgaagtgattacaaaaggaatcaagggaagttgtttactcttgaaaaatgggctggggcagaaggagttggaggagtttgcttaggtgaagccgatggagttctttcagtatcgcttatttcatctgcggcttgatcaacatcctcgccgatttcttcttcatccagagcttgttcaatggatggatctagggcaggcagatcatcagttggcttcgttttctttgacttgactttcttctttggagcttgagccgatagatccgcagtcgatgacctggtttttctctttttaccggtatcggctggttctctgatgaacccttggagaagagttgaagtcctgggggcacgataaccaatgacatggggagatggcccgcctccattaggaatcagacctggagcatattcgatatttctaccactattgctctgatgaggaggagagaattctgtcgtctgcaagtcaaaaagaaaattagtcaagttatgaatcggctaagcaattattcagacaaagttaaatcggggcatacctgagggataacatctggaaagaggtatgtcatgtacatggaagccgattgatagaataggtgcagtttccattcaccccaccatctgttaaagtttttgctcctgaacattgccagctctatattctcaatgctgcccagaggaggtccttgaaggttgagcagccgatccatcatcaaggttgatgaaattaaccttgagctcccatcggactttaggtttgaggacattaatcatgaaagataccaaaagtccagggaagttttctcagctgcaatcagcccatgcatccttcctgtcggcatccatcaggaagaaatatccaagtctcttatgagttctatcatccaatgagctcagctagacaacttggaatgggccaactcccaatcggcttattctttgccgataagatccagtgccgagtggaacttacctcagcgtactcggctgacagcgcggcagacgggctatcggaggacgacatcgccgtgggcagagatttggccaaaaatgaagtctcctggggatctccttgtgcgtcggagaaatcgccggagagagagaagacagagttggcttcggcggtgaaaacggaagaagacggtgtgagatttctcgggggtaacggttagtatttaaagcgatggaataacagtcgaaaaacggcaagagcgaatttcgctcggagttgatatatggcaaatccgaaacattgctaaatattccggacttggggggcatgtgttaacgaccaaatttggtaatatcagcattggagatggagattagatcgaggcagaatcaaagatgaagatcgtttaggaaacagagtaaaattggctggagtccaaatcggctacgaccaggatcagctgagtccgagtcagactgtgtgagccgatatagcccattccgacaatacaactcggtatacgtcctcgggttgagttggtatgcttcaagatgattgccatgcatggatagagtcctgagaaggcaattgtatctattaattaggatattttatgtaatttccttagagatatatttgggcaaaagtctgccgcaaagacttatggtatcttagggtttgttagagataagtgtcgtgtccgatatggacatagtttgtaatctcgggtataaatagaccccggaccccttataatcaatgaacacacgttcaatacaatctcggtgcatcgccaccctttttactttcgttttgtttcgacgagttcttgctttcgggttgagctgcatcgatttcgatcttcaacaagaggtaaaacttgttatggcggcttgcattctcgggattagtgcttccatctttatgatactctaatcttgtttatgtaatttgtcgagttatcatatatcttacataatctctagcaatatcgctatctaacctacaatcggctaacatctgtcggtagagggcagccgattaggttagacatcgatgttgacttagattatataggatatccaccactctatgaaacttccaatggcttgattgtctagatattgtccttcttttcatacttatagctgcatcagttgagtttgatcttataagtcgtgattagaatctcaatcttagcctgcttcttggttgccgattagggtagtatcggggtttcaaccgatcttatctgatttaactatatttactccgtatgcttcgttgatatgttaaatctgccctttatgttaagatcttgttgcatttaagtatattaggcctttgtttgatatattttacttgctttaatatcttaatatagagtggtatcggagtattagctgatacatgctagatctatctgatcggctttgctatgaacatatatagtcccgttattaatatatatttcaatctaagtgatttatactgtctcggcatggcgaccgatctatcccaatcatttgatttaagtatatatcgatataaggagtatatattgttaatatctacagccgatcgagtagatttagttccttcttatttattcatgaccgccgattgatacatatatgacatcggctcaaagataaatgatatgtcatcggcactcagctgatcggctatcgtttctaggtttaaccgcggtttctttgtctttgtttcttgttgattataggatcaaatcaactggcacgcttgcatacccgaaggtgagttttggacctgcactggagttaagcagatatcccaggcctcgtgttttacgtcaacacttctcaaggaggaatatgttacttacaagggtaatgaggggccgggcccttcataacctacaccttttaagatataaaccttataggcttgtacactcttctctgcgaagaacataagccctaaggatagatggggactcaggatcctaggccaagttgggctcctggtcccttcctacttgtaatcttaagatgggagccccctgtcccaagtcaacttgagctctcgggcttccttcatgaggcgggggcgtcggggcctgtctcgaaagtgggtcccatgcccgctatcgttaacgtgcacttaacttaatggtggtttaaatatggtttgttattttagttaacaaggaatatgtgttaagttcccgggaaagggtaccccaattcccgtttcaccaataactgtagaactgatctttcgtcatggtacctaaaaacacatactccgtatttctcagatccactaccaaccggcactaaatattatttttagtaccggttggttttaccaaccggtattggtattaaagattaacactttcgtatcggttgttgtcaccaaccggtgctaaagcttgtcacctttttatatgccttattcttcctccagcccaagccattgctgtcaagaggaggaggaagagaggtcataccaaaattttttgctaaagtattttggtgatattacacaaataaaaaatatccaaaaggttagcaacttcatcctctatttcagtcaaaaaaaaaacttcatcctctattgatgtatggttaacatattacatttctagctatgttttcatacgtcattctctcaaaaacgtttacagaaaaagaggagacaataaatttgacgagaaaataagagcaataattttagagacattggatgaaaatgtaaaacaagaatatcaaaggataggaaatgaagggaaaaaaagaaaactaagtccatttaaaaacactaaaatagttagaaataagaagaatacattaaaagtatgtttataattttttaaaaagatttaaaaaataaaataaagataattcatgaaaaaattatttaaaattttttaaaacttgaaaaagtatgaagtccatttaaaactcattgaaatagttagaaataagaagaattcattaaaaatatgtttataattataaaaaagatagagcatgaaaaaatatacttacaattgcgttgttttaaattattaaatgattattatttatttattttcactttcgttgacttcctttaaatttcattgtttctgttaacaacggaattttgcatcagactcggagaagaagagaaaagatcgaggcagatttggttcggaatcgagttgaattcagagtcggactgcgcatcaactgcaattgtatcggctgaaaacagggcaggggcttgacttagccgatatggcaagtagccaatacaatattacttgggctcaatttgtgcctagattggactaactgtcattgccaattagagatagagcttgattaaggcaattgtatctattaattgggatatttaaatcggtttgtcagagatttggcaagagaccgccatgtgatcttgtttgtatctaatctttaggaaagtttgagtcgtgtccataatgtactaagtttgcactcggggtataaacatgtaaacagcctctccaaaagacatgcgtgcatgatcatcttcatcttcatcaagggaaggtaatatggaattttgaagatactactggttgatggcattaactgcatagatattcagccgtagctggatgaaccaccaagggcccccatgtttgacagataagcccattaacaatctagtcgatgtctggctcaaagtttaatagactgctcctagaagatattttcccaagggaatcggtttcttctcatgaatggcttgggctagatgctgaaggatggctgtgggaccacaagttgtgccgcagaatacaaatctctctaaccacaggttgagaaaggcgatgtgttcttgatctgtcactgggccagtacccatgttattggttgcatatcctaaccagccaccaccaaccttggtctttatcttatattcactcttgattttcaacctgatggggttggctgatgaagtgatatctaaaccagttagcatcttgatgtatagaacggttggtgtcattggcccttgaccaaatatgaaggagttcagagtatcagaccagaaataggtcgcaactgataacatggactcattttttggcatatcggctagggatagtgacagacacttagctattcccatctttttccacaaggattgcttagaagctgagattctcctgtaccattccttccattcatctaatttagatggccgagacccgaagactgtgggccaatgggctagttctggctttgtttctctaaaagggatcctattggtctcaacgttaatgaagtaagttgggtttgagtcacccattggaccaaggaaatagtgtgttgggtcatgcagaacaggaatcacaatttgccctctaagatgttgaatcaagagatttgaaagggcaaaccctaagtgacggaatgaagcaattggaaaacaaaggatgataaagaatgaagaatttacctcaggaacatcggaagtggtcgccattgcattttgcgcagaaccgcttgagaacggagggattcaccgccaagagccatgtcgccagagacagaggggatccttgaagtaggagcacttgtggaggacttagccggaaaaggagattttgaagcagtgggcactacttataagcttaacagtcagaacagaaaaccctaaaatttcgtgggtttgatgagagcaaattccactgcattatataatacatcggaattggggggcatgtgttaacaacggaattttgcatcagacttggagaagaaagagaaagatcgaggtggatttggtgtggaattgagttgaattcagagtcggactgtgcatcggctggcatcgtatcggctggaaacagggcaggggcttgacttagccgatatggcaagtagtcgatacaatatgacttgggctcggtttgggcctagattggaataaccgtcatagccaattagagataaagctcaattaaggcaattgtatctattaattaggatatttaagtttgtttgttagagatttggcaggagaccgccatgtagtcttgtttgtatcttatttttaggaaagtttgagttgtgtccataagagcaggtacaatagcagactattagctagctataaatatattttaatgagataaaagatgagagagaagagcagtgggctatagatctgtagccagctgcagcacggactccaagacgcaatgtgtgtatagcatgtgggaccatatattaatagtatagcaagcaactattgtatgaattggctattacattggctatagatgaattgaagttagtagtaggctatactattaaacttgctctaatggactaagtttgtactcgtgggtataaatataaaccccaaaccattgtaataatagagacaatccaatacaacttcagcgcatcgtcaccctttttgttcttcttttcgacgagttctcttgataagaggtaatccgtttcgatggcttgtgctattggggctattatgtcggtttagatgttttagtccttttatcataaccatctgctatcatatgctcaatttagctctatcggctggttcttgttttagggttcttgccggtatcggctaaattgtcttactagattagattaactaaggcatctaccatcttgaaaaatatttaattccttgattgtttatactttaggtttctttacctactttaagatgcatcacccctactcttgtctagaatcctaaaaactaacctagaattaattataattagagatagtattggagtttaaaccaatcttacctaatatacatgcttcttcattagttttatgtatatttgccacttatatagacatatcactccatataaatatatcaaatctagatcagtatcggccgggttgccaagcttggtagttgatcgttatttgatatatttctatggattaatttgtttatataagtttgtactagagtattagctagtacattatatttatttacctatcttactctaaataccgttccatcagctattttcatgatatcgtctaaaatctattttatcaaactaagcagatcatattacagccgatgcggcatatttagggttttatattctttgatctactcagtctatagccgatttggtctaactacatcggctgagaccatcaacgatacgtcatcggcctatcggctaactcgctttcttttttgttccttgctggtagcaggatcaaaccagctggcacgcccttagcgcactcgaggcaaccttggatctgcactggagttaagcagatctcccaagctgccgtgttttccgtcaacaatttcatatagatgaatcggtaatggatgtacaccgtggaccgatggtcgaaggagtttattgatggcatgcattatttttttagtgtggccaatgcccataagcctaagggttttatatattgcccatgtaaaaaatgcaaaaactagaaggagcactctacatcgagaccgcttcgtgtccacttgttggagtcaagattcatgcctagttataattattggacctcgcacggagagttaggggttgcaatgaaagaagatgaagaagaagacaacaatattccagactgggctcaatacgatggatttgcagaaaatccaacaggcgaggtggatggagctgttgcagaaaatgatggtgcagatgatctcgatcatatgttgtgtgatgtaaagaaatactgaaagtgaaaaggacgtctagaaattggagcgtatcttagcagaccacaaaacatccttgtacccaagttacgaacatgggcataaaaggttgggaaccacactgaaatatctttttgatgttaatgttcttgtatatgtttcttaacatggattttccaatggtttgtattagtttgtaagtctttcgattaggactttattgtaaagtctttgggataataagtagttggtttgtatatgcttttcaaatatcttgcattggttttatatttcataacatatgttgtgataacgtgcattgcgcgtccacgattactattaatatcaaaagcaggacaagccgattaaggttttgttaggatcttcatttgggatttggttaaccgtgagcatgcttcctaaactattaaccgatatattttactaaaatctttagtaaaatgtttcctaaaataaatctaacaaatttatttttcaaatttatagtaattaatacttaattaatcattcgttaattgtctactccgttgtctgcaccacttactaacccagtcaaaccatacttatgaatgcaacctaagggtgtgttcttttgtgcaggttcccaacttctttccaaggatcaaacccccctcccccaccctccctagggcccaaaacccccctcccacctcggtcaaagcatcctcctgctggtcaaacccgcccaccactttgctgttctcgtcttgcaggaatcatgcagtaataggacggtcatcgtgcagtaacatgacaactttctcacagtaacaacgtcaaaaaacagtcatgatggatatagttttgttaagcgtttttttatgaacgtcatggtgcaaacggattagaaaaacaagatatgatgtgagagatattgctctctaaagattgagatttatctctttttagtccttgtctcactggaacgtcgtagtaacgcaacggccaatgtgtagtaacacgactgctttctgcagtaatgacgttgaaaagtagttatgatagttctagtttcgttaagcatttttttttacgaacgccatgatgcaaataggttagaaaaataagacatgacgtatacgttactactctctaaagatttagatttaaaatattttagctttacaaactatagtatagtaccactgttactatgcatattcttcgagtaaagtataccggcggtccataaacttgcaggagtgtgtcatctaggtctttaaactctcaaaatgcatatccaagtcccaaaacatgtcatagtgtgtcatttaggtcccaattcaccataaccccttcaggatcctacttggcgttgatgtggtatgccacatggatatgacgtggtattattttgactgacaaatggaacccatttatttttttttcctttttttctctttttcctcttcattctcctttctatgtgaactgagcaaagaaaggaaaaaaaagaagaatgagaagaaaacggaaaagaaaaagaaaaataaaagaagaaaaaaagaaaaggacacgtcacgtccatgtggtatgccacatcagcgccacgcaggatcctagaggggatgtgtcgatttaggacctagatgatacactttgacaagttctgggatctggatatgtattttgagagtttagggacttatataacacaaccctacaagattaagattaaggactgccaatacactttactccatattcttctgttactacaaaattcgccatgttgttagtgccaaacaacctataaattttgcagtaacgtatcgtgttattatccttctattgtaatgttactgccaaatcatagtaaaaaggtatgattcttgcaataacataactaaataatttgttatcataaaatttggacattcatacaaagcaagcaaacaattatttttaatcacagtgtcataggaaaaattggctaggagagattgctatgaaacatgggatcatgggttcaaatcttgtttgtcattttaattattagttttctttccaaggtgcagcaaagggagagaagagaaaaaaaacaaaaaagaaaaacgaaaaaagagggatcgggagggagagaatagaaaaaaaaaagaaaaaagaaaaaagaaaagaaaaaaagaaaaaaaaagagggatcgggagaagggatcaggaggcggcggcgacgggaagaaaaatgaaaaaagagggggatcgggaggaggggaagggatcggcgacgggaagaaaaacgaaaaaaagagggatcgggaggaggcggcgatgggattgggcgcaagaaggaggagggaggcgcgtcgcgcgggatgggaaagggaggtgggttcggttgggggagggggtgtagaaggaggaggagggaggcgcgacgcgcgggatgggaaagggaggtgggttcagttgggggagagggtgtagaatagttatatggtccgctgcgtcgccgaccggttcccgggcctcaccgatgtcttcctcgaccacggcctctacatcgccgccggcgcctccgccgctgccgcggagcggagcagggtgagtccttcgctggctggagttcgtgaatcgcgctaaatttttgcatctcttgtgttcccctgttgaattgaatgaatgatccgatgttttattggttcatcgcctaaatccgtggttaaggattttgttttctggtctccctgataaattagcattttgccagagctgcatataatttataattgagatctctggaaactattttcttgatgtggtctgtctataaattttgcaagtcactaatgcattatttttgtcacaggcacaagattgggataacgaaagccccaagtcagatgagcaacatatgcagtgttccacaccaagtgaagatacgcaagaagaaaatggcagtgacggtgtcaacccaacctcatttactgatgctgggctacttcatctcattgagggatatttaagttttaatgtcttgagggttgcaaagggcttgaaaagctgactctaaactggtttttgcacatttctgaaaaggggctaggtgggaattgcaaatcattgccggaatctgcaatcgttagtgctttcggtaatttcttgttagttgtacttgttctgttttctttcgtgcattcaatattgtttcacatgtagcatgatctgctttcatttccaaggcgggaaaatctttcaaactatgaagaaattaatgcttccttatggtgaatggtgatcatagatgcctcttttattttaactattttttcgaatgaaacttgaggatcatattgtagcaatagtgagttccgttgtggtaatggtctcctttttgaggtttatcattgttcaagccagcagttcatgttgtaaactttgcattgaggtttcatttcatgctgatatttagtgttgtattcccccgagtttcattgtttattgacaacatttcttacaaggtggttatgttcaaaaccatgggttgattactctggcagagggttgcaatcttagtgaattaaagctgtgtggtgttcaagagttgacggacgaaggactggttgaatttgtaaagatacatagtaaattattggtctctcttgatatttctttctgcaatggttgcattacagacagatccctgtatgctattggaacctactgccataacttggaagtcctatccgtggagtccaagcatgttaatgaaaacaaaggaataatctctgttgcaaaggatgccaatatttggaatccttaaagatggtatggcttggtgtcggcgacgaagctttagaagctattggttcatcttgctctgcattagaaaatctgtcacttgacaaccttaataagtgctcagacaggtaataggtccaattattaaatctactgttgcatttttacagggatggaagtatcggtgtctcatttctcttagaaatttgatatagcttatactgatactgcattgtgatgcttatagacttgaagagtagaaatgctgaaccatttgttaacaattgttttatattttttttatattgatttgaacacatgctcttttcttaatttcagtagtgagccacctgagtataagttctaaataatatggttctggtaattgacatcgatggtgtatcttaaatattctgccaccgatagtgacaagttattgaattttagcaacatttctcatatcttcagtaatcaacagtacttcctccatttttttatgtggagttggttagtttaaaattgaactggtagaaaaaaaatctaatgcagtaagcacaatgattgatggaataaatgaacagatgtgccaattgcggtctctgaatgaatggtaatttacctctgaatgaatatttcatgtgttgtttctgctattaggttgaacaacggtttcttttttatgagtattatttttcaacgtaatctggttattgatctaccaatggttcacatgtatggtgttggcttgggggtccagtctcctgcctgtgatgtgtgccaagatagactactgcagaatacagcttataaatactggactgccgacataattggacaatccgttgcttcccttaatgtaacttctggaagaagctggacctataacttatggatggcaagaagtggcagtgctcggaggaggctgccctggactcccaagtactgtgagcactacatgcccgttagatctggggtgattgttcatttctttttttttttctcaaatgccatatttcagtaacctgctatatactctttgattatttgaaaaagtgcaattgtctaactgattggtgtcatatgtatgcagtaatgcctttttacatttttgtgattggttaattattgtgttccatttgtttgcatcagtggcaatcaaaccagcactccatgttgtgtactcctacattggtttgattctgcaaaaatttgatttctaaatcatctatgtgatcctaatccatgtgaggattagaacaaaataattgattgctcctgaactgatcttcggaaatactgtaatattaggtgttatgtttgaaatgaccaaattcgtacatgttttttttttttttaagattttgtgggagtaagggtattacactatcagtagaattttccaaatttgctatggggctttcaatgaaagtagcgaaccactcccgtctgatatgagacttcctgattagggctaaatttatttattatcatgcacggaataataaatcttcctgattaggtttaaacttttgtacaaaatctataagtaacagaattgttctgattccaaacagtcctctggtttagagcatgatcagtgagttacaaaaacattatagaatacgtgagtactgacattgttttaagctcaagcacactccagatatggttgaaaactctgatcagtcatgtttgaattatatctcctctttatgcagataatttcaattgttatggtcctgttggtgtacaggttcagagtttttgttcctgagaatcatcttccattgtatgagcagcctattccaggcagctcgataaattaaattgtgtacttcatgaacaattaaaataactttattattattatttttaacaattcatatcatccatatataataataaatttgacaatatttgttactataaattctatctcattatatgcttggcaaaacatatcttattttggttatttgatttgtattactaaatatttccgtagcgttagcacgggtagattactagttatagtagtttaacttatataaattacgctacaaatttacatatctaaatttaagatcttaccaattagttgatcgcaaatgtctagatgtgcatgacaagtgaatcggaaacacatgcgatcatgtcttcgtcagtttgtccaactatcataacaactgaattaacctagcataggaccatacatcaatacacgacaaaaactaacacatcagatatattacaaattaacagataaattcacaatgttacaaaatttgtgctcatttggtgatggcgaattagcaatgatgtgccatgtattggtgttgcactcaacagaatacctgatcagacagacatcagtattcagtgaccgcgcgtcctcctcatccagtactcgagggcagctggcgcggccagcaagaagcagcggaaaccagccgcggaggcgcgcagcgcagaattgcgtcggcggctcggcgccggcgcgacacgcgccgatgcgggctgccatggattcacgcgatttcgccgtgagaagaagaggacgtgggcggcaggcggcggcaatctcgcgtttgttctgttcgcctttcacgcatcggccgatcggcgtatgtgttctgctcaccttccgtgcatgcgttctgtgacgactattgctacttcctccgtttcacaatgtaagtcattctaacatttcccacattcatattgatgttaatgaatctagacatatatatttatctagattcattaatatcaatataaatgtgagaaatgctagaatgacttacattatgaaacgaaggaagtattatttttcattgcccgctcggcgtatcaaccatttcaccatcaagatattttgaaagtgaatatagaatatgattcctatgaattatatttcaagaacatagcctacggatgtgtcatgtgtcgcaaccgtaagctatctttctaatctgctaaacggtttgtgtatttttttattaaaaaactgtggagtattaaagtttcttagaagaatcaaataaattcaatttttaagtgtgtcaaagctcatacttaattaatcacaccttacccactcgtctcgttttatgtgtaggtcgctttattccgtgtacaggtgttacacttgcacaagacgaaaatttagcagaggctgcaaaaagtttttttagataaaagtcacgagagcagatacaatagtaggctataagacagctataaatatattttaaagagataaaagaagagagagaaaagcagcgggctacagaactgtagccagctgtagcacggactccaaaatgtaatgtgtatgataggtgggaccagatattaatagtatagtaagtaactattgtataaattggctattacattggttatagatgattagaaactagtagtgggttgtattattaaacttgcactgtgtttacacccaaatttggcacctaggattaaaataggaaagattgccaaaatttgaaagtctaccggtttcctccaagtgggccggtctgaccgccgtgtgttggcggtcagaccgtcggttgagggccggtcagaccggcggtgtgtggccggtctaaccggcaggtccgagtccgactgcgtttcgtcgggtttcgaggtttctttgctcgggaaggcatgtttcgggtttcctttagtttctaccccgagttggacatggaggagggcctgtagaaggcaagaccaacccctatataagggacatggccgattcattgtaaaaaaaccaatctacaatcaatcaatcgaatcttttttcatattgcttttagttttctcttagtttgtccatctttgtcggtttgcgccgtaaaccgtccaccgctgctgcgagagtgcgacatttctttgtaggtttgtcctgaaaaccttccgttttgcccacgagacgggtagttatcttaaatcggctccgctagccggtttatttgtcaaaacccatctaggtttagctctttgctagatcgaggtggttggcaactctaggatcaccgcaaggcataaggtgctgcaatcgttgttgtcaacttgtcacaaaaagttgccaacacgattttggcgactccgctggggaggtccgttcagcgtcaactcaacttcgacttcgccatgacgaagccgccatccaagacggaggtggagccatctaatgtgatacctatcacattggatgatttcgaaggggaagaccgcaagtccatggaggagtacatcaaggagatcacacaggaggcgctgatgagagcatgcactaggactcgtcaaggcgtgatcatcaagcccaggccacgtcctaagctcgcttctgatttggtaagcaatgaagaggtaacacaatctatccaacagcaagtagcatctacaatagattcatctatgactgtttttaaagataagttggatgcaacttttgagggtaaatttgatgagtttttaagatttaaattcggccctcttatggccgattacatgtcaaaagataaagcctctaccactgctaaccaagctcctatagatcaagggtttgttggaaccatgccaccctaattttgcaaaatttaagatatgccacccgtatctcaatgacatgtacgacccacatgagtcaatgacatgtgggtcagggtggcatatcacaaattttgcaaaatttgtgtggcatggttcaaattttcccatagattagatgggttcgagtagcgggaccaatggagcggcgcatgcggccggtccgaccgggcctgatggctggtcagaccgcgacttcgccttcggtccaaccggccaagcggccggtccgaccgggtattatcccggcggtcagaccgggactcaggccggtctgaccgcgcctctggatgtcggtcagaccgggccctggaccggtcagaccggcgcaattataccgatacaggggatagatccaatgactaatgctagttatttgtatcatcttagaacatttgatgctcctgtatctactgctgcaaatagtccccaagttcccccacatgttcctaatgcttataatgatgttgctagggggtatcctcccgatactaggcagggccaatataatcatattgcgccacaaacacaacctattaggccaccaaatccactgccaaatcaacataggcctgataatatgaaggaaataattagtgagattattagggataaattcgggattgaaactaggaatcgtgccagggtttacaaaaagctgtatcctgactattatgataatgtgccgtttccccgtaattatagagttcccgaatttaccaagtttagtggtgaagatggtagtaccacatgggagcatgtaggtcaatttttagcgcaatgtggtgaggctaatagtgatacttttaaattacgcttgttttctttatctttatccggtaccgcttttacatggtttacttttttaccggcaaattctattcatacttgggctcaattagaggtgagatttcatgattatttttatactggagaaactaagcttaggttatgtgatttaacatcggttaagcaaaaatataatgagcctgtcattgattatattaagagatttagggatgttagaaaccgatgttatagcttgaatataactgatagagatttggctggtcttgcttttaatgatttaattgctccacttagagaaagactagatggccagcaatttcttgatgttagtcaacttatgcaaagggctctggctaaagaaagccgggttaaggataataaaaaaattgttagaccatatgagaaaaagcctaatgttaatgtggttaattaccctgaggctagtgatagtgaagatgagggtgatcatgatatgtatgttgctgaatggtcatggactaacaaaaacaagccttttgtttgttctaatctaatgccgtctcctcataaagatcggcaaagtgaggttaaatatagttttgatgtggccaagtgtgataaaatctttgattatcttttacaagaaaaacaaattagattacctaaaggccatgtcataccatctcaagaagaattgaaacgtcgagcttattgtaaatggcatgattctcattctcattctactaatgattgcaatgtgtttcgacgacaggttcaatcggccatagatgaaggacgattgaagttcactgatggctccaagatgaagcttgatcatgatccttttccggtgaatacaattaatttcaatgataagaaggtgttgattcggccggagcaagccaaatctactaagagaaaaggagtggtcattggcgaaccaagacctaagatgatagtgccaaagaagccggaggttggcgtttggaaggagaataagagtgaagtttcaacttctaaagcccctaggaagaccaaagtgacttttgatatgcttttagagaagtatgagcagcaaggtggtgagagggctcccaacaaaggaaaaagaccaagatcacctcctagggagcgatttggtcattcaccgagacggtcgcattcacctccatatcatcatccacaagacatgtcatggggttcttattcaatgccgccgtcgggttatccttatc

SEQ ID NO: 9238 - DNA, 89412 bp, Oryza sativa
tgttgtgctaaaggttatttaagaaagagtgataaatgcaataggtatatgtgtttagcgtttatttttcaacctatgtgcttgttaagatgttgcattataaattgtatgaaatcatgaatttttattgttgattcaagcttaattgtaaaatctttgattcatggttatactttaatgcatgcttattatattatagatgggttcatcttctttttattgcaacacatgacatgatatgctatatgtatgttaagcttttatacattaatgaaataattcctatgctttatgaaatcattgtcaaaagggggagaaataatgtgaaaatttttagatcttttggagttgtcaaaagggggagaaataatgtgaaaatttttggatcttttggagaagagttaagttttagaagagaagagtttttaagaagagcatgtttttggttcaattgggaatttctttcttttaaaaaggggagaaggtttcttgtttttggttcaattgggaatttctttcttttaaaaagggggagtagttttcttttggatttttgagcacgatgtgtacgtttgtacgaagtgtgctttttaccgcttttgtttttaatgttccaaactccaaaacatttttaatgggtttgccaatgtgttcatcaagggggaaattgtaagatcaacgtgtgttttgatttttattctgtgatgaacaattggcatctgtgattattggttttgatactggagtttattcacgaagtggttttggagatgattggagttcacaggtgaatctacaggaaatcgctgttatttcatgtgaccggtcagaccgggaaggtgttgccggtcagaccggcggagatcgagcggtcggaccggccggcccgcggtctgaccggccgacgctgtgtcggtttcggtttcgggttgtttctttggatatctgtgattgtttcatggttatggcttctagatagatactatacgtatgtaatactgtttatttgctaacaatgagtcaagttggagatagcttggtctcggaatatggtttctttgtttgtttcatgtgtaggtgactcgatgcctcgggagagtatttacggtgatggaccgggagtcggcttggtggtaagacgatgtccgtggtggtcagatatcatgcgggatactaaggctagagttgatgcacgtggttggtgaagattccatatgacatacgatggaggtattgagtgcgtatgggatgcggagttaaatttggaaggagtctaaatttggtacgattggttatataaagtttctttcttgtactagagggttttctaaggtgtttaggactcttagtatgagtttggttcgtggctttaggctgcctacctcatgtataaatagagggggagcgtgaggcttcccggtatcgcttttgtatagcttttgagagctagtttagttagggtttcgagtttagtcaagatttttgtaaggagtgctgttggtgcactttgtaaacacagagagaagcaataaagttgtcatctactttgattgttcttcgatttgtgtttcacagggttttggcggtctaaccggcgatatactggcggtcagaccggcggcgctagggcggtcagaccggcggcgcaggcaggcagcggcaggtgatctcggcggttcgactggagttcgatctcggtcagaccggcgtgttccaggcgcttagaccggtacaactacttcggtcataccgcgatccatcgatttcgagggtaacttttatttccgctaaaagtttttggtttttgggtataccaaccattcacccccctttggttggcttagttcttgttattcgatcatacacgggtcgccccatgccacccaatggtaacgtccgcccctgataagagctgagccgaacctatagccaacgagcagagacggccatcccttgagctgtggttgtggtggagcgaggcggccggggccaatcctatttgatacctcgggctgccttcccctcttctttttcttgtttatccctgaacaagatgcaaatgaagcaacacattcaagctatttctttggcattcttttcgagttctgtaacattaatggatattgtaagcaagaagattttatgttgagaatggaaggtattggaaaagaagctattgagaataggctagttgaaagtgatcaggatagcgagccataagttactacaacacagagtatcacgtcgtggcctgagttgacgtcttaagagagtggttgacccaacgagacatactatcgccgtccgaaaatactcatcgtattaagtttttattgcaatgtttgaccattcgactcattcaaaagattatgaaattattatttatttttttttcacttgctttattatcaaaagtattttaagcatgacttatctttttttatatttgcactaattttttaaattagacgaatggttaaacattataagcaacaagttaaaacgacatctaatttaggagggatggatgtagtaaattcaagcaagtagaatcctgaacatgcatgggcatgagtggatgacatggagactgagaagtgtccaatttcctgagttcaaggacaactatgtagacagggataccctactagttgtttgctaaggctgtgtttagatctggggggtgtaaagttttgatgcatcacatcggatatatggacacacatttgaagtattaaatatagtctataacaacacaaattacagaatccgtctgtaaaccatgagatgaatttattaataagcctaaaaatctatcattagcaaatatttactgtagcatcacgttgtcaaatcattgcacaattaggcttaaaagattcatctcacaatttaaacgtaatctgtgcagtcagttattttttcgtctatatttaatactccatacatgtgtcgaaatattcgatgtgacagggcgtaaaattttacaggggatctgaacagggccttaaacaattgttttttagataagtatattttttacacggcctctttatcgaaccggatatttgcagccatttaagttaggaacttagtctctcaaacaacctaatttgaaattcgctcatatggagatttaaacttatgaccttgaggtgctatacaaatcactgaaatcactaggctacatggggtgcttaaacaattgttgctcatgatatcttactttgtgaattttgatgactacaagcagcttgtgcaagaattggattgatttggttacaccacacattactcgaccagccaaaggtcaatccagccgaagctgcgcatgctttaatatcaattcaactagtcaaattcaacgcacaaaaaaactgaatggataaaggtggaacgaccaaagttgaaagaaagcttcattaaagagtatttgcaggtttatgttacaaattgtatgagttgagctgtacacatccataagtttcagtgagtgaaattgatttttttataaaaactaacaagtagtactacttaaaaagaaaacattattcatcgaggcatgaaaaacaatgccatcgatctcatgtttattttttctttccatgtcttatgctaaggctgagttagaggagaggaaaagagggaattgagaagatacgtaaaacgagatatgcaattagcgtatgattaattgagtattaactactttaaattttaaaacagattaatatgatttttttaagtagttcaggaaacatacatgcggaaaacaaggtgttttctctctcaaatctcccagtaacgaaagcagccgtgtagttatcgacatctgtaggccatctaccctatatgttggatacgtccaaccaagtcttccgtgaaagattatgtcatctttgatgacactgaagctcagtcttccggtagcttttcttttttttttcctcttctgtgcaggggggttcagggcctaacaattcgtgtgtgttttggctctgtatattctccatgaatatagaggctggatttgatggcgatataaatatagcaaatctgttgattttttctcattaaatcatgagatgcaaggtagcgggctgctacagattgtcgtctcgacagtgacataatattgattatcagatggatgcgtggtatgagaggcgatgggatggtcgtaccaagcattgcagctcaataagaggtggaggtaacacggggttgttctccggatatctattcgtagcagcacaagtcaacacgaattactagatttgtctaactcttctcccccagagactttggtactcatgtcttgttgcagccgcggcttgagagccatctctaccatcaagcgtctaagcttgatccgagtaatatcatcggtatataggagtaccttccatgacaccaccgattcccatacataaatttaaaatctgtaccatacaaactagtgggagaagagtggttatgtactccagtcaaccaacaagtgtatgctatatatcgttatttgtccttatatagactgaagagggtgggacaggaaaaccacccaaaacatgtttaactgaaagtatagaggacaataatgcatggtgtctgagacttattggcttcagtcggattagagagagttctttattttgtcatgtcaaggaataactaaaacagagtacaatggattggtggaatataaatgtagttctatttcctttcatattggtttttactcccaagtagtttcccctctctactccaaatcttcgagtcatccacagacacaaagtcacaaacaatgtgcaataaccagtccttgatcaaatcctctgatttatgccttcctaaatcttaagcagattaccttgtgcatgtaagtcccgaaattagatgatttttcaagcacattcttatcaataatttcgtaaaaggtgttgatgactcatttgaccttgtttcgtatgctaagtatcaatctgaccctactttttttaatttacttatttgactccactttttgaaattaaagatgaaagctgaccttattccgttaaaacgagttaacattgttaaccaaggggcaagtagtccttttgcccttgcttatttaaccatattatataaaaacatccatatattccaaccttttgacataattgtaacgaatttgacatatctttcacatttgacacaagtttgatagatttggcttcaatttgataaatttgaatcatattgaaaaatttggcggagtgcaccaattttgacacaagtttggtacactgattttgctcttgtggtggtgagaaagcatagccaacaaattagaagaggaagccgagaacaacaccaccataatcttctccccacgctcgtcctactcgtccctccgtgccaccgccgctctctccctctgtgtgcctgcggagccgctgcctccatccatccacccgcctgcgctagcaccaccgccccctcctccctcagcatgtcggagccaacgccaccccctccctctacgcaccggcgctggctctaccgttcatgccgagagagacgagagagcgataagggtcaggcagggtggtacgagatggataagattgaaggagggtattttggttagtttgaataataaatagatttattttctttttcctaaatgaaaccctatcagtatattgcaaatatagtcaaacggtaggttcaattgtgaaaagcagggttaaatcagcaacctagaaaaaaataagatccgattggtagttagccttcgaaatagggtcaaataagtaattattcgtttcctaaaagtgatgaactactcgtagtagaatatttcttctactggtaatataactcacaaatgaacggttaccatagtagtgataatatgggtagaacgataactaccggcagatacccatgtaaaagtactccaattggaattatttgtagcaaatattacgaccatttttctgtagcactaaatattgaactagtctgaaaatggttgtgactttttaattaatttccaaacaatcctaccacaattggactccattgaagctacaattaagttttttgttcttcacatttccgaaagaatgatcaggttatctgatttgaccattaattccctatggagatatacattccaatatcaatatgcttttgttctagagtttgacaatcactacacaatgggggtcttggttctattaacatatatactcctacatctatgtgccagttacataccttgtgatgtataataagcccattaattgatgcaaaatgcatgcaattcggccgtggtaagagaagtcgtattatttctacagaaaagcaagcagagggcaggagtgattctttattaagacgactgaatttttccttctgccacgtggtaatgcaattcatttcattttattgtatttgttaacattattggtgacttcaataatatcgatctccagtatgtattaattaagaccaataatatatatatagtaagtggagttcaattctaaaaactctgaaaaaacaataacaaaataagtatgtgctcttgtgtacctctcgttgctcaatacaatgaaataattatataaaactatggaaaataatgacaaaagttgggctgtgtttagatccaaaatttggatccaaacttcagtcattttccatcacatcaacctgtcatacacacacaatttttcagtcacatcatctctaattttaaccaaaatccaaactttacactgaactaaacacagcctcgaagagagaaggttacgatggttgcagtgaatctccaattccactacctacctaatggtaaattttgcaggttagcccttcaattttatcatattaaaaaacagtgaaatctaaatgaaggtgataatataccctatagaaaaatatggataacacatttaatgaaaatttggtactaccaacactttggtagatatttctattgatttaggaagttctggaatcaatccaaacaacacataagtagtatttagactaccaacaatttggtagtgtaagatttggcactaaattaaaagagcccataatgtattttaattctgagatctatggattgaattgagaaatgcatgtccgtagaggggaatgacattataatccatgctactactttttttctctagatttacaaagtgaacttcccatattgtttcctcatttagtgtacagagtaacaagatttactaaaactgtttgtgttccatacaatttgatctactgttcagaataagaaccaacaacatacccatgtaaaaaaaagagtcataacacaatataaatatttcaatagaaaacataagtaatcgaatttgatacatcattagcaggacataaatatgttattagttttgctgaacgtgcctatgcaaccagcttgccagctactagctagttgagcatacagtatactcccatgcctgatgatcaccgtgatactctttagtgcagcaattcgcatagtctcacctcagcatacatgcccagataacgccattaatatatatagatctgtcaaacttgctgctaacccaagtaattggcagcaaaagcattagtcccggttacccttaaccatcatcgcttcaaccttttgcttgagggaataagtgaataacaaccccactgcaaatggtgcaagcgttgtacgttcttcccatgacaccacccatttccatgtaaaactaaactcgcaagacaaacctaggtttaacaaggtcaggcatgagaagagtgtacaacgatcactgtttgtattactcagctgatcttcccctttgaactgtgcgtgtcaaatctctctctctatatatgtaacaatgacaaaacatatagatacattgtgttataaatagttacagagacttaatagcagagtgaaaagctaatagcagggtgataagcaagctggctgtcagtggggacagctatgtgtatctattgttcaagacaattaaggggatgtttaaatcagggtctaaagttttagcgtgtcacatcgggtattatatagggtgtcatatggggtgtttggatactaataaaaaacttaattacagaatccgttagtaaaccgcgagacgaattattaagtctaattaatccgtcattagcaaatgtttactgtagcaccatattgtcaaatcatagagcaattaggcttaaaagattcgtctcgcaaattagttgtaatctgtgtaattagttattgtgttagcctatatttaatactttatgcatgtgtttaaacgttcgatatgacatggtgaaaaatttttgggtgggatcttaacagggcgcgcgtaagttagattggttcatgattggctgtaacttttaggacgctataatcttgttcgtattggtttattacaccagattaaatcactctgctcgtatcaaccactgaagtagaacttcgtactgtgctatctgttctcatatcactactgatctttgctgggtggtgcaaatagtcccggttcgaatagaaaaatagactaaacatcatttttagctctggttaaaaagccaacgaaactttttgatctttagtcttagttggtgttaacaaccggaactaaacatcatttttagtctcggtttgaaaatttgtcaggccgtgtcaggtcccattatttttagtcctggttagtcaacactttagtcccagttgtttataccaaccgagaagaaagattgaaaagaaaactaaagatcaatactttagtcccggttgtttgtaccaaatgggacaaaagattgaaaagaaaactgacagccgcacgccaccccctccctcgtccttatctccttgcacgcacaagcgaaactccctccctctctctcgctcccgccctccccctccctccttatctcctctccctgtgtgctccctccacctccctcgcaggtgactccctcgatccgccccctccacctctccctcaatcccccctcctcctctccctctcacctcccccgccccctcttcctctccctccaatccctccgcctcccttgctgacggcgctcgccccctcctgtccgactcacctccctcttgcggtggatttggcggcggtgacagcgtctccggtggcggtcgcaggtggatccggctggatccgggccacggcaggtactagcagccacatcaagcagatggtggctcgcggtggggagaagaagaagaagaagaagaagaagaggaggagtggcggagagcgtggagaggatgaggcaaagggggcggccggctgtagtggtggcggagcagatgctgctgctcatggatttgtgattgtattcatgaggcgattgtgttcacgaggcaattgtgttcatggattttgattttttttttcatgattgcgttcatgagatctcatgggtgatgtttatgattaatatgttcttggattggatgaattgatgatggtatgtgaatctgtgatctgtaatgtatttgttttttgagaatttgtgatgtgaatccatgattttatatgtgaatattttatttggggaaatcaatatgcaagccagcaaaaaaaacaaaaaaaaaaccctttagtcccggttgataatactaaccggaattaaatatggtagcgtcagtcacgtggcgctaccatctttagtcccagattcggggtctcagaatttctccagtagtgtgtcgatatcaaccgaatcaaatttttattagttggaaatgtgaagaagctggtaaatctcgtatatattaaatcacattaatgtgggtagcgtctaagcgatgtcaatattaacaacaaaaatagtacggaagacaggtactgcctttgtttcctgaattggccattccaaatttggacctgtacactatgatttgtatttttttcttatggaacaaacaaatatattcaaataccgattctagaaaagatcattatgaaatctaattccaaggcacaagtctgaagattgatggcatcgttcaatggtaaacttatattctcattttgttattcccaggcacaaatcccagagaataatacctttgagaaaacatgtatatgtactaaatccagccaacaaaatggaaatggacgctctggggtgaaccagtgaagcctgtgcttatcttgtccttgatggcacccatttctattaaatagccccacattggttgtggaagggtaaggaatattatatgtaagtgggagacctcttcacctaattggttagcttttgagatgtgaaaggccctttacgcgcaattcgtactattctataattgctacacagtgcttgcacaggaagcacgttagacactaatagaaaaaatgtttttgcacagtcaaaaatagtttttccaggcgggtgtaaggaccgccggcctgcttgcgaaaataatttttgcaggcgacatctccattttcacagctggtagattcactcgcctgtgaaaaaatcacagcgaataaaaaaaaagggtgccgccgccggcctcccctccggtcgacggctctccaccttcatccgctggccactgccacagccgctggtatcatcatcgcgcatcgccgcctctgctccgtccgccggcttccccgcaggcgtcgtcatcatcgtgtcggcgccgtcgtcgcgcgtcgccgcctctcctcctccatccgctggcttcccacaggtggagctgtcgtcgtcacgcatcgccgggagagggaggagtcgagccgccgcctctcctcctcgttggcacaaagaaaagcataagaaattgttcttttatccatgaatcatgtgatccatgccgacaaggctgccacatatctctactattataaaaattgaagatgtttttaccgattactttgatacgttatccatgtatgaatcgatttttaagtttgttcgctttcggatatacaaaaggagttgtacaagaaatccctttaaaaaaactcgcatgctaacttgacactatcggacttctaattgaagttcatgattttctaaaaaatatatatatccaagtgaattcccacaatgaatttcaccttagctaaatcgtataataacaataataagattaaaataacattcacccattgcaacacacggttatttttatagtttgtaaaaaataaaataaatccagtactgttcaacacggacagacaggtgtctcggcagtggttaattgcttctagcaatctagcttgatgatcaaatgaatgtttgctactccatcaagaaatcaatgcagttgtagtgcagcgatagcgcgtggaggcggctactaagtgagatcacagaggcagcacaaggtgattttccagatttaattaggaaataacaccggtataccacccagtagaggtttcaagcatccctgctcacttagtgcaatatccccatgatattctttccatgacaccacccaatcccaacttagggtgtatgcttccattaagggatgtgcgtggaattggactgtgataagagaagtcgtattccaagagaaagcacgcatggggtgttgaattgtggcagagggcaggagtgtttctttattatgactgaattttctcttctcctatggtgtaatgcaattcattccactttattgcgccttcgaatacaactatatacctccagtgtgtattaattaatgttaacattggtatgtggagttccgtccttacaactcaagcatatgtgctctcatacctcaaaatataattaaatagaaaatattgtcaaccaattaataggttgtagaatcgaatacaataaccaaacgtacaagagggggtgaatagtagcaacacgaaaaacaaaaactttttacagagctaaaaatttaccctccaacctaatgaagcccttggcgtagctggtctgactgtcgtgtacacaccagcctgaccgcaacttcaccgcctgcccgaccggtgtctggatggttgaaccactgcctccctgtactgccttctagctgtcgctggttagaccgcccaatgaactccggtcaaaccgttgggatccctaaaaacgcgtatcgacaaaactcttgaaagtacatcaactttattttatcaatatgtatttacaaagtgcacctaaagtactccactcaagtggttgtcacatgatctaggatgggatgctcccacctggcaatggtacacctattatacggtcaagcaagacagcaaatgcacagtgtagaacagtgcagtacgcatagacgcaagtagcgacgtacgtgggtgtcgcgataagtactacggccaaatggagcaaatactggagctataactagcatatccacagtgtgggtctagaaatacctctacaagaggagtaggaagaagatgcggtctaacatgcatgtgtcgaccatgaggaaggactatttttgaaacataggcccaatttgatcatatgcctaattttgtgtagtatatgtgttatcttggaaatggactggagagctataatattttgagataagtttgaaaatttttgaaatacttaagagaaatgaaatattgcctttgaaataaataaaaaaatattatattactggttacaataaataaataaataaataaatagttaaaaaaaatgttagagcaattatgttgaaataggtaaacaaaaatcaaaataacttgaaaataagactggtcaaagttacctgtgacgggtgagagtaatggcgccgtcacaggtgacctcacctgtgacatgccctactttccggctgatcacatatgacaatacctatgacaggccggtgagcagggcccatcataggtgatgtcacttgtgatggcgccaacactcccgtccgtcacaggtgactttgaccgggataagtagggttggaccgtttcccatccctctcagatccagatctctcactcactcactcactcaacactcgtcaatagccacctactccatgccaagcacctcccttgctttctcgacgtcaaccgttgtcctcccgccatcatcaaattccaccgagcagcacctccctgccctcgacctctccatatccatgacaccgggctccacctccccgcccttgactgccggcttccattgacagcctccaccgcactgtcttcctacaccgccaagtgatgcctccctgacgtcgatcatcaaccgcctccggcctcccactctcctcgaagaccacctgcctccacctcctctgcctccacaacagccgccgccttcacgctgccctcgacaccggctgccttcacgcccacctggaagacagccaaccactgcctcctctgtttccacaacggctgccgcctcccccacaccagtcgccacctcctcagctcccccacccctcgcatgtttctctttcttttaaatttagattgttcccattttttgtgatttaggttgtctataaataatttgcattgtttagaatgattttgagtcacaaatgtttagaaatagtttgatttaggttgtttagaagttttatgacttaggttgtttagaaagtttgtgacttaagttgtttattataaattatttaggttgtttagaattattttgatttaggaagtttagaaatattttgatttaggttgtttagagatttgtagacgtaggttgtttagaaatgacttaggttcaattgtcattaaactttgaacaacttaccatcaaaattgattactacgtcttacatgtacttattatttactacattgtattgttcaattgttttctaacttttttgaaatggttggttgtcgttatttttcaaaaggcaaaggctataagtaacttgggtaagtttgcggcaagaaattgggcaagtttgtgtcttcacaggttcaaaagaaatgtgaggtgggaatatgtgactgtctatgtaatttatgtaaaaatttggaatgcatgtgtgcatgatgttaattttgggatgcatctgtgctaaaatggagaatatgtgatattgggtatggctaggatatatgtgatgtttcttttttcagagagtgtggctagcaaatcatgagtctagtcaatatttagaaattgttgtttttcgaaaatacctcataactgaagggtcgtaaacaaagaccgtcacatgtgagctcatctgtgacggccttgttacttcaatccatcaaaggtgagtcatccgacaggtacaaactttgcacccgtcttaggtatctcactgtgacgggttgcaaccaaacatgggcatgtggagacgctcacctgtgacgggaaattaaaatactggcccgtcaaaagtgactagagtcaccagtgacccctaatccttgaccgggggaaatccatcgaaggtgagggttagtgtccatctgagatgacctgatacggcatagtgatgtggaaatatgctttttttatttattttatttagattagggatatgccactgacctccgtcattaatatatgttcagagcatgttaataccagagcttgctgatggagttcagtacaaattacctgctcttactgacttaggctccgttcaaccgggaatagtacgcacagaaaacagagcgatctattagcacgtgattaattaagtattagcttttttttttcaaaaatggatcaatttgaattttttaagcaacttttgtatagaaactttttacaaaaaatgcgccgtttaacagtttgaaaaatatgtacgtggaaaacgagggagagggattgggaaaagggtgtaccgaacacaaccttagtgtgtaatctttgtattgtgcttgcaacttccctgcacacatactgtagtgccttgccaagttgcttcggcaccccttgttcccaactcgtctccttgttttccgcttgcacacttttcaaactgctaaacggtatgtttttgcaaaaagtttctatacgaaagttgcttaaagaatcaaaataatttatttttgaaaaataaattagctaatacttaattaatcatgaactaatggatcgctccgtttttgcgtgcggagggaatgagttcccatcaagaacatgcgaacacagccttagtatggcacttctatgcaaaacatcctcatacacaatatttggctgtatttctaccctcaatccctaaacgaagtatgatccatgtacacatccaaattaatttggctcaaatataaacataagtaattgttcttccatccatgaattatgtgatccatggcgacaaggctgccacatattcgtaaaaggatctactgttcaacacgatgtcttggcagtggtagcttgatgatcagatgaacgcatactacgatacggaagacaacataatggtgatgcagcgagtgcgtgtgcacgcgggtactaagtgagatcaaggaggcagaacaaggtgattttccagaactcatcagggagcaacaccggtatactgcgcagtagaggttccagccgaagtttgacacccatctctacttgaacgaggcaagtataaaatcatccttgctcagttagtacaatatctccaccatattctttccatgaaaccacccaatcccaagctgcaaagagatcgatgcaccacaaaaataagggagaatagagtggctgcatattctatttcacagcaaagcatatatatgccaacgatatttgttcttatataggcaggatgaggaaactacaccaaacgttcatatccctattaccttggtagcttgcaatgagaaaactcggagtgttaggcatgcttgtttcagcttataattaagattatcataatctagattattgtgccaaattactgtaagctagattataataaactagactagaataagatgcgagctaaaatatgtaatgccctcaattgtaagattactgtatcaacaaattttgtaggacaacacaccaggttctaaataagaggtgtgcatccaccatatgatggttcatcgttcacaacaaatcatccacgtacgaataaatcgtccacataggttttaggtacctacatttacccctttataaattgaagggtgatgcacttggcagtatagttcaaaactggaaggtgtccacaaccacctgttgttacatgaacttactgcatgaccaggggatgcacatgctttgcgcagtatcaaattaatgtcacagggtcaatgatggctgaattattgctatcaaacaccgttgctaaaagcacagttgaatgagacttcaaattcagattttggatattgaacatacattttgattctggtgccaacaaaaatattaactcatccatacattgcatgcaaagctccatccaaaaatcagatgtatcaaattcagacccgttccctttcccttcgaacaccttttcctaacataaatccttaaaaactatgatatggcaatgttcaattggtccaagcttttctccgcccgaaaccactccttatttatttttttgtttttggaaaaataatcccaaggtctctctactagtcatcgagttacaaaatcgtccccatcagcaaaatcagatatatgacatccctcaacttacaaaaccgttcattttagatccttcggtggttttgaacccagttttatccgacatggcggctgagtcagcatggccccacatgtcagcatgccacatcatcaccctctctctttgccctcctttcccttcctcctcctctttctctctctctcacttctctgcgcaggctggtcgacaggtggggaggaagccggcgtggtgaggccggagaggaggaggaagtcagcggccgacgacgggcgatgcggcggcgatggtggcggcaatgttggacaagggacaggcgcagcttctccagcgcatgcgaggcgcaggacgagcggcccacggttgtcacagcaaggaggggaacccggtgccgtgggtgcacaacggcatggtggaagacggcggctcgtccagcggcgcggccatccggtgctgctccttttttttttctttttcttcttcctctcctattctttttttgttctttccctccaacggagttgccagatcagcgcttgcagccggtgcggcgaccctggcgcggggtggagtggctgtgcaacgtacggcattttccgacggaggagggcggcatcagcatggccatgcaagtctagggtggcggttacggcatgggctacccggcagcgaccgtgtgcaatggcagcgcagcgcggcgcctgagatggcgtggcgtgctgcttgtcggcggccaggacagcctgcgggctgctcttcctttttctcgtttctttgatttgctctttctatttcatcttcctgatggccaccgacctcctccccacccgctggccagcctgcgcaaagaagtgagagggagaggaggaagggaaaggaagaggaagggagagggtgatgacatggcatcctggcatgtggggtatatgtgggtcctaagctaactcagtcaccacatcggataaaacggggttaaaataaccgaagaacctaaagtgaaaagttttataagtagaaggatatcatatatatgcttctgcagtttgggaacgattttttaaatcgatgacaagttaagataccttgggtgtactttttcctttttttttcctctcttaggctacgttcgttttcagtggttaccaactccccctctcgttctccatgtgcatgtttttcaaacggctaaacggtacgtcttttgtaaaaagtttctatacgaaagtttcttaaaaatcatattaatccatgtttataaaaaaatagctaatggaccactctgtttttcatatgggagggattagttcccatcctcctgaaacgaacacgccggaccagcctttctctctctcggcccatttcaacttttcacccttcactactgtgcagccaagttcagcacctccaattgtttcttgtcgatctctgtcagcttttgtcccaaatgtaacgggtggcgcacgagttaactgcgttggtttgtaagctctagatcggttctactccctccgtactataaaataccaacttactatcaaatgcaaaatattttagtattacgaatttagacatatatctttcaggtttagattaatagtaatagaatatgtcacacgtaatcctagattcattttttaatggaagagagtagttggaacagcacgccgcctgctgtgaaatagttggtgtccagtgatattgctggttccttaaattaaaaaaaaaagattccccagaaaaatatgatcagccacctccctgatctcctcctccgaaccacaccgttccagcacagccgggccgatcaccatggcgccccggccgccgaggcttgccatgctgcacacgaccgcatgctacgctcgcagctgcaactacctagctaccacgatccacagtggtgaaagctaacacaggtagagaaaccatctttggtcagtcgatcaaattccacaatagtcccggttccattaaaaaccgggatctggttaaaaaaaatttaatctttacacaccaaccgggactaaagatgatttttagtcccggttcatcccctgtcagaggcatgtgagggagccgagaatctttagtcccggttgatactaccaacgggactaaagattaccattttagtttcggtttattaccaactgggactaaaattcaacatagtatataatccctagtccttatcctctactccacaatcacaaccactttctcacacacacagatcgatcatcctctcttctccccctccttccctctcctatcttacacagatcctccccttcctccttccttcccccttcccttcctcctccctcccctggagacggatgaggccgctcctccttccttcccagccccttcccttcctcctccctccctggagacggatgaggccgcgccgcgcggacgcggtggacggacggacacgcggcgtgcggcgcagacgtgcgttgcagggtgagcacatgcgcgcaaacgtcctccctcccctaaagttacttgttgtctctttttttttatattttttgattcactaagatgtaattttgtgattcattgtatggatttgagatgtataatctgtgatgtatttgatttgtgtgtaaattttttaggatttgcgatattttagatttgtgtgtataagtaactttaagatttgtgatgcagatttgggatgttactttatttggggatttggggtttgatttgggatgtgcatgccatccgattcgggagaaaataaaaaagtaacaaaaaaaagaaaagggtaccaacaccaaccgggactaaagatagatctttactcccgattatttcacccgggactaaagataacgatgtttagtcccgaattcatagtctcggttaaaaacccgggactatagggaattacaaaccgggagtaaagacagtttctctaccagtgtaatcacaagccacacacacatgcatctatccgaagactaatgacatctaccaatgctaagcgaaggcgctgggacctttcgtcactggcacaaatcgcagagaaccatactgttcacatgcaatgtccagccaacatgatcaaagtggtcaaaatcaacaatctcgtacttgccctttccgtgatgacacccattcctcagcgaagaacacacgatgctgtcacatcaagtactgttttgattactgctaattaagtatgcaaattaacggggagacaggatgaagaaagctagagggagaggcaaagtaatctactgcaagtagaatacaagaacggatcggaggctcgggaatcaatatggagtatatatgatgtgagttcgtgcatatagggccttgaattctaccaaaggacaactgcgctaggatcagctgaatttcatttggttcgcattcatggctgaattctttgataactactggattttccactcatggtggggatttctcaccggcccgttattacatggcaaagattatttttcgttcattgttttgcttctcttttctttgtcttcaaatgagcgcctttggtaagatcttaaaccactgtgtagtgaaagcaagatcatcatgtacgtacgactacgattagaacacttggatcaccatgggaagaaaactcatttgcggtcatcaaaacaatttgtgaaattccggcgtttagttaatcaattgaaccaccaaaaccacatcgacactagaggtttctggtttgggaaggagctatctcgggatcgccggatagtccggccactgtggattgggagagagctaatgatcccctgcgttgtcctcattttgatgcggaagagaagaactacggtagcacattggcatactagagttaacaggggagatcgagatgagattggggaattttttttaccgttttgaactagtttgacaaaaaatatttgaccagagcaactgaatatcgggacataccagtgaatccaatatttcaaaaattttcttttgaaatattttattatgggttgacgacaagtcgttaggtccgatgaaaaatattagctatctatccactactatctagcggtgaaagtggttacagtgaccttagtagcaacctaagtttttgagttcaaatccccataagaacgaattttaaattgggcgcgaagtcatatgagcgcatatatcctgttgggtgtaatacctattctctaaaaaaagtatctagcaataattgatatggaaattaaattagaattttatgctctgcggtatcaaaaggttcctgggctccaagaattatttttagattgtgcagttttacccctctgataaatctaaatgttatgctataccattcacaaacttaatatagagattgtgagccgttcacattaattacatggttgtaccttggaacaaactgtcttcagtatatggcgttttttggttcttgtcgtggtgccctcaaccagggtttgcaaattaatttgttttgaacttttgtgttggggttagctgaaaatttttattatttgaacaaattttagccgaatttgaataaacttttgaccaaattcataaaaaactgaaagccttgaaaatttcgggctaaatagtttcaagtgcgggggaggggataccaaaattgccaaactgccctcaaattgtaaattgcaaattgctcatagttccgatatttgaaacaaaaattgcaaatagtgcgctcaactgaagaaccaatccatgtatgtttgatgtttcactcaaatttagctggaacaacctaatcacaaattgctgattcctccacggatcaagtgatgcctggatacaggttcctaaaaacgtccaatgcttcaatcttgacttaacgatacagggtagtcaaactggaccagtcagttacaaaacattggtttcagccgcagttttgcagccatctctaacttgagtcggttatctatttatctgtattggagctcaagctgatcagtgtcatgacgatattcttttcacgacaccacccattcccaactaatgggatgcaccacacaaattaaaccaacgagaacaaaacggtcattatatgttcctatctgaaagaaactgtgtgtatgcattgatattggcccttatataagccaaggatgcctggatttttcattttagatcttttttaaaaaatattttataaatagacccctacaaaaatttattcttggaatggatccttttcgcgccaacgacattgacgccgtcaccgtggtccaacaaagacgttggtggcgttccccggcctatcctctatataaaagctaaatcacttatatgaaggggaagtgaaccatttaaaaaaaggatctatttttaataagaaatatttatatgtaggtcctcacaataaataacattggcaccgatgacctatttataaatattattttacaaataagtctttttttcaaaaaatatttacaaataggctatcggcgccaatgacattggtgcactactacaggagatgtcataggtgtcggtttctaaagttaagggattaaaagtggacttattcctatttttttcctctcttggccagaccagcttttttccctttcagcccatttaaatttttcacccttcacaactgtgccgccaagatgagcacttccaattgtttcttgtcgtgctctgtcagcttctgtcccgaatgtaacagggtggcgcacgagttaactgtgttgggttgtaaaattgttggtgtccagggatattgctggttcctttaacttaataaaaataggtttcccataaaatagaatgatcagcatcctcccttctcctccgaaccacactgtccctgcacagccgagccggccatggcgccccgcccgaggcttgctcctgcacacgaccgcactctaggatcgcagccgcaaccacctaccgcgcacacgcgccgcaccaaggtgaccaaccgttcgacggcggtgaaagctaatcacgagccacacacacaagcatccgaagagtaatgacttaattatctaccaatgcttataagcgaaaatgctggacctttggtgactggcacaaatcgcagagaatgataccgttcacgaaccgtgcaatgtccaaccaacatgatcgaaatggtcatatccatctatcccatacttgtcatttccgtgatgacacccattcctaagtgaagaacacacacgatgctgtcacggcaagtactgttttggttactgctatgtaacatcagttaggatcgacctgctcgtttctcttagcttgtgtgttgttagaatgcagaagtgtgcaaattaacggagaaacagggtgaagaaagctagagggagaggcaaggagtaatgtactcctaggatagaggctcgggagacaatatggagtatttatatatgatatatgctaccagaggagaactaggatatgctgaatttcattttgttttgcgttcatggctgaattctttgatgactgaattttccattcatggtggggatttctcaccgtccccttattacatggcaaagaatttcgttcattgtattgcttctgttttctttgtcttcaaattagcggcttcggtaacatcttaaaccagtgtgttgtgaaaacaagatgagatcatcatgtacgtacgactacgattagaacacatggatcaccataagaaaactcattttttaggtgacttgatataccaaccaggctccaattaatgtattggaaaggggggaaattatgtgggtcaccaacaattccagcgtttataatcaattgagccaccaatgcggtcagggagagaactaaattaagttacccttgcgttgtcctcatcttgatgccgaacagacgaacaatcgcacattggcatagaagagttagcagaggggttttgcagccatctctaccttgagtcggccatcttttgataagagtcggtgctcaagctgatcggtgtcgtaaagatattctcttcatgacaccacccattcccaactaatgagatgcaccacacaatccaacaagaacagaaaggtcacttattagacccacccggtcaacacattcaagatattacttccttcgttttaaattattggttattcagttttgtcctaaatcaaaggtttgtttcattaatcattaatttctaaaattaatatagtttaatatgattcagtgtttgacgtatgacagaactgggacagaggatgcagtaattattctggttgggccatgcaaaattgcaaattagctaggaccaatcgaaaggtgattccacatatgagttggtgcatagcatgctcgcgctagcacatttgacgcaaattaccaggtggaatcctatttcgtcccatattgttctttctttcccatgtgtatcctctaaatccctcgttttatccaaatattgttgaaaaggtgaaatatacccccacaaaaaaaaaagaaaaggtgaaatatgatgttctcttcaaacaacaactcatttttacctacctacctaagtagatcatgctagtttgatattggatgatatctctttcctttttctttctaacaattccagtgtagattacctcttcatgactgaagcaacaattggggtgatttggagcaaatcttatgttggttttccattagaacgaaagtgtatcacaattggcataacactgccaaaaaaaaataagaaaggttaccagttttgccatccccatggaccgtattccggtccaacatctagtcaagagttttacgtatacactctagtcaattgaacaagacaatcactagaatccaatggagaaaatccccgtgtacccctaaaaattttcccaatctttttatatttctgaattttgcttattcccttttaaaccgcaaattttagtttggatatcttcctaacctttctattagttgaccattattaaactcttatgaagaagtctaatttacccctatggtatggaaaataaataaatttatagagtatagaaatttgttgtatgagactttattgagtttgtaaaatgcgaggtagtatttatgaaaaaaaatatttttaaatatgaaataaaaattaatatttatcttctaattattaaaaattttgttcgtagcttatttattggttagtagaacaacatgttttctatatatagatatacgctacacaaatgatttttcataactaaataactaatattaatttttatgtcatatatacaaataaattttatgataaataatacctcgcataataaactcacagatataatagtctcaaataatacatttctatcttccaatactatacttcataattttatatgtttcttcgtaccaaagggcaaaatagactttttttttataggaatacaacagtcgacccacgattagctaacgaaaagtgtatgaaaaggatccaaactaaaattcatagatatacaagagaatgagcaaaattcagagacatggtaggaattacgtagagaaagtttaaagggtacgtacgcagagaattttctcaaagcaatgtgtatgctctcttagccggcgaacagaatcccggcgtcctcaatctctcttcaactcccaaactgaaaaactcaacaatgcctctgaacttgaagacaagtgcattggcgctgcaacaccttcagcagtttttctgggttatattcatccccttttatttggaaacaacgctagtaaatcggccgtagtggccatcatgcacgcgacacgatccgcaccgacgtgcgccatcccacacgtcagatcgtgccgtgcgagactcggactccacaacagactccacgattttgacgtgaactcacacacctaaagtcttacacacgacgtagctgctagccagctggcccacaagcaaaacaaagaaaagaacgacaaactacccgatgaggaacagtgaaaaatagaaaatgcctaaaaagacaacgccacagacggcgagattgacaacatgctctagatcctattcctagtgtgacatctcaaatgaactttgctgcgagagctataacataggtcatcagagggaagtgagaggcatatgtggtgatggagttagttgtaaatttatctcctttgaacttacgttagaggtaggtacgatagacaaagtagtaatgcaatggcggtgcaacatatccgcgaggaggcagcagcccaatgagatggagatggaggtaggctgctagcacatagcatagggagacttttaagagctatgtgaacggcaacaccagtcgaccacagtacaggttccatccgtattcttacaggtatctcttccttattttggtcagcatgctcagcatatacgactccatatcatgatattctttccacgacaccacctattccaagtaaagaaatgcactatactaatataacaactgagaatagagtgacttcacattcctatcagacatgaagtgtatgcttagacattagtccttatataggctaaaggaggtagcatgaggaaacaaacccaaacatgttaacataaattatgttgcgccagaatttgtgatgtgtgagcagggttttcaattttgaaattgtatttttgcctgggaggaccaaaatttcggaaattttgtggctgaaattatttgaaattttgacttattttgaatgaatttgaataaaatttgaccaaattcacaaaaatttgcaaaacaccgaaatttcgggcgagatgtgagcctttgcttgcttcagttattggcctacggtaacataactcttatattagtcacttactccctccgtcctaagaaaaacaatctctagctttaaacctggacatgcccatatacatgttcatagctaggaactgacttttttaggacgaagcatgtaaggaagaagtaaacatttggcctttttttatctcataccatcttaattgaagccctagttgaactggcttttttttttaatctcatacggtcataccatctttcaacatttggccgacattgaaaaaacaatcaggattcttcatacggccaaaagagtgatcagcttatttgttttcaatcatatctagtatggttgttcctttccaatattaatatgcttttgttcaacagtattgagtaaaaatcctcctgcctatcttaagaaaaaagagttttgcaatgcatactccagtcaatttctattcatcgagacacaatcacgagcaagtagcgtgtatgctctagatctcaaatggttcctgttgtcgaattcggatcaactctttggtggggctgtattaatttggtccgctgctatataatgtgcgatacattatcttcaacttgctccctaactgatgatatgatatgagaaattaatggtataatctgctccatatagtgaagtacgtacacccaagacctgtgtgtctgtgctatatatgtgttttggtatcatcagcaattcagctttagtggctagtacccgcaaaactcacaagtttgtgaatctcacatggcctagacgaatgcagagttgtgtgtaccaccagatcaaagactacaatcagaacactgctgagagatcttgtcttggcattcttcctggttcctttcattcctaagaaaacaaatatgcttcaaggagttccagtggtgcacaaacaagcaaaggtagactactctggtatagcggcccgccggaaggagatagagcatatacatgaacctaagagagaattgttttatctctctagtctgtaccaatttgcattaagttagtacaagcgttcaaggctactcgattttaatgtgtacatcccaaactgatcctatacaaatcgcgagtgaaaagccagacaatctgaaggaagtgagaggcaggtaggtgaggtaagaaatcaatgctactccctccgtttcataatgtgtctaattcattaacatctatacgaatattagcaatgctagaaaaatcttagattattatacgaatggagtaggactttgtgataccagttcccagctcaagaacaagcaaggaagcaacctagctgaaacataattctgggtattgcaataatttgatcaaaataggaatctgccgaacaaaagaaggtatcaaatgattttgttcaacttaatcttcattttctgatcgttgtagtagtctcttcttgagatatccaacgaagcttgcacgttttgaagatttgggaggcttgactccccactgaagcattccacttcataccatcatgacacgccaagtcccaccagatctacacacaattttcctggtgcctcttattcataacaaattgtatccatgtaaatgtaaatcattttttacaacacaggaaaggacaaaaaaaaaccgagtgttccatgatgtcgaagatatagaaatttgtacatgtgtctggttatataaatttggaagtcagttaaagatatatactactacaaagctttgtacatgtgtctggttatataaatttggaagtcggttaaagatatatactactacaaagcataagtaggggaaaggaataagttttccacgtgttttatatgaacacacaccaaattgtgaagaggaggtgcacatttacttaaatatggtatttacatgagataaaagggtttagatgggatttggatataacattcaccatcttatttaaaagggcgtcagttagtgtataaatacactaagtatgcgatagatgactaggaacacagttgttacatactccatccgtttcagattacaagtagctttaagttttttctcggtcaaaccttttcaaatttgaccaaatttataaaaactatagcaacattttcaatacaaaacaatcatattatcaaattatattaatgttagatttaatgaaactaatttggtgttttagatattgctaaatttttaaacttggtcaaacctaaagaaatttgacttggaattttgtactacctccttttttaatagatggcgccgttgattttttctcacatatttgaccattcatcttattcaaaaattttatgcaaatgtataagatataaatcacacttaaagtactatgagtgataaaacaactcataacaaaataaattataattacgtaaattttttgaataagacgaatggtcaaacatgtgagaaaaagtcaacggcgtcatctattaaaaaatagaggtagtaaattttaggtttattaattaataaaaaatatttatgtagcgtataaatatatttatattatatagaaaacatgttttagtactatgcacaaaataagctacatatatgtattttaaaaattaaaaataaatattatttttatgtcctatctaaaaataaactttgtcacaaataatatcttgcgttataaaatgataaatataaaagtatcatacaacaaatttccatactctataagtttatttggttttcataccatagggcaaattggacttttacacaagaatttaacggtcaactaacagaaaggatatggaagatatccaatccaaatatacaagagaataagcaaatttgactaggaatcctatatattttaggaactgccaccatctctatcgaggatggcccccaccgtcaaccttgtcgtcggaacccaccgcctcctcgtcggagcccacccgtgtcaaacttcactgacacctacatgtcgaccacaccaagacgtgctcctgctgcccggacttcgtcacccaacaaatctgttccaacctatcttagattgaccacctatcaatctagtcgttagccaaagccgacgaatcaccatgttgccttcatagttgctgaatgaccagagcgccacgtttggccatctctttattgaatgcaactcgccaaaaggcccgacccacccccgccggtgtgtttgattccaccgaccgagaatggcaatcacctccagcttcaaccaagcccgagtgtttggcctcatgtcaccttgttgaaagtagctttctagaaagttcgagtcaccagcccaaagtgtctgaatccatctattggatcgcaatttgcttctgccaccatcaacccgagcactgcatctggtcatctccttgttgaaaacatccatcgaacggttcaaaccaccgcctgaaatgttatatccaccgatcaaatttcgtttatcaccaccatgctccaccttgcgtgcacattcgtcccttcacatcctgtgtaatcgttgtagcgtggagcacctcccacgtacctctaccatggatttcccataagctctcatacaacttgttctaaagccggcccccaaatcacaattggaaactaaacatgaaagaaacgccatagaagagccaaatttgatgatgacaccgatgaatgatatttgttaacaaagttcaaccgaagcctatatccttgtggcactgattatgggtgctccatcgattcaggcatccaacattattacaatgtattagagttacaacgagcctcagccgaacgtcggcagccactccctctcgcctatggtaagtcacgatgcggttgcaacatatctacccctttatttaagagataggctagaatagagtccgacgcttactctattcctaacacctagtacaactctatgtcctaaactgtaaccgacatattcgacacaaactctaacaccattcaaccatgattggcctccattgaagccacaattaggcttagttttttaacactgccaaataataataagtttaccagtcaccagccagaagcactacaacatatcctcaccaccttcatgcccggcagccggcgacggtgctagctccgatccaacaccggataccagcatcatcaccacacacacagctccatcccaaccccctggtgcgctagagcaggctgagatgcatatgcctccttcttgcccagtcatacaccaagatccacaccatcaggttgaagtgtacaacaccatggatcatctgcgtgccggcacttccaacccacgacgacctcagcagccgtcggtttaactgaggattcaactttgcaggacgggccctgcacgagcatgaacgggatgagacggcgagttgagcgcgcccagttgacgtggtgggcagcatcatggtgatggcgaaggtgaagtagtacaattgacaaagcgaaaatgctgaggagggtggcctctgcaggccacagtgaaaatgttgcctggtgtgtaaagaagaggaataataacagacgctgaatgatgagcctttggagcctggaaggaacaagcaaattgtagggaaataaggcacgtatatatgcaaagaaattggatgagtcaatccatgcaaacaacgcgtgtcgctgtaaacaccggccagcaacgcaagcagatagctatcaaagacaccaaacagaaggaagtaacacaaaaacgagcaagaaaagacgaacaattaataaaggaatcagacgatgagattattggcagcggcattagacgacaccaacagagaacgcagcaacaagcaggcatcgatttgccaacatccttcgttcggacgaccataaaataaacagaaactaccactggtagaacggtacgtcagtaaatcaagaggagagggaaaaaattctagaaaaaagcagggaaaacggaaccccatgggacttagggagttttatgatgcgcgcgaggaggcagtggcccaatccgtcagataaaggcagggctgcaggctgctcgcactagaagactttacggagttccaggagcagtagcaccagttgaccacagaaatacagaatatgtttcatccgtagtctcctggggatctctaccctatttaggtcaccatgctcagtctgttttagcatgataatttttccatcttggttcctgttatggcattcagattaacgctttgctccagctgaattaggttggttgctatattatgggtgatacattattcttcaacttgctccctaactgatgttatgagaaatggtataatctgctccatatagtaaagtacactgagacttaaatcttctattccttcatcttcttcgactcaccatcatcgattgcatctctaattgacggtcctccacctggtgcatgcgtccccctctgtgtcgtcccttgactctcctctattaatttgttaagctttttggttatcataagcaaatcgatattatcagcagctagtactccaatcacagtttgtgaatctcacatggcctagacgaatgcatagctgtgtgtgtaccaccagaccaatcactacaaagtgaccactgcgataacctacttgtctcggccctcttcctggttcctctctcattcctaaggaagaaacaaatgcttgcagtggtgcccaaattaacaagcagagatagagtattctaatctgaaggggtaggagtatactccctccgtttcaaaatgttgacaccgttgactttttagcacatatttgaccattcgtcttatttaaaaaaatttgtgaaaaatgtaaaactatatgtgtacatgaaagtatatttaacaatgaatcaaatgatataaaaataataaataattacttaaattttttgaataagacgaatgatcaaacatgtactaaaaagtcaagtgtcaaacattttgaaaacggagggagtatatatgaacccaacagatcgagaattgtttgctctctctagtttgtatattcgtaccaatacacattaagcagtgttgaatgtgtaatttcagctgtggccccccaaagtgtttcaattgttagagcatctccagcagggacctcaaattcagcccctattcaatttttgagagttaagatcaaaaaactagatccagcagggaccctactagagccccaaaagtgaggaggccctcgaatcctcccccaaggccccagtcctgggggctccggagcacgcccccatcgtcattttttttggcgcggataataattttgcttcgcgcattttcttgttattcctgcacggctgcgacgacggatcttctccggcgagcaccgacgaattcccagcacctccgtcaagactgcccccgaaaggtaagacttttccatacctttcttgcccgtcgatctcaaggccttcggcggcggtccatgcgcatgcccggccgccgatctcccgccatctgcctggccacacgccggccgtcgcgtgccctccaaggctgcccgcacacacgtcacccacctgcacgctgtctgcccccacgctggcctcctgcccccattgacttttctagagaaactctaagtaggtcatgtgctgcgggggttcagtggtagagtactgatcaattttctgaataactctgttcttgacacaaatggacatgtggtggtagatggttctggtggagactgacttgtttttaataatttttttggagaattgtagtggactttgtcgtcaaggaaaatctaaattctcaactagtaatggttgtgtttagttcacactaaaattgaaagtttagttaaaattggaacgatgtgacggaaaagttagaagtttatgtgtgtagcgattgcaatggcttggagaataagtctgctggagtttgttagcagatgcgggagatgcggcgatcaggatctgaatgaccgcatcagtagcgtccgtgtgcgtgagtttagcgcaggtgtgtgtagctgaattcagagatttgcggatcgtgggatggcacgattttgcctcggattcgtttatttgtatcgagtataagtaggagtcttagctcagttttttcatttgtaagttctttatttagttgaatgaaaaaccaccagaaaattgccccacatttgatcgttctcgcggagaattctgaaatttctcagttttttcctctgctctgaatttcctttgttcttcgttactgttttagtctgttgccgtgccggacatctgcagtttgcacgcaatgtgttcgatcagaggttatcgccaacaaacagcatagagagaagttaaaggctacttcatccttatgggtatactttggactgaagaaaacaactatccgatgcaaacagcgattcagcgagtgaaaagccagacaatctgaagtaagtgagagacgggtggtgacgtcgtgtaataagttgtggattaatcttccctgaagttgagaggtaggtgaggtaacaaattattgctagaactttgtgttgccatcccaagttcccaactcaaaaaactagcaaggaagcaacataaatctatccctatactaattgggcactttctacgaactctcacgttaactataaagatctaaccattagattagattgacggtaatatcaggaccgtagatttaaactgtaaacatggacttttaaagtccaagcaatctagcgttagaaattggtccaccatccaatctctttaactgctttaaaggcccaaaacccatatatgtgcacgtattaatctcagccaccacattagggtattcacctacatcgatggctgccacggtattggcggacatcgctcccgacaagacggcggcaacttcgacctccttcatcgtgcacccgaggtttggccgcaattgcatgcaggcaaagctccatatcgatgtcgaccgaatgcatttgtccttgcggggtctcagctcatctattaagaattgatctaaactgatcctacagctacgattgctgatttacgtacacaagtaagattttgttcgaactttctccaattctagctgttcatctgcatgctcttcatctggctatgccaacatatgacctaataaatttcaggtgcattgagatgttataattcacccaaacaaacaagttcgattgcacccaaagagatcgatccgtggtcgtctcatctgctctttatgaaggtacgtaatttgtcaatttggatattctatgccaagttttgcttgcacctaggaaacatccatcgtaggcgttgcatctgtaaaccatgcatgaagataattcatgcatggttgatttgtatggtctcttatatgtatatatattcgaactttgttgttctatagctttctgcacattcaaactaattaatccatgcgtgctgcttcgttgtatccgctcattgttatttaagttgatgccatatatatatatataatttccaaagacaaataacacaacttatttgtctctcgacatgatataaatatatattctttctcacaaacagggatgatacaaatattttcttgagagttcaagacaagtacaattttatattaataattagacaattaaaattgtaacttcaagtttgacaagcagcagccataaaaatatttttgcttgacagtccaagacgagaacaattttaaatttaataattttgattagcaaactttaactaggactctttttatctaatccactataactccctattctaattatgacagagttctaaacatcttcgactatcaatatcaatgtagcatttattagtttaatcatcataaaatcgtacccattgattatgttggttttatattaaataaaacaggccatatgctctttacatttatagattttctaaaaaaaatgaaattaataatatggagctgtaccaattaaaccttggactacgtactatttagcattgctattaataatttatgaaattcaaaataaaaaatagcagattgtaacaggtagggattgattttatctaatcccactacaatgtgaaaataaattcaaacttaataactatatatcgatttatgaccatgctcaactgtcaatttagcacttattaatttaattatttaattcaaaactaacaagttattttaattctaatctactatattttaaaaataaacaacacatctgtagcataaaactgttcatattattgtaacaatatataattatacccgtgcaacgcacgggttgacgtctagtaatatgtaattctgggtattgcaattatttgcataaaaacagaagctgctcaagaaaagaaggtatcaaatcaatttgttcagcataatcttcaatttcagatcgttgtactagtctcttcgttcttgagttatccatcgatgcttgcaggttttgaagatctgggaggcttgactccccactgtagctttccacttctcaccgtcatgagacgtccagtcctatcagatctacactcagttttcctgctgcctcctattcataacaaatgaatatcaatataaattgtttttgagaacacaaaaaaggacaagtacaccgagtgttccatgatgtccaagagatatatgtttggttatataaattttttagtcgatcaaagatatatgtacaactacaaagcataggtaggggagagcaataagtagcaacatattttatatcaacatcatcaccaaatcgtgaagaggaggtgcatatttactatacgggatttgcattagataaaagggtttacatgggatttggttataacattcaccctcttctttaaaagagcgacactttggggaccgcagatattacatgaaacaactaccaatgcaattataaggcattggtatataaaagaaaacattagttcagggtggtcaataactcgtgttcacacgtattttttgaaccgtcgtctaaaagtaagggcatgtagaaatcaggatttttctcaagcagattccatgaccacccgtaaaaatcaattttcatgaatggccggtaaaaatgaattaccagattttgactttcgtaggcacaaaaggtaccaaaaacatattttaggcatctatacatggcagcgaaacataaatcacaagtcacatgattttacctatgagcttttcatgattgttggaaggatatgctatttgtttctcacttcaccattctaaacttggaatatacattttgcacgttgaataacttcaaatggaaatgtcatcagatgtaaacttgtagatcgcgttgagttatacacttttgacatagaacatgtctctatataaggtcatttggaaaactcaaaacttaattttcagtcactaatccataaaaaaagttgattcaataataattagtgaaaaaaaatgaaaactaataaacaaccatttctgtcagatggattaatgcgtgcaatatatatatatcgtcaacattgtcgaacaagcattatgcaaatactacctccgtcccataaaaattgcatttctagctaatttaggacaaaatagtaggattggaaaattaccacaataaccttatttaatgaacccactgtatgcacacattccatatatacaaatgattaaaaggaagtttgagagaattaacccatataattagcatacttaataaaattacaagcattagcagctcaaattatgtgagatggaatgaaacttatatagatgaatcaattggttaggccccacatggctagaaatataattttgtggaacaaagccttggagctagaaatgcaatttttatgggacggagggagtatatgcatattacacacaatattttacactgaaggaaatacaagtccatttattccaaatcccagaaaatatataagcaaaagtaggtggaaaaaaaacaagccaacagacacctcgatcgattaattatctgtttgtttatttacttacctgcagttatttatttatgtagcatcctatgaatagatgagcgagagaaacacacaccaatcgatttatctttgaacggtaaataaatttgtcagccatgggagacctaaagctacccaagagctgatgtctccctccatggctgtcctatctccaaatatcaccgcgatgatgacgcgcaccaccgcgccgacgatgttccgatctcgctccgacggaatgccatggagaggaccaccttcaccgatcatctcctcgctgatcgccagcatgatctgccctccacatttcatgtcccgagctgcctgccatctcctccgtgcgatctgcttgatgcaggacacgtgcagggacacggcctcgccgccgccgtcgacgacgtcggagttgtagtagcaccattgctcctggcggcggaggcggcggcagcagtgatccgggccctcctcctcctgtctgctgcataggctgcacttgctgaacgccgcgatgtcgaaggcgaccccgtcgatagtgatcttggctagtccctgttgagaatagtcccacgttacttatttatggggttgagccaacttaaaagtgagggaatctctcacctctttaactagcttttgaggcgtagcaagactttctttcggttggtccaacgtctcccggttttggaccgggagttcctgcaggctcgcacagcatgggtggaggtcgaggttggcgcctgagcagtggtagacgagaccgaacacatggtcgccgcaggtgtcgcaccacctgccgccgctttcgcctctgccaccaccggtggcggcggggtgcggtttctccggtcgtccttgcggtggcttggcgagaagctcgaacgtgcggccgaagagatggtggtagagcgtgctcggcgcatgggcacagaacttgtgcatgttgaggtcctcgcaggtgaggcagtggtacctcggcccgtctccgggctccttgcaggcgtcgcacttgaacggcgcttcgccggtggtggtcaccattctaagcttgtgctccgggtggctggggtgggtgatcgtcttcatctccggcaccataccgttgtttgttccattctggttctcgaactcctccgcatcaccgttactttccccactgtaactagcgcattcaatgatcccgatcagtaaattttttttattatttgggacaaaactcgatcaaactttaaatatcctgacaaccatttcttttttgttagaactacttgatagtatttatagttttgtacaaggacacaaagtctccaagaaacaacactcaagaaataaccttaataacacttttctactatactttctccgcccatttttaagtgcagttgtggttttttttttccaatgtttaaccatccatcttatttgatattttttatgattagtatttttattgctattagataataaagcatcactagtactttaagcgtgtcttattttttttcaattttttcataatttttcaaataagacggacgagcaaacgttggacacagaaatcaacaactacatttaaaatagaacgaagggagtaatattcgtataaatatgaacaaatatataagtttattgaagtacttttcaagattaatctatacatatggtctccatatctgtatgagaaatatttcatagtcaaatattttaaattttgactttagttttatccaaaacgataagtattatcgtttcggagcaactaatttataaaataataagtttttgacatctatccgttatattattaggacgctcttctaccgcattcattctagaagctagaaatttctagaaaaagaaaaaaatcttaacagttagataacggtacatatagttgtataaaaatacaattatatctacagaaatataattcaagagttatatatgaaatctaagcctattgaaatagaagttaagagtggtatatgacattcaaaccttatagaaatagaagctaagcattgtatatataaaatctaaatatatttctacatacaatgttaccaatagaatataaaatttcagaattgtatactaaatctcactctatacgtgaattatctaggggaatcccctagctcgttatgataatttccttatgacataataattgctggtagtttttcatgtacggcgttgtactttccaatcataaattaataatttctatcatttaacacttttttcagcgtaatacatatcgttttatatttttttaaaaaagaaataactgaattatttgcacgtggcttttttattgaaataactgcataaatgtaatactatggaagttctcgctgtagcaacaaatttagctatatgatttccatgtgcctcaaacatatgttctgaacaatgattatggtcgaaaatcactgcaatgattctaaaacgaaacttatttatcaggagggaataaattcatatatacacacctgctattatcttgtgcagatgcaccttcaccacaatcatttgtcggcgtcccgtcctccattagaatctcatacaaattagtcagagtctcgtgtgagtgtgacatcaactccttcaagcacgacaggtgcacgtcgacgagctcgtcgccgccgctgcggcggaagcggcaggtccagaacccgtgacggtacccatcctcgccggacatgcagacgccgcaccgtcggcggggagccgccctgcggcagagcttgacggcggcggcgccgcgagctgccgccactggcagcctcagcctcgcgcagcgcgggtggaggttcaggccgacgaggccgtgcccatcggcgcagtggtaggcgaagccgtcgccgcgcaggaggtcgccgcacgcgtcgcacgccggcctccagccgccgccgccacggtcgtcggcggcgagccatggcggcggcggcggaggccgctcgaggaggcggaagtgccggcccgggagcagcgggtgctctagggtgagcggcgcggtggcgcagcacgtgtagagggtgaggtcgcagggctcgcacctgtacctgcggcggccggcggcgagctccttgcagccgccgcaccggaaaggccagtgaccgtcggtgacgttgtcggccagcctcagcttgtgagggtgaaacgggtgagtgatctccgccaccggaggatcacccaaatccggcgtgcgtaacatgtggttgtcgttttctgttgaaatcagcaaattcaagatcattaattcattattgagcaagccatgcaaatttgagtcactagaaaacctatcggtatagccgatttgatcggtgctcaccgaaatttccgaaattttgaataaagtatagttgaatttgaacaaataataccaaaattcacggaaaaatttaaaatttaaaaatttcggccgaaataatatcgttccggaatttccaaccctgcactcgatctcgttagtgatacacatatatactcgcttcaattctgaacatttgaaagtttaggacaagatttgataaaaacatttaaaacttcgaccgttaatgaatttataaatatttacttgaagagatttgctccggttcaataaaaagtaactcgagttaccggtattttacggtactaaatcgttttcgatcgttggatctagctgggcaggatgggcgttgttagatccaacgatcgcaaacgatttagtatgagtacctcgagatactttttgtttgaccagagcaaatctcttacttaaaactaaaaagtataaatatggtatgagcatatttgactccaaaagtattatatattatcagttgtcaaagttctagaaaactaatttaatcctaaaaattaatgtaaactattgtcccatgttgaattaattatattccaataaaatttatgtccatgcggttatatgatgaccaattcaaaaaattttggattgtattatatgatgatcaatttagaaaggaggatgtatatagtaagtgaggattcttaaaagtagttatgttcaaattaaggatcgatggatacctctggatcgaccgagtcagcctcggagaagatcggcgtgaaggtttatatcctactcctgcccgtaccacaagaaggccaacgtacaagctgcagatcgaaggaatatgagagagatagactgagactggatcttctatttatacaccaattcaccagccggcatgattcctgtttcaaactaaactatatgcgcactcagaatctttcactaattgtatatatgcaaatatatacgtatacgtgcagtgtcctagtccgagaagtctctcttaacaataactggtagatatttatatttatctacacatctacgtcctgaacagcttgctctacttcttccggaaaaaaaattctggacagctaattatgcttataaattattactcgtttttattcattcaaacttataacggaattagtcttccctttcacttcattgaaaaacaaaatttacaacaaagtgtcctggatttcataaaattaaacgacatgtcgatcaatactcacacgcacactagaaaagaattggctataactctttgagcaaaagctgagattctattctattatctaaaaaagacacactagaaagaaatttaactttcagaatattcagcctgcccatatctgtaatagcgcgcacctctttgcaaaacaaatcaacaaaaaaattctctaattatttatataaaaactattatatcgctgtttctcaattttttatctcaaacaatgatatatggaagttttccaaaaaattgaaaaacctctcacaaatagctaaggtaatattagacaaccatacaacctacttgagtttgtgagatataaaattgagaaatataagataaaaagatataaacacgagcaatggtatttattaattttatatctcattaacgaacatgagtttgttcgtataactttgttcggttgtttattatttaaatatcacctatgtgtgtaattgttttgagttttcaccatatatttgccctagataaacaattagcaagttaattgttaattagcccatccattcgcaaaggctactgatgttgtcatttgtataacaaaatacatatctatttaagtttttccaattatatgcaactagttaatatttttacttcccatatttttttattaaaatggcagttgcattttctaattattaaatgattgtttttacatatggaaattatattcagttataaataaatctactttgtctaaattaataattctaaagttgtatttgttatagttataaaattctaaattaataattacatagtgtttttccttctaaattatatatagaatcaattccgagctagtcacataactgaaatattagggaaaatatgtggtggaaaccacttatgtagtggaaatttgaaaactgccactggatcgaaaaatagacgctggaaattcatccacgtcactatgagtaaaaaatttactcactgtaaaatttttactcatgagcaaatccgtgagtaaatttttacttgtgatgaaacgtacgaatcttgtatgtctatttttcaatcaatggtactttctaagttttcatttcatatgtgattcccaccacatattttcccgaaatattacgccagcactacctagataattttctttgactaatttagttaaaacgacatgcgcaaagttagcatagttgagcggattaggtttatggtggtggaaacttttgtcgactcaggttgagtccgcgactaagaacatgtacaggttcttatatttatgactaatattctttcggtaacatgcgatataacagttaaccatgaggcacatatatatagtgagttcgccaatctcaatatatgctgaccttatctctcatctcagaagtcagaagtactcataggaaaaaacgtatacctgtggacgtttatatagttgagtgtgaatgagaccctaggtgcctatgattgcaatgcaatatatatgttccccaataaataaataaataaaaataacacgtatctgttagtgagatacttgaatgacttggcactctagctagctagttataggtttagtgaatcgcagaaattatatacagcagattccgtttgacatggattatatacaatagaatctgtttcacatgggtacgttaaatatcagagattctgtgggacatggattactatatatatctaccagatattcacttcgccaagcaacccattacgtataataaccttcttctggacgtggatcgtgtttctctaaccctttctaacctgatatatattaacaaataaccaatttgaagtttccatttgtttctatatatatagggaatttggaaatattagttgctggtaataaactgcagagaactaattacgatgccaaggaactgcaggtacatcagatccgtttaattatttgctgtcaagtctcaataaaaaccagtgaacaaagttacttcgagaaaaaaaattagagtatatatgtttgctatattgtcacagctttttttttttaccggcaaaaaaagtagtgacgaactgttgattatgaatagcattgccttcactggtagagaaagcgtttgtagttccggttcgtaacccccctttaatccctgtttccaaaccgggactaccaatccgagactaaagatcgctatctttagtcccgggtgaaataactgggactaaaaatcgatctttagtcccgattggtaacaccggcgtcccggttggtaacaccaaccgggagtaaacaaccgggactaaagatcgagctgaccttttttttttcatgtccctgttgctgcatggtttatatatatgcatatatatgtttcaatacatatatatgcacatataatatatgcatatatatatattatattatatttatatatgtttcaatacatatgtacatatgcaaatgcatatgtatatatatatatatatatatatgaccaaaatatatatttacattatagaaaatgtgtacacatgcatatagaaacatagtcatgtattaattacaatccattatatgtcctagctagctacgatttcgacgtagtagtagtcgctagctcagaagctaaggacctatgaattgtgtttccgtcgtagtagaattcacccttgggatcaaggatttgtttattgatgaatcccatgagttgttcttgaaccgccgcgataaattccttgtgtgtgatcaggttatccctcatacgaataaactatatgaatgtatgaaatttattagtaattaaacaacaaatcgatacataatgaaattttaaatttatttgtacgtacatcgagctctcttgtggtgatgatttggtctgcaaggcagtggcaatactcgcacacgtagtagccgcacaagttagttccctgcttttgctttgcgcactataaataaatgacaaacgacgagagatctaattaatgtacacttgtatgtatttgaatcagagaaatataaatgtagagcatatgtactcacaggaaatttgaacttccgcctaagtctttctctccatttgccgcggaccaaatgatagaaccgataccaagccctacatggagtttaaagctatgattcgtagtagcaattaactataacaagattcttaattaacataggaacttatgacagtacctgtctataagttcgaaaaccttgtcaaacgtagactcttttttatccattgagtcatatacgttgacgttacaggcttccaggtcgaagagtaaaagcacccagtggaatctgcaatgtgcgtgggatgcattacatatgaaacacttagcaagttcatacgggaatgaaatttggtataggaagacagtaaaattaaactaactctgtgttgtacggcaacagtatgaacgtcttgtaatgctgcgccttcaggagatggacgagattgtcctctgtggcttgcggatattggtcgagcattgcgacgtttactttccgagggtcgatgaatccagtatcgaaaaccccccgccgttaggccctttgaatctccattctacaacgataaaagggagtatatattatatatagtctacttatatacaaggacctaattacttaaaggagacgtagtaagaaatctaactgaatgatatacttacaaaatccagcaactcataatagagacgtcgagggcgtccagctggtatagttcgtagattcccttgaaattgatccagagaatgtcatctccttgcaagaagtccgtgtccctgatccttgctccaatcatctctctaccggtggcgctcatctccatgtacagctgatggaacttgtacatttgtgtgggtagggactgcagcagctcaggcttgacaagcggtttaccgagttcgtacatgtatttcacttccgccttttcgattggtgcgtctcctagcaattgatccgtagttagcccggtgtcattaataaattcttgtattccaaaatcttcaccagtcaccaacggctcgatctcctggtttggttgctctccaagctgagggactggtttggactttccagaagatgctttcttgagcgttcgctcatagtccgatagctttatggcctccttggcaggtgcagacatacccctgaagaagttcctaacactcgggtctataggaatcttcttttctggacttcgaggcttgaattgtctgttgacttctgatgccacgtaagcttcaagctcctcttgcgtgcaatcgtaccccgggtccttgttcttggcggtgtcaactttcgccttctttattgcccttgtgggggcaggcggtggagcttgggttgcccttgacttggaaggtgccggaagaggagcctaaggaggagtcggtgcaggagcctgaagaggagtcagtgcaggagcctaaggaggagtcggtgcaggagcctgaggtggagacggtgctggagcatgaggaggagacggtgctggagcctgaggaggagacggcggagccagaggagatggtgcacgagacgccgcttgtcgcccagggaggatgatgtatcgcttgcgccatagaataatggtgtggcttgtgtctcgtagatgcgtctcaccatctcctccagggtaatccagctcgaggtcctcgtacgcgtcttcgaccaactcaacttcgaccttggagtatcctgctgcaatcggcctacagtggtaagtacctgaagggtccgttgggatggccatgcccgacgccaccttcatgtggtgagtggttatttattagtaatcaacatatataagcaacaactagcggaatggccaaatctaaaatctataaactatgggcttacctttattgataagttcttgaaaggaatatgcagctcacatggtgtccgctgagtgatgtcatcaacggggcaggtggattcgtcctgcgtttgcatggcgtccatgctctatgatcctacctgcccctttgaggcgcagctgctacggtttcctgacgggctcaccattgcaggaggaatggtcggctggggatcatgggaccgatgtgcggccatgcattcatcaaccttccttgccacctcctcttgcatgctgagctcgtagctcgataccctgaactctagatctgcaatcttcgcctcggtatctctcttgctcctcatccgactcctgtacgtgtggatgtcctccttgaacccaatcttccaaggaatcacccctttccctcgtgttcgtcctggatgctctggagtctgcagggtgagtgacagctcgtccttctctctgttcggtcggaacgtgccctaagaagaggcttccactgtgtctgttagtcgacgcgcagcctcgcgtatctgatcgccgaagaccagggagccatcagctgggttgagcattccaccgtgagcatagtaccagaacttcgatcgttccggccaattagcggtggccggttcgatacccctctcaagcaagctagcctccatctcctcccacttcggcatcgcgacgctatagccgcctgaccccaagtggtgatggtacttcttcttggcggcattttctttgtttctttccatcatcgcctgcccttgttcacctgtcttatatgcaacgaactcgtcccagtgatcccttagctttgggaatgtgtcgaagttcggtgtctgccccttcaggatatatttctggtacagatctcccttgaagctccgaaactgttctgccattttcttcagagtccaccttttcactttgtcctctgtacccgcgggaagggtgaatgtctcgagcattgtggtccacagcatctctttctccgaatctgggacaaagctctcatgatctccgcgtgcccttgttctgcgccagtagaccgtactaacaggcacgttatcccgcgcaacccaaccgctgtgacgtacatagttcttggcggcttctgccggggcactaggtcggccgtcttcgtccacttccgttatgatgtgccgaccctcaagcttcttcgtggcacctcgttgcccgcgtcccctcttctgtccaacggagggttgacttccactagcctcctcctcctggttcccctccacatccctttccacgtgcccctcctggttcccctccgcatccctctcaacgctcccttcctcgttcaaatactggtttggatccttgttcccctcttcttcgttccagttctggctgcttccctccgcgattgtatcgtacaatatctgttcctcattgcgatcagccatctgttcatacaggaaacatctgctaagtcatgagacatttatgttttaacaatcttatatgctaacaatcatatgctaagtctaggtgacgtatattataggaccctagctagtcaataaattatatagtaagtctaattacaaatctaataatcttatattaaaactcaaataatcttatactaaaactcaaatagtgataaatgctaagtctaggtgacgtatattataggaccctagccagtcaataattatatactaagtctaattacaaatataataatcttatattaaaactcaaataatcttagactaaaactcaaatagtcatgtgtgctaagtgtaactgtcgtatattagaaccctacacaatcttatatgctaagtctaattacaaatctaataatcttatactaaaactcaaatagtgataaatgctaagtataggtgacgtatattataggaccctagctagtcaataattatatactaagtctaattacatgcatgataatcttatattaaaactcaaataatcttagactaaaactcaaatagtcatgtgtgctaagtgtaactgtcgtatattagaaccctacacaatcttatatgctaagtctaattacaaatctaataatcttatactaaaactcaaatagtgataaatgctaagtctaggtgacgtatattaaatccaatagtcttaattgcattacaaatataacaatcatatatataattacgtcacttgcctgcgcgaattccttcgagggctagctaccactccggcttgagggacgacttcgacaacgtcttttctgcaggatacaaaaagatgtattaggataaacgcgaagtaacatatattgcatttgacgttcacgtttcgttcacgatcgttcacgttcgcgttctcgttaaggtcacgtttcattcacctacgttcgttcacgtacgttcgttcgttcacgttcattcacctacctatattgcatttcacgttcacgttcgttcacgttcatgtttcgttcacgttctcgttcacgttcgtttgttctttcacgttcaattctcgttcacgttcgttcgctcgttcgcgttctcgttcacgttcgttcggacgttcacgttctcgttcacgttcgttcgtggcggcggggcggcgcggcggcggcgtggcgccgcgcgcggcatcgacgtggcgcggcggcggcgtgcggcgcgcggcgcggtggcggcgtggcgcgcagcccggtggcggcgttgcgcggcggcggcatcgtggcgtctcgtacgtctcgtgtcgtgccgccgcggcgtcgtggcgcggcgtcgtgtcgtgacgacgtcggcgtcggcgtcggcaaccgagagggagagagagagagatcgagatcggagagagatagcgatgagagggaggcggcggcggctctcaccccagagatgcggcgcggcggtggaggaggcggaggcggcggcgacgacgacgagcgcgagacgacggcgagatatggggatgccctaggcagtggcggtgaaggagaagtcgagagagatcgatcgggcaaaaacttctaagtgttggtggagaagacgagggcgcgcatcaggaatatatatacccatagatctttagtcccggttgatgagaacaatctttactcccggttgttctcatcaaccgggactaaagatattttcccgctatttccaaattctttttaaacccggttaggattaagaaccgggactactgataagcgcactgaatattattttccattacatatgtgctcctaaaatagaaaataatgctttaaaattattaatgacaattacttcgaaaaattattgttgtctgtaatgaattaagtggataaaacgtaataagcaaatatatgatttaaaattaataaaaattctaataatcatatatacttagcatatgaatgatattaaattggtaaaaactctaattaacatatgtatatacatacggcatgatttaaaattaataaaaattgtaataatcatatatacttagcatatgaatgatattaaattaattgttaaaaactctaattaacatatgtaaatgccacatgcatgatgtaaaaattttgaaaattcgaatagtcatatataattagcatatgaatgatagtaaattaattgttaaaaactctaattaacatatgtaaatgctacatgcatgatttaaaacttttaaaaattcgaatagtcatatataattagcatatgaatgatagtaaattaattgttaaaaactctaattaacatatgtaaatgccacatgcatgatttaaaacttttaaaaattgtaagtatcgcatataactagcatatacatgattaaaacctctaataatcgtgcataattaacatatgccatacatcaattgatttatatggataatcaatacatccaaaatagtttacatcgtgtacacaataattacggcaatacatcggcggtgacagttgaccgcacgtactttttcctcactattgttccctccttgtgatcgctgcgtgagtaaggggtgtcttcatttgataggaggatgctagggtcaatcatcaccgtgaaagggggttgcccatccaactgatcgtaatcctcgtcagtcttgtcctcagctccgacgatttttcttttgactaggagaaccacatgacgcttaggctcgtcaggccctctgcccttctttcctttgctagacatatccttcacgtaaaagacttgcgttacatcattggcaaggacaaaaggttcgtccgagtatccaactttgtcaaggtcaaccgttgtcatcccactgtcatcaatcattacgcctccaccagtcaacctaaccgattggcaccggaacagagggaccttgagaggaccatagtcaagttcccatatgtcctcgatggcaccgtaatacgtgccagttgttccatcgtgtcccatggcatcgacacgaacagcgctgctttgattcgtgctcttcatgtcttgggctctcgtgtagaatgtgtacccattgatctcatatccctggaatgtcgcgatcgaccaggacggtcccctcgccaggaaggtaagttgttggttgatcgactcgttacccacgagatgttgtagtagccacgcggggaaagtatcaatgtgatgccgtgtaatccatgcatcggacttaccgatgttcctggcgcgaactagagccaagtgctcctcgatgtaaggagctaccaatgaagattgttgcagaaccgtgaaatgggctttacggaataaattgttgtctaccgtcattattgctttccttccgagagttccctttccctgtagtctcccttcatggcgtgattcaggtaccccgattgggcgaaggtcttcgataaattctacgcaaaattcgatgacctcctctgtttcataacccttggcgatgcttgcctctggacgagcacggttacgaacatacttcttcagaacgcccatgtacctctcgaaaggaaacatgttgtgtaggtacacaggcccgagaatactgatctctttgacaaggtgacaaagcaaatgcgtcattatattgaaaaatgaaggtagaaatatcaactcaaaactgacgagacattgcaccacatcattctaaagggcttctaatctatccggatcaatgaccttctacgaaattgcgttcatgaatgcacatagctttgttattgttgcccggacattgtctggaaggataccccttattacaactggtagcagttgtatcatcaacacgtgacagtcatgagactttaggtttgtgaacatcttttccttcgtggagtatccagacggcacctttatgctctccaagcattcaaacatactttccttctctgccttgctaagagtgtagctggctggactcaagtaatggcttcctttctcctttggttccgggtgaaggtcgccgcgttgttccatatgcttcagatcattacgtgcttccagtgtatctttcgactttccgtatacacctaggaagccaagaaggtttacgcaaaggttcttagtgaggtgcatcacgtcgattgcgtggcggacgtccaagaattcccaatagggtaactcccaaaatatagagttctttttccacatcgccgcgtgaccatcttcgctctctataggctggcttccaggcccctttccgaacactactttaagatctttaaccatagcaaacactgttttcccgctgcgatgtttaggcttcgtacggtggtcagccttatgttcgaagtgcttgtctttcttccgtaccgggtggtttgctgcaaggaatcgacgatgacccatgtatacaaccttcctacagtgcttaagatacgtactttctgtttcatccatacagtgagtgcaagccttgtaccccttgttggactgtccggatagtttgctaagtgcaggccaatcgttgatggttacgaacagcagcgctcgtaggttaaacacctcctgtttgtcctcgtcccacacggggacaccttcctttttccacaacagtttaagatcttcgaccagtggtcttaggtacacatcgatgtcgttaccaggttgcttggggccttgaataataatcggcatcattatgtacttcctattcatgcatagccaggggggaggttgtatatacacatcgtaacgggccaagtgctatggccgctgctcatctctccaaaaggattcatgccatccgtactcaaaccaaaccgtatgtttcgtgcgtcctttccaaattctttaaattttctgtcgatgtttcgccactgcgaaccatcggcggggtgtctcagcatcctgtcctattgacgctcttcaacatgccatcgcatcattctagcattccccttgttcctgaacaaacgccttagccgtggtattatagggaaataccacatcaccttagtaggaattctcttctttgttagctgcccgtcaacttctcctggatcgtctcgtctaatcttgtatcgtagtgctttgcaaacagggcatgcttctaggttctcatactcctcaccgcgatataggatacaatcattcggacatatgtgaatcttctgaacttccagtcctagcgggcagactatcttcttagcctcgtacattgtctcgagcaatttgtttccctctggaagaatgttcttgacgagtttcaataaatcgccaaatgtcttgtcactaaccccattttttgccttccattgcaagaactccagagtggtatccaactttttgtgcccctactcgcaacctgggtacaacgacgttctgtggtcctctaacatcttgtccaatttatgggcccccttttcactttcgcagtcctccttggcgtcctgcaacatctgaccgagatcatccgcaacgtcgttaccatcagcatccctttcctcctcgcctgtttgatttccttcaaatccaacgtactgagcaaagtccggaatattgtcgtcttccacttcatcttcttccatttcaacaccttgctctctgtgggatgtccaacaattatagcttggcatgaaccccgactcaaacaagtggaaatgaatagtcctggatgcagaatacttcttctgattcttagacttattgcatggacaacgaataaaacccctttgcccgttagcttcggccactctcaaaaaatagtgcacgccgtcaatgaactctttggaccgccggtcagcgtacatccattgccgagtgtacatccattgccgatccatctacatgagtcaaaaaaaatcatacacaaataattattcttacaataatgacagtcatacaataattataagataattacaaactctttccacagtcatacaataatgacatatctttattcatacaaaaatcataaaatattacaccaaataattcttatttactatttctaaagttttaaactaattttaatgtgttttacttcttttaattttcattttagtttgttttctattatttaagattaactttcactatattttctttctcaactattttataaaaccttctttagcaaatcaactaaatttctatatattctttcttccccacacaaattttctctctcatcaacttacaactaaattttggagacaaaaaagtgtgcaaaacatagctgcaaatgtaatatgacaaaaaaaaaacactggaggatgaagttgcaaaccttttaggcacctccgatttgtatgtaatcaccaaaataaattcactagaaattttggcgtgacctcccctcttttttgaagaaattttgaaacttgctcgggcagctggaggagaaagaagacatatatataggggtgggactttagtcccggttggtgttaccaaccggggctaaagatccccgagctctttagtcccggttggtaagttacgatctttagtctcggttggtgttactaaccgggactaaagatcccggggggcctgacaggccctgacagcatttgaaccgggactaaagatcaagttttagtcccggttaaaaagggtaacgggcatatttgatctttagacccggcatatttgatcaaccgggactaaagatcatctttagccctggtttttattgtatccgggactattgtggaattcggccgaccgacgaaagatggtttctccaccagtgcttttagataaatatgtggtcatcctgcagatatttacatgttttttaatgtaaatgaatattattgtcatctcatatttactgagcttgaactttcatctcttgttaatttgatatatataacaatgcatggacaaactcatgcagttcacttgaacttttagagaaatgaatggattactgtgcagcccgtcaattatattggtttttgtttatttgtaattttggctcttataaatatcgtatactaaaaaataaattccgtgaatgttaatggacttgcactggctcttattatattcatacataatgatgaaatgcactttacattgatggagtaatagaattacatattctggcacataatgataatttcactggaaaaatatgtaactattgatgtgccagatgtaaccgagtggaataattaacgcagcacaactatacacaaattttataaaaatatcaagaaacatcaactggtatatagaaactttttatgtagaataatgtttcctagctctacaattatcgaacaacagagaaaagtaattatattgagataaactaaaataccaagcctaatatgtcttcagttacctactagcaaacttacataagaactttttgtatcagagaagggtatttttttacccagcctctatatcgccaatcgaatatatgcagccttttaaattggaaacttagccctttaaaaccacttggctacatacccttttgcaagcacataattgattgcttatgattaggaagctacaagaattatatttgaaacagattcccttgtggtggttagcaaacaatttgataggtcaatccatactacattgaatcaagatttgaagttcaaattagttggttaatttccaagagatgaagttttgttgggtacgtcgaacggcgaacacggtacagcacacatgctagccattagcgaaggtgtgtagcgaaggagagtatttcttctcgtgttgctttacaacctgtgtttatatgttcctgcaggctttattttacctttccttgataatgattgtaagcaagattatatgtagtggaataaatctccattaatttttaccaaaaaaaaacaagtgcaaacctcgttctacgatatttttctctttttccttttgagaactctgattctttcttgacttgtcgaaccatacaatgtatataagaccagaaaaaagaaccaatatctacaacctacagtagatcactatcatcgtaccctggcaaagagaaaaaaaaagtcactgtctacacatattatttctttagtttttgaagtaatttcatttgtcaactcaaatttactgaccacttcaaaattccacaccttgtaagttgttatacataataacgactctaggtcgtttatctattttggccctttaattagttatatatcccatattatgctcaaagtttgtccgcaaatgttaatggaataatattgattttgcagtcgtcatgaataaatggacattggatgcaggaatctatcgggatatcgtcattgcgtgcacttcgaggcaaaacccttgtagattccctctatatatagctttaataattctttctatgatgtatggtttttattattaaccttttacgtggtcaattatctaaaagaactgttaagtgttcaatgtacatatactattgtgagtattgtcagttcaattgcagttgacacggaataattacatgataattaccatgcatgcaaattaattgaattataggctaatggaattgttccggccggtgggtattctagcacatggataactcaagcagatgaaatatattgatgtgttatacccactggaataattaacgcggcacaaaatgtaactagcctctctgctatgacaaactactgagtttaagaaaaaaaaaaagaggaagaaaaaagagaaagaccggtctactggaaacttgccttagttaatttgggccgttgtttcacacattcgttttctttccgttttcctagtgaagactgggctgtgactgtgagcgatatacttcgacaggtcggactaagttcacattaggtcctcaatttgtcttccagccatttcatgcttgaaccaaaaaaccagatataacccgtcctccaacttacaaaccggtgtaaacaagatcgcttagcagtattatctccagttttagctaattacgtgtctcctatgacttggtcttcgtcccacgtgatattgacataacatttacacaacaatttgatcccaaaaatagaaaggacactacttaaaaaggaattttccgtgagatcaaaaatggttttcacgtgcgggtgggccaactgcacgcacccaagtgtctacaaaaattgctatttttgcgtatgggtgggccaaccgcatgcacccaagtgtctacaaaaatcgctatttttgcgtacttaactctgacgcgatctctttttctctacctctccatatcttcttcgccgtcgtcctccctctcctcttgatccccctcctcccctccctctctgcgaagccgatgacagctgcgatgaaaacgacggcgggcggcggcgccctcccgtccgctgggagggaaggcggcacgcagcggcgcacgagggggaggcggcagacggcggccacgcagtcgtgctgatgcggcccggcgaagcagtggcgccccggcgaggccatgcgacggcgggggtgcggctcgcgcccatgtggcagctatgctttgctagacggcggaggagctcgtcctggcggcggcgtggctcagccgggcggcggcggcgcgcccgtgcggtggtgaggtggccacgtaatggcgcggtggagcgcggcgcggcgaggccgacggccggcgggggtggacggccatgcagtggctgcacgctcccccctttttttttgttctttttttaatggttttctgttgggttagtcccacattgttaattgatgatgggggagcacgaattaaaaggttgttacagttctcatccatcagactgtcttttggattgtgtaggcccaggacctaaacttgtgcctccggttgggtctgtggaccagacgcctacggttggtggaacaggctgcgcactctaacattttcttcctcttctgttgactatcccgggatggtgtgaagccttcctatcatttttcttctttttttcttcattctattccttgtctctcttgtccgagtactgctgccatggcatgggtgttgctgccatcattcgatgtacgatgttcgatttgtaaatttgtggatgattttgttgatgattatgttcatttgatctgtgatatgtcaatttgatgtggggatttaatttgatttaggaatgtcaggagcaacttgacgtgggatgcaagcagcaaataagaataaaaaaagaaaaaaaagtattgttaacaccaaccgaaattaaagataatagtaccaagtggttggtgctaccatctttaatcccggttagtgttatcaaccgaaactaaagatatttcaaccgagactaaggatacccagctttagtcctgaattggatgtctgggttgcatacccaaaactaaaggggttaccaatcagaactaaagatgggttccccactagtgaaaataggtatggtcagtgaaagcaaaaattcaacagtgacatgttacacaaaagagcacccaaatacactaaaaacacatatatttatgtaaaagcaatctggtataaatagaatggttccatgttatttaattaccttggatttatcctaaatatttggtgtattcctgccaccaaaaagtgtgttaccgtacaacaaagtgtgcatggtatgaatatgatgcatattgatgcctaatctaacaataaggaaatgtgaatcctccgtgtcactactacaaaacactagtaggtactagctcatttaaccgtttccacattggataaaaaatatataaaaccagcacatttaagcagctataggtgccgatatggcattaataatataggtgacactttttagaaaaccggtacctatatttatatgatatggcattaataatataggtgacactttttagaaaaccggtacctatatttatattataggtgccgattctttaaaagattgacaactttatgaaactaagctgagctgtcacgggtgagactccttttaaccccaccaaccttatcgtctctcgcactctcccatcgcccccatcccctcctctctcggcctgtcgctgccgcccatccactccagctcacttctgcgtgcatcgtcgccgccgtcccaatcctcacaaccttcaccactgcaccgcccatcatcctctcttcccacttcctccacctttcctgcaactgtggcaactcccatccactctcaccgcatccccctactaactacttaagcttaacatgcaaagatgtcacatcattattcactaacaagatgccacatcatcatccactaattaacaagatgtcacatcatcatccactaacaatcatcacatttaaacatcatgcaaacatgctatatctttatagttttttataatttaagagcttttcaaacacagacatgttaaattattatccaacataattcacataatgtttcaatgtatatcttcatactaaattcccgcagcaatgcgcagggtttcacctagtatttatattataggtgccgattctttaaaagattgacaactttatgaaactgagctgagctgtcacgggtgagactccttttaaccccaccaaccttatcgtctctcgcactctcccatcgcccccatcccctcctctctcggcctgttgctgccgcccatccactccagctcacttctgcgtgcatcgtcgccgccgtcccaatcctcacaaccttcaccactagcaccgcccatcatcctctcttcccacttcctccacctttcctgcagctgtggcaactcccatccactctcaccgcatccaatggatcggcggcgatgacctcagtgtggagatggtgacgacgcacgcatgcatggagatcacgctgctctcgccggtgggaggtgattgggggtggggtcaccggggatgacgcataggcgatcgtgataaacgggaagatggcaaatgtgacggtgctggtggtgaatgatgcggcagcgggaaggttgtgagttcttgatcttttttttattttatttaagatgagttttttatcctacttgtgtagtttttgatgttgtgtagttcttcatcttgctggtgttgctttgttactgatgggaaataataattgaatatttctatctgtgatgtgaatggagattattgatgctaaatcaatatagagttcttgatctgtacatattgtgtatggggattaaaggcggcttgaagaaggtagttggatgcatcggttcattgagccgatgcttctagtctgtctctgttttttttaattgtgggaagtacaaaaggtgttggttctaccaccagcaccaaataaccattggtcattggtactagtagataaatggtgccagttgcaaaaccgatttttttgtcaggtttgcaacccgacaccttttcggtactatgtattagtgtgtgccaatcagtcacaactacacaactatgattcatacttgagtcataagatatttgggcagaacacaataagttaaacaacgatatatttaaccagttctcagtagcaaccgcatgcaaatatatacacacacacatatacacatgcacacgcattattttacacccaaggatatacaagtccatgccaattggaggaaatcaacaaaagcacaaattaactagaaaaaaaaaaactagaacaaaacaatccaatgcacaccgattaagttcttgttttagtttagctctgaatgctaaataaatctgcaagcccctggagggataaagccaccctagcgttgtctcccttgttggcagtcgggtctccgaaaatcaccgatatgatgatgcgcacgacacccccgacaacaatgcggtcttgttccgacgaaatgctcttgagggggccctccttcatcatgagctccttgctcgccagcatgatctggcctccgtgtttcttctcgcggcccgcctgccatctcttcccggcgaggtgcttgacgcaggccacgtgcaggtacacgccctcgccgttgatgttggtgtggtagcaccacagctcacggtccggccctttctccttcttgcacaggctgcacttcctgggtgcccggacatcgaagtcgtggccgtcaagggtgatgggcccctgcaggctcgcgcagcacgggtggaggttcaggttggtgccggagcagtggtagacgaagccgcgcacggagcagtgatagacaaactttacaaacttcaattgtaccaaatttagactccttctaaattcgactccgcatcctatacgcacacaatatctccatcatatgccatatagaatcttcaccaaccacatgcattgatgtttagcctaagcacgccgtatgatatcctgatcattcggacgtcatcttctcccaagttgactcctgattcatcatcggcaacattctctcgaggcattaagatcacctacacatgcatcaaccaagaaaccatattctgagcacaagctatctccaacttgactcattgttagtaaacaacagtattacatacgcatagtatccatctagaagtcataaacataaattatccacggatatccaacaaaacaacccgaaaccaaaactgacacataaattatccactgatatccaacaaaataacccgaaaccgaaactgacacagagtaagccgatcagaccgcgggctggccggtctgaccgcacacatagctccgatctgaccggcagcacctgcctggtctgaccggttatcacctgtcagcaatatctcttgttcacctgcaaattcaatcatctccaaaaccactccaataatcctcaaatattaaaaccaataatctcatatgtcaattgttcatcacagaataagaatcaaacaaactttgatttaatctcccccttgatgagcacattggcaaactcatcaaaaatgttttagtgtttggaaaaataaaaacaaaagtggtaaaaagcatcggagtactcaaaaatccagaagaaaacttctttcgttttcctttacctgaaaaacatgcacttgtatctcttctccccttttgataatgatttcatcaagcatagtaattatgtttattaatattcaagagcttagcattatatatatatatatatatatatatatatatagcacatcatatcatgtgttgcaataaaaagaaaatgaacccatccaatatataacaagcatataccaaagtataatcatgaaccaaagattttacaattaagttcaaatcaccaatcaaaattcatgatttcatacaatttataatgcaacatgtttacaagcacataggttgaaaaataaaccctatacatatatacctattacatttatcactctttatcaaattatttaatcagtactcagtagcaaactgcatgccaatatatatacacacacgaattattttacaccgaaggaaataaaagtccttgccaattccaggaaataaacaaaagtacaaacaaaacaagccaatgcacaccgataggtcttttgttcttttcaaggagagtgatcacacaccagtttagctctgaatgctaaataaatctgccagcccctggagggataaagcgaccctagcgttgtctcccttgtgcagtcgggtctccaaatatcactgagatgatgatgcgcatgacgccaccaacaataatgcggtctttttccgatgaaatgctcttgaggggaccctccatcatgagctcctcgcttgccagcatgatctgccctccatatttcttttcacggcctgcctgccatctccttccggcgaagtgcttgatgcaagctacgtggagatacacaccctcgccattgatgttggagtgatagcaccacagatcgcgttctgggcccttttcctgcatgcaaaggcagcacttccttggtgccccgatgtcgaaggcaagcccgtcgaggatgatcggcccgtgcaggctggcgcagcacgggtggaggtcgaggttggcgccgaagcagtggtagatgaacccgcgcacgggatcgccgcaggcgtcacagaccctgcggcccgagggaggcagaggcttgggacaaaacctgaatatgcggcctttgtacatagggtgctgtagaatggccggcagaggttggagcagaacgtgtgcatgtcaaagttgcaggcgtcgcagcggtatctgggagcgtatcctggctccaagcagccgtcacagcggaacggcatgtcacaagtcgtggtcaccaggcgaagcttgtgctgcgggtggtcgtggtgggtgatcatctctggctctgccacaggttcctcctccggtgctataaaacatgtgtgatgcagttagcactatatgccagtgtatatattcgtaaccaaagcatatatatctcgtagttaattaatccagttaagtatttatcttacgttaatcctagcttgtttatctatttggattatgcggagcaagttgtttgcgtttaaatctaactctatcctaatttcatcactaatatattaatgccattacctcgtgagagataataattgatatttcacccatccgttttcatagccaaaacccattgtcaaagttggataccttctcttctctcccaaaagggatgaaaacttttaaagctaactctaccgtaatgtgatcctcatatattaatgccattacctcatgagacaccctttgagatataacatttcaacaatcagcttgcctatccaaaactctttgttaaagttgcgtaccttctcttttctccaaacaggggtgacttcagttctaccccctccatcaaaaagtcaagacatatttcactttctggttttctaaatgagatggacatatttgtagttttgatgcgctaaattaaattgttgactagaacccaagcagtcatcttaatactcattggttgcatgcatacatatagttccttggttttatcacatggtagatgagttattccccccttggtcttggtgaaaaaaaactgccttagacttttggatggaaggagtactacatatctgcctagcttatttcacatggccactcatcagcaggcttctcatataacttttggctttccaaaaggtcaattaatttatcgatttcaaaaagatgtgctgcacatgatttcaattggaaagcttacaattatctgtacacacgtaattcccaaaatttaggcgtgtatgactagcattaccttttaccccaaacaaagtttgcccaaagtaagggttggaatagataaaaatgacaatgaggtgtattaccttgacctggtgagaacaaaggctccgtcaccgtttgagacctattaagagcaacaattcaacttagatgtacaaataagacagattagtgcaccagttctcaagctgtgtatccgcatatggccaacacatcaattttttttttttactgtgaagcatccctttcttattatgcttaaaattttctagtatagaattttaaataaattttgcgggttcaattttcgttttattttactattcatttaaaatgtccatttcattcactctaacaatttgattgggtcacttaaacccctaaacaatttttagctcatgttacaactgaaactattaactatggttcattatactgcttaatactcttttttccagattcatagtactaagttgtgtctaatacagtactatgtcactatattttgagatggggggtacattttttatcttttttttattttttacaagtcttattttaagctaaaattttttaaagccatagatggcatcattatctaagttccataatattttcaatttttttcatgattgtttgcttgaacatttaaattttgatgtttaagttagttttaggtgcttccaaccttgtaaacaatgatgaaagttctaaagaaaatgctgaggtaagacgtaatgcatctatcagtcctatcaaattcaatgcaaaataccatttatatatataggtcgagagaatctacaaagtaccactgagttcaacacacttcaacaataagccaccgaatttgttgatatccataatatgccatcgcattatccttaacctctatgatttgccatcgtcgcgccgtttgtattgttaattttcttagttatgaccaaaataccctttgaatcatctaaccctagcatggcccagggccccttttttcccagcatcgcatctcccagcgccgcatcaccacccttcccagtgccgccacagcgccacgcctcgccaacgtcgccatccctagcgccgacccgaccttcgggacccagtgccaccatccgtagcacaagtcagcggtggtctagccaccatcgtcacatccgacgggagacggcgcccctgttggagggctgctggtggtgctgccatcgtcatcagcgttgccgtcgcaaacaaggggacacgacgtcgacgcccctgctggagctactgctggtgccgccgccgtcgtcagtgccggcattgcatgcaaggggacatggtggccctggccctgttggagagctactactgtcgtcagtgcaatccctcaaccgctcctcaacagtcacggcaaatcaaagctctaccccctcctgtagccttggagatatttgttcataatcaaaatacttaaaatatgtgctcataattatttataatcatgctgcttaaataaagatatttttcatatgtttagtaccgttgtatgttctctttatagttattataactctcggtaccttgcacggtatggtctcagtgctgctgatcttcactaagggcatacttgtcttttctccaacgcaaactaacaggctgtagatggcgatggtaaatcgtagaggttaaggaaaaggcgatggcatattattgatatcaacaaagtcagtggcatattgttgaagtgtatcgaactcagtggtactgagtagattctcttatcatctatagtgaaatgttttcaatagttttatgatgtaaaatgactgaaaaatagtttacggggttaaatcctccggctaaatagttcgagggagtaaaatgatttttttcttattaattgcaaacttgtacatatatagtttttagtgaagtggtatactcaagagaacgtgatgaggaacatcacctgaccaattcataaagtataggtgttacaagtagaattggattttctctactaagaacaagaagtcaaaatttgagttttgaatctatagtacatacttcatgaaaactcaagaataattatgatattgcatatgtcattatatcactagaaaatacttgtatgtccaatgagttgtgttctaagtgtcattgagtaatagatgagttgttttgagtagcatcctagttgtcaattaggatgtcatcaggttgtcatatagttgtatcgagttgtagatggctttgtagcctttaaatagaggcaatggcctctagtttggaacttacttttgcttaccaccttatcaatagaactagatgttcctattacagaacatggattagatcttctttggagctttggactaagctcttgttgtccgtggattcgggctgccttagggcattatctactacttcctccgtttcaaaatgtaagactttctagcattgaccacattcacatagatattaaatatgtctagattcattaacatctatatgaatgtgggcaatgctagaatgtcttacaatatgaaacggagggagtaccacattaaagtcgttcctacaacattttgtgctatatctacatatcagcacaccgaagaagttcctccgataattgtgctacatcaacgtataatttccatccctaaactcttaaactattcggttagtctagttgccatccctcatctttgaaaccaggtaaactatgtcctcaaactatcaaaaccgaacacctttaatccctcgagctggtttgaggttattttgagtccacatggcaactaaggtgatacaattgatgacaaggacttcgtatgaaaggatcaaattttgatttggatttcgtatgaaatctcaatatccaaccaagtggatttcttggatcgagtcttttgttttgggtggaaatgtatcaatagaagtgaatgatgacatcagacatttcctccaaacaaaaaagggccttcgacaaggtgatcctctttcgccaatgttttttaatattgtagctaatatgctggtcactctaatcaattgagccaaagtagatggacaaatttgtggagtagtccctcatctagtggatgatggcatttccattctacaatacgctgacgataccattcgttttatgaagcatgaccttgagaaggctcgtaacatgaagcttttgctttgtgcttttgagcatctctcaggtctcaagattaacttccataagagtgaattgttctattttggtgatgctcgaaccatggaagaccaatataccaaactctttggttgttcttctggcgaattcccgttatgctactttcctattcattataggaaactaagaaataatgattggaaatgggtagaagaacgctatgagaagagacttggtagctggaaagggaaactactttccacgggaagacgtttaacattgataaactcagtgcttagtagtcttcccctgtatatgatgtttttcttcgcaatatcgagaggtgtactcaagaaactttattgttttcgctctagattctattggcagtgtgatgatcaaaagaaaaagtgtcatttgatgaagtggagtattatgtgccgacccaaagaacaaaggggatttaggaattcatgatttatatatgaaaaacattgcccttcctagcaagtggttatttaagctactcacgatggatggtgtatggcaacaattgattcgtaacaagtacttgggctcaaaacctatgtcacaagtcgagtggaaagctagggactcatacttctaggccagccttatgaaggtcaagcgtgattttctacgttttggcaaattcattatgagagaagcaccactgtgagaacaatacccttgcctatacaataaacaggatactatagcaaatgtgctacaaaactaccctccgaatgtatcttggcgaagggatcttattgagccaaaattagtggcatggaataaccatgttccacgaatggcaaatctagcgcttactcaggaccgagataagttccactagaatttaatccagaatggagagttttcagttaagtcacattatcttgccttggtacattcagatgtgcccaacataaataaagtaatttggaaagtaaaaataccacttaaagtcatgatcttcctaaggtatttacgtcgtgggatagttttgacaagggctaacctggccaagcgcaattggcaaggaagtaagaattgttccttttgtcacacagatgagacaatattacatttgttttatgaatgcagatttgcccgttttgtgtggtgcactatacaagtggctacagggcttttcccgcctcgtggtgtatccaatatgtctggtaattggctacggggaattaggaaagaccttaagtcgcttatcctgttaagggtaaccactatttgttggtcattatggttttgcgggaatgatatgacatctcttctcctttataggttattttttaaactatccacttccttcgtacatgggctatccttcagaagcctgattcacaagatttggttgcagcggcatgtcaacgcttggagtaggtggtcagggagtgttttactcaaggacatggatggcggtctaggctgaagattggtgctccctagattttactactttccttcacttgttacaaactcttttgtgggtgtgtgtgtgttttggctatgtgcatcctagttatgcagaggccgggagttttttttagtatggttctatcagcttgatgtaatcgactgagattaataaaagcttcctttaccaaaaaaaatgatgacatggatgaaacagctaacagttacctctcttctctaactattcctttccctcactcccaaaattccccattgtgagctcaccagcagcgatgggcacacaatccaacatgcatgtgagagtagtactggtgtggcgactcctgcgccctgtcttcttccagcagctgctgaagtggcaccatggctgcctgccaatttgctagtatacaccatcggaatctgtcttcaactgtcccattggtgagactgctgcccacctttcccgctgctatgatcagttcagttcaattttgactcaatattttgtttgctttgcagctacactagatatctattttcatcttattcttcttctgggtctgacattcactttacaagtttgcatcacctttctatgcacgttagcaaaatactggaattctcactgaaagcagtacgtgctggcatacatggccaataaggatgatgaggccaccaagtagatattcagccgattcctgctcagttgtctttcatgttaatcgtggctgctccttcataaaaagaaaaagctctggtgcaggcaccaggatggattgcacgtaggtgtatgctgtggttggccactttgctgacaccagcggagaggctacagacctgcaactgaactcatcattttccaggacctcatgccggctctgacgaatagtggctatgactcatgaacctttttaccaacacccaaatatgaaagggaagggagaaaagatgataagggccctaatgtggggctagctctatgatgtggaggacggctgggcgcgcaaagtcgatgacatgtcacacccaaaaccagccaagggacataacttgtctagtttgcatagttgagggaatagttttacctggtttataaattgagcgacgaaaactagaccaacaagataattgagagacaataactaggctttttcctacacgaaataatagtttcaatctaattatatgctagactcaaacttgtttatacatactaggtattatgatctttctttattctgctttcaaaatgcacatgtcaaattgtcaactgtatgataagagaactgcaaaggccacaatcaacataacagaacaactaagcaaacccacattgagtttgtcttggcgatctttactctaaagccagataaagttatccaaacagacgtcagaataaatattcttgagcagatgggtggtccaagtcagattggagtggtgatccgaggcagtttgttatgtaatctgatggataagttgggtagctgggtaatcgtaggtcgaccaattttagagttatatacaaacactagaaccccatcaaggtacaaaatggctgttacaggcaaaactatggtattgtagtttgagtagaatagtaattcttagcatgtggattcttgttattggagtataactatatggccaaccgatgtaaccctcaggcctcaatatatcatcaaataaattcttaagaggccggagtcaccttacttggctccgagggacatagacataacaaatatcgaatctcatcaacaatggcctgctctcttgcattatcgacttttaagtatttctaaggccctgtttgcttcagcttaagattattgtaatctagattattaaattagattattctaacctagattataataagctaacatagaataagctgcgagttgtttgtttctctgaattattagagacatctaagggtagtgggtctttagccactcaataatctagaaaaagctcctctactcctctagaggagattattggattatactaatctggcttatagattataacaatctagcataataatctacttgtttgtttcagcttactcctaataatccagattataataatcctaagctgaatcaaacagggcctaagtcaattccagggatctatgtgttctgaatttcttgtcagctggtgtcacccaaattacaacaatcccatctaaaaaagaaaaatgtttatgagtcaatagatgaacgcatgtttggctgagttcaaatttttgtgagggtgaaatttttgtttagattaagttgtttcaatgtcaaattttaagtgataattgttcttgagttgaactaatgttggttcatggtaaattgaaaataaacctgtgggagtgcaaagtaattactagagtattagggttaagaaataaagtgaacaacccgcagcggtggaaagtggctgcgatgagcgtggaccattagctctggaattgaccaactgtgcaatagcagttgtatttgatggtggccgttctttagtaatgaaatcaactatatattacctggtatcggtttctttcttccggagttcctcccgtccatgctctagaacattacatacttcatccttgtgctgaaactcctctgtaatttcatcttgtctcagtggcgtacgatcaccatcctccgcactgaaacaggtgtaataatagtcgtatactaactggacgaagtagaacaaaaatttggatggttttttgtgatcgctagttatgaactgatacctgctgacaactaattggtcggatgtatcttcgcctaaaacctctgttggcgtccactgtgattcacccattaggatctcatacagtttagttagggtttcatgtgattttgatgccaagtcttttaaacacgccatatgcacgttaatgtcctggccttcctgactggagcggtaggaccaaaacttgttgcgataaccctccttgccacacatgcaaatgcaacatctgctgcaagccgacaccctgcgaagctccatgacatagccctttacgtttgcagtgcgaacaggcagcctcgcacagcgtgggtggaggtcgaggccacgctcaaagcagtggtagacgaagccgtgcatgaggtcaccacatgcatcacaggccctaccgcattcagaggccagaggctttcggaggaaccgaaaaacggagcctgggaacagagggtgtttcagggtgtgaggcgctgttgcgcagcacatatcatagtacaccttggagttgcattgctcgcacttgaacctgtggccggcaccaagctccttgcagccatcgcactgggtaggccaggacctgacactcttatccagcctcagattttcatgcatatgatccgtgtgaggggtggggacaatcggaagatctgtgccaaagcccgaagaattagcacaccagatgaccatataaagatctaatacagtatcttttctttataatggctaattgaaggttttttcttaaaatcccatataaacagttaacactaagaggtgaaaggtttctcatattaataggtcacaaaatatctaacaaaagctcccacttagtctgaaaatgaaggtgtcttaatgttcaagtttttcgatgcttgtgacctaaagctcagatttgcatatggtatgttcgcttttctcccattcttgcctttactaaataaatgctactccctttgtttcaggttataagacattttgactttggacaaagtcaaactgtttcaagtttgactaagtttgtagaaaaaaataacaacattttcaacccaagacaaatttattataaaaatatattcaattattgatttaatgaaactaatttggtattataaatattactatatttctgtataaacttagtcaaacttgaactagtttgactttgaccaaagtcaaaccatcttataacctggaacggagggagtaccagaataaaatattattttctccatcattcagaatatattgaacattatgtgtcatccaatgtgctaccaatgaagggcaaccaaaccgtttcacctatactcttaatcctcgagcttgtctaaaatgattagtatttagaatcaggtagaagaataactaggcaatcaaatctgtaagtataggataattctagaactgaatatccataaggccataaccatgatgggcaagcacgatattagaacatcatatcccacagccagaaggtgataaagtataagcttggaaggaattagtttctaagctcatgaatattaaactgacacatgaaatcgacacttttagatgaacttacatcagaaaaaggaattttctgttcattcaaatatcaagccttattttctggtgcttacaacgtgggtttgtatatagcacaggattagctttgctaagagaaattaacgacacagctagaaatgttttttaatgacaatgagactattcaacatttgttttttcattgccatacagcacactgtgtggcgtgaggtacatgcagcttttaatttggatccagccactagtattgtccaatttattcggaaattgattagttggtttggactaaaagttaaaataagccggtgtacgttggtgcggccaaccggttattatctattggattacgtcataaggatattgtttttagaaaaagaagtccattttactcccccccccccaaactatttcattggaccactaaacccctaaactatttttcggctcattttaccacctaaactattaaaaatggttcaccttactcctttataacatttctctttttttttcctttttatataagttgtattttaggctgaatttttttagagccatccctgataccattatcaaacttcaaaaaaaaaattaagttttttcttgactgttggcttgaactttaaaatctccacatttaaatcagtcttagctgtttccgacttatgtaaagagtggggaaaaatctaaaaaatgttgagacgtgtaacagcccgccctacaaaaccgtgtttataagttggttccaaccttgctacactaccgcagttgatactaaacatgcgcacacagctctcatgtaccacacaggcctaatcctgattggaccggaatgtcacaagacatatgttgtaatgcatctatcgttctaccaaaatttcaatgcaaaatatgacttatatagagagaaacgaaaaggaacaatgggcctcaacttttcgcttatgcttatacttatcagccaaaatttgaatttttaatcttaaatttggagctaattttgaggttttttcatcaaagtttatttttcagcctttgcttttagatcgcttagaacacgtatataaaagttttatttacaaataatttttcgtttgtaaatatgccgtttcacttattccgcgaataagcgaaacgatggctcctaatatcgttagggagtaaagtgaaccatttttaatatttccaggtgtaaaatgagccaaaacaaaattagggggttaaatggtccaatgaaatagttcggacagtaaaatgtacttatttttcttctataaaaggaattatcctaatcttacatctttatgggctccaactggctatggtttggtctcttcagcgtgaggagttgcatgatctggtatttgatgcaggcaacaccttggagcgtagtcacagaacttttcaaccatattggatggtggtttaataacagctagcctatgtatcttttttttttttagttaactagcctgtcgaatacttcttttatcattttaatgaactttcacacacgcttgtaataatgtggctgtgtacaccttctggttgctgcttccattatctttgcaacagtaccatctctacaatgtcactgatctgatcattgggcctcttttatataataaaatcagtatgatgtgtacaaaagaattacgtagtaggatatgggatatccactgctgttgatcgacctaactaaagacattatactacagcaggtagtaggatgttttgattggtaaaacaaaaatgaaatggatgattgcaggtcaaatttgcatgtccaaatggcatactaaaatagatatgtggttcaaatgattaccctagttaaattctcaaataaaatattttgaatagcgaaaaaatcgaccatgtgcatctcgtccaaattccaatgttaaggcaaggagtgtatcttgcgcaaataaacacagaaaagagggcatgtttattgttacagtagggtatgtaaattcgtaccttttataaccctgttgatgaaccgtatgattacacttgatattcttgtattttgcctgatggcattgttcagtacagaggctatagccattctgttagcttcactagtaccggcaatgcaaatttttgcgctgaccttgacacctgacaagtgcttgaagcccacattttcaaggttgtattgctccactgtgctaccattgaattccatctttaacctttggaggttgggcatagctccttcatcaaatctcagacttgatacagtactacacttgaatttgaagtacttcaaaacatggaatcctgacttgtcaaatatgataggttctgcaggggttgtccggacatacagtgagaaaacagtgagggcattcagcattgagagagtctcaatgtctttcctcaggagttccatgactgctactttcaaaatacagagtttctcaatagttatgatccaactgggaagtctatggaagacgcaaacacgtggaaacaactcaagcctctgcagaaggctacaaggggggggaactttatctaagaaatccaagaaaatggcaatgcttgaattttcgttatcattagaatcttcagagaagcagacaggaacaactgttagagatttgaggctcttaagtatcccaataattgaacccaacagtttcatgttgtgcttaatatggtcagaagtggctatctgaggacatgcgagttgaagatcctgcaaattggtcagttcttcaatactctgtacactccctgcgtcaacaaagtaccctagattgggtggaagtctgaagtgcagcaacggcggaagatgaacaacttctgatctcaaaaaggtcaccattgcaccaatatgcagagtcctgagatacttcagtccttggagctctgatggtaagtctatgcaaacattaccttcaatctgcaaataagtcagtagaaacagttcacgaattctagtgaggtcaagaaattcgccatgtttaccatgaaggaatagaactcgaagaagatgaaactccgaaatggaaggcccgcacttccaaaatccagaaaacacaagtgatcgtagttgtgacaatctaatacatgctggtgcctttgcatcttttgaatatccgaaatggagagagagtcgtcgaactttgtctgctagtctataccagactgagaatgatcaattgcagtgacaaaattctcttccattgccttgcgtttgataaagttaagaaccatgtcatgcactgtgcaagatacaacctcatcactacagctgatatgttcagtttcaagtattcccctatggacaagctcataaaaatgattccttgcagcttcatccaaacttttcccttccgtcgcacttacaaaatcttcagctacccattgcttaaccagatcgtccggattgattatgtgatcctctttatatatactcagatacagcatgcatgctttcaaatgatgaggaagattgttgaagctattgttcagtagttgtgccattccttcggaagtaggttgtatcctcaaatctggaatcaacgacttctgtacatagatccattcatctggtttgtctggccgactcaataaaagactggctgcagcgatagttgctagtggcaaaccgccacattttcgtgctatctcatatgaaacttcattgagttcttcaggacatttgtctttatcaccaaaaactctactaacaagtaaatctcttgagaaatcgtcattaagcggttccatcttcaaaatatgcttcttgatcacgtgagatgcattatgttgagacttgtaaaaactccatgcctgagccacatcgttaatttctgttgttactactattctactacagcaatcctcttgtaaagcatgtctaacaacattccatgttgatacagtccacacattatcaagtacaatgaggcacctgccaagtagcgcatggtgtttatgttatatgaattcaactagaagatattgacaggttctccctgagtagaaatatgattgtaacatatagagaagaaacgccgttggtgtagaaataaataattgtacttcaaactctcaatttttttcatctatcccattaggctcaattgcaaaggggcatttaactatttgccacttttagaaatgcaaatttctaccgtttcttcgctgaatttcggaaaattttacctttgattacaggaagccaaggcttgaccttgccgccgccaagggcccgacctcgacgtgctcctccagtaaccgccaccgggcgtgctcgttctcgtcgcactttcccagccacagcccgaccccgacgtcgcaggactcgatctcaccgccctccccacgccgccgccgccggggggtccaagctcgcgacgctacccagccgctgccgtccgtcccgccgagacgaagcccgcagccccgcaccaccggccgctgctgcctccgcgtgttgtgaagtgacagggagagagcaacatgattcgcggccgcgggcggggagatgtcggcggggaacacgccggttggggccccccactccccccatgcggccggctcggcttcttcgccaccggacttttccgggcggcggatggctcctcggatgacttcacttggcggaaggcctcgtcgcctcctccccctttggcgttagggatgcctaccgaggcctcctcctcctcaggctctttcccctcttctctcccttcctcctctctctaccaccgaacctagctgctccggccgccggcgacgatgactgcggcggtgtcgtaccagtcggcggggaggggaggggagggacgccttcgcggcgtcgggtccgccaccacgcggcgcgggtgggccgcggcggattgctccggcccatcgaagcacgccggtcgacgggtgcataccgctgtcggcccgtgcgggaggcggcggcgtggaggcttatgggaggcggagcgactgcgaggccggaggggagcatggtgcacggtggattggtggtgtgtgacgccccgcaataattacggaaaaaaacgaaatttcttccaatcggtcgcttgggggaaggtagccgaaatcaggcgctccctcgccccaagatgcacgcccctctaggcctcactcacgtgtcccctgctcccaatcatttgtccacacacaactccatgcaacaaatcacccatatattttagaaactatctgttaagaaaattcgttttatttttttttcgaaaaaaaaaagtttcacctagtttactcacaatgtttcactatgtatagatctaatgttgcaatgaactgaaacattattttgtaacagatcaccaacatattttcaaaaccctctattatgagaattcgtttcacttttttgttccaccaaaaataatccagtgtacttataatgttttactatgtatagatctaacattgcagtgaactgaaatattctttcgctatttgctgaaacattgtttttatataaggtgaaacaacgcccgatttaaacgattgaacattttcgatctacttagtgaaataattccgatatacttggtgtaacatcgtgcaacatttaaaatataattcaataataagctaaaaaatttcgtcggaatatatccatgtgtggtcttgttttgaagatttaattgcaacaaatttaatagtataatcagatcataatttcgataaataatttaagataaaaaatagtttaaaatggtttttcacacatgcgtggcgctaacatcatgctgacgtcagcccccgatttttggacgcctggatcgggcgcccgattctaagtctcctccgacaaaaaaagagagagaaaaagcacaagcaataagcatgttggtctagaaaaaactaagggacaattgctcatttgaccttgttttaaagccaaactactaatctgatactacattttttagtttgctaatttgaccccgctttttaaaatcgagcatgccgtttgaccctatttacactatgccattagggtttcaaaaaagaaaagaaaaagaatcattttactattcaaagtgaccaaaataccctcatacatttcacttcaagtcttcaaccaatctctcattcacatctcggcggcagcggcacgaggaaggaggaggcgacggcgctggcgccgacgtggggagcgagcaggaggcagcggcggtgcaaggaggaggcgcggtgacggcgacggcgccggcgtgcggagggaggcgatgggcagatcagacggcagcgcaaggaggaggcgcggtgacggcgacggcgccggcgtgcggagggaggcgatgggcagatcagacggcgacggcgacggtgcacggagggagcgacgacaatgaggacacatggagggagtgatggcggcgagatgtggagggagcggcggctgtggctggatgcgccggtgccagcgcttgtttgatttttgtgatcttgtttgaatgttattgttggatgatgttcttagcagggatttgtttgcatgttgatatggatttgaatcgatgctggcatgttgttccggaaccatttgttgtggtgatctaatttgcgttctcaattgtttttttttggctaaaattcaaatctaattcaaattcgcacaagacatatcaattccaagtgaaatttattagaaattgcatcatgtacaccaaagcgtataaaaaaattagggtcaaatgagtaaggatataaaggtatttcgacctcaaattaacactgtcaagttggtttcacgaaatggggtcatgtctgatgtcgatagttaaaaagcagggtcaaaaaagtaggttaaaaaaaagcaaagttaaaaaaataaggtcaaattggttggtagtttgctttcaaaatagggtcaaatatacgattgccccaaaaactaaatactcttgacaatgtatgtttggctatgtacttgtagagaccgagtttttaatacatcttctaaaaaaaatattagtcagataaaattctccacaacattttttttttttggaaacacaagaggaggttatgatctagctgtttgtgttgaaggttatgatctcattacccatcttactaaatgcactttccaatctttaactaatttctgaaaattttctacttgtccacattaaatcttctgcaaatttgatcactgccgttgcaaagaatgttgggttggaaaataccactacaagaagatcagctacaaaataccatcacagggaaatttgagttggaaaatgccggtaccattactgtttcatccaaaactgcaattaatacctttttaggagagagagttttgaaaattccaacactacccttttttttccactcagttgtaatactcaacattccaagtcgcgtttggatgcatttaacaaatctcgcatttaatttatggtggaaatgtttagaaaatcagctaatgcaaaaattaagaaagagtaaattttacaaaattaatgtactttgatcaatatatcacaatactatatatttaagaaagtgtattacaaattaaactacagatttaaaaccatatttttttacaaaactatagattgaaagtatcattagaaaactacaattttataaatgagcatatataacatcagtttaacatcagatttaaatatatatatagtataacatcagttttatcagaaagctacaacttttgtaacatcaacagtgctatagatataaactctaaaatttgtagttatttgataatttcatttctaaatgcatagttttgtgatacaatgctttaaatatgtagttatgtgataaatttcatgttaaatctgtagttttatgatacacattttaaatttatagttttgtgatagtttagccaaaatatctgtagttttataaaatttagtctttaagaaataagcaataaaaacattttcaaggaaatagtacagttcataatttttaaataaatatattatttttttactgcatccctatcaacaataattgatgttcttgaatacatcaagtcaatgtgttttgtgtttaaacttttactatcaatttctattaaaatatttcgatttaattttaaaaattgatataggtatatttgtctttgaaaacaaaaaggagtttcaaaatattagaacgtccttgctatatttttataggttttatactagcaatcaatattgatcatttcggtaatcttgttgctttctaaaatgtcacttatttgttaccgaagggagtacgtataaggcaagcagtctgtataaaatattatgaaattgagagccataagtatagcaagcacaggaaacaaagaagaaaaaaaagcagggggcaaattagtcattttcttccctgggtggaaatgatcacggtaatggtatttttcaactcaaattctctttgtgatggactgatggtatatattcatcagcttaggttctatgtatatgtgatagtattttgcaacttgagtttttcctctaattctgttaattaattcttttactccaaattttcccatgataacacgtgggccgggtaaggtagcaagtagatactccagtaattattgtgctagcttgttagtctcaacattgatttttcatacacgtacaggtgctaattaggaagcatatataaggactatagcagtgtttagatcccttcaaacttctaaaaattctgtcacatcaaatatttagacacatgcataaagcattaaatgtagataaaaaaaatcaattgcacagtttgcatgtaaattgcgagacaaatcttttgaccctaattacgccatgatttgataatgtgatgctacagtaaacatttactaatgatggattaattaggcttaacaattaaatttgtttcacagtttaccgacagaatctgtaatttgttttgttattagtatacgtttaatgcacgggactctaattatgggtgttcctctgtaatcaacatagctagcaccccttgctgctatgagtccatggtctcgccgccattctctttctgcgtgcctatgttacattattgacatgattgttacattggtggtcactgcaggagaaacaatctttaatactagttaaaaccccctttcgtaccggctgtagcaaccgagaccagtaaatcgagactatctttagtaccggtagaaagaacgagtacaaaagatgcatactaagtcaaaaaaaaaaagtgtgggatgtgagattcgaactcaagatctatcaactcagtcctcacacacgttaccattccacctactactatacacatctgacttgaatgtagatgctttctttttgaactgatcccagagacatcgttagtaccggttggtattaccaaccgaccggtactaaaaatatctttagtatgagttggtattaccaactggtgctaaaattgcatcgttattaccggttggtaacaccaaccgagactaatgctactatagcattagtctcggttggtgttaccaatcagtactaaagatatatttttattatagggtggtaacaccaaccggaattaaacatagttttaggaacttcaacttttagaaccggtactaaagcatatttagtaccggttcttgatctagtcaggatatttgtgttttggggtttaggataaaaaatcgtttctctagtagtgggtgcccccatttttatttaaagggttaccgggttatggagtctgatgctaaccccaccctctagctaccatatattacaactttaagtttaactacaacctattaggacaagtatattcggcacctattttaacatgctccacctcactgaatgtaacgccacccacaagtagtagaattatcatgtggattcaccaatccactagacttggggttttcttcttgcagattcctcgtgagatggttgatgagcctatgccagaatcaccgctaccaaaagcaatagctatcccaattactgtttccttctggtctacacctgtaatagtacaccctcacaacttgtaaaggtacgacaacaccttctcttcaattatcacaatcctactatccccgtgaaagggtcaataacctagtggttacaagagtctcagtagcacataaggttctgggtttgactctccatgggagcaaattttccatgatttaacggcttgtgctttcagtggtaggcgacgtacccgtcgacagcgaggcgcctgtggtgacttcgtcaatctcaaggatttgcctgcgcagtcttcgaagatgctcataggggtagagtttacgtgcctccattgtgagtgtctgcgttgtactgtgtaatttttttaaaaaaatcctactgtccctcatggtctccgtggatccgaaaggtacggcatctaaaaatatctcagctataatcatacataagagattcggtttgacatggtattaaatacaagagattctgcgtgacatgggttagatatgtgtgattctgtgggacatggattatgtatcagagattcggtttgccaagcaaccaactatgtactgacccggtctaaggttctccactatttatacccttctggtcgatcgtctttctagcaccattcattcactaaaaaacactttcaacccccacttcaccacttcagaatctcagataccgagcaaaaaagatctagatcaagttagtaccaaaatttagtgttgtatcgatcgatgattgaggcagcagagaccatggagaaagcggtgataactgccttcgtgaacactgtcatgccgccgctgtttaaggtgctgtcaggcagttgtaagatggtcatgaacgtgatcgatgatagcgactcaatgagacgtaaactagttctgctcgcagcttccatggacgacgacctccggcggacgaagaaccccacggccgccgccaaggtgttcggcgaccagctgcgcgagctgacgcacgacatggaggactgcattgagcgcttcctccaccgcgtgtcctgcgccgagggagcgtcgcgggcgcgccggctggggcgcttcctgctcaccatctgcacacgctaccggttcggggacaagatcaaggcgcttaacaggcgcctcgaggagctgaccaatgaacgcctgtgccagttcgtctacgacaagcccccgccgccgccgccactggcgccggcggcggcacaacaacgcgaacatgttcaactcaaccccgtgggcgtcgagggagccaagggggacatcctcgcgatgctggaggaaagtccggaggagctgagggttatcgccatcgtgggttttggcggctccggcaagacgaccctcgctaaggcagtgttccgctcaactgatgatgatagaatccgggtgtttcgttcctgccgtgcatgggttgatcgagccaaggagaaaaatgcgggggagattttcagatcattactccagcaatttggctatcggggtcagggattattggtcgatgacgagcaatatctccaagcccagctcatggactacctcaggggtagaaggtgagagaatttctgtagctgtttcccagttgcacgcattacccatccacacctttacggtcattcagaatgtattggaactttacgtactacattgagtactttattgaggatcgtaaaaccactcattcgctgaaccttgcgcccggccgttggttagagcaagtttaataatatagtcaactactagctctaattcatctatagccaatctaatagctcattcatataatagttacatactacactatcaataactggtcccacctatcataaacacattgcgtcttggagtccgtaatacagctggctacaaatttgtagcccactgctcttctctctcctcgtttatctccttaaaatatatttgcagttggcttatagcctgctattgtacctgctcttacccgaaatttgtcagaaatttgtcagatacttgattgttattgatgacattgggaatgggcaatggaattctataaaatcagctttcgaagaaaatagtagaaacaacggaagcaggataatagttaccacaaccattaagtcggaagcgaatacctgctgtggcaatggcaaaggtttcatataccaaatgcaaaatcttgaagatcaatactgcaagacaatagctcttggggaggcaccttcacctgagttgcagatgggctcggaagaactacttaagaaatgtgatggccatccactttcccttgtttgtgtggccaattatttgggaggtttaaatgagcctactgggcagcgctgtcgcgaattgtgtcgctacctaggttcaaaaatacatgacaatggtaactttgaaagactcaaaggcgtgatcatggataattacacaagtctttcaaaccacgttgtcagggcctgcttgctatatttgagcatatttccaaacgatgttccgctcgagaagaaagtgataatcaggcgttggatagctgaaggattcgcaaggagcgaagatgtggacattgatgaccagactattgcacgttggaattttgagacgtttgtagactgggacatctttcatcctatcattgacacaagcaataatggcgatgtcaagatgtgcaagactcgcagtatcgtgcacgagtatatgttgtacaaggcgtcgagacttgagaggttcatcatgtcctttcctgactggcgaaggaaagttcgtcatctctgtatcgatcataggacacctcacaagcgcagaactacaacagatatggatttgtcatgcgtccggtctttgacgatcttcgggacggcaggtgacaccatttgcgagtttcacaggtacaaggttttgagagtcctggatctcgaagaatgcaatgatgtcaagaacaagcacctgaaaaatatacacaagttatggaatctgtgtgaaaccatgtgtggttatagttcttttgtgatgggaaattgacaagtaccggaagtgcaagaagtgtgtgcgtggactaacattggtcaggttgcgacatctgtgccaagacaacggttgtttggttcatgtgggtgcaggtgatcggagtcgatcttggtcaacggcggatcgggactagactcagggaggagttgaggtccaaagcgatcaaggatgccaggtgacaagattggacacaaggttgcacacagtggacgaacaccgtgtgaggaggtctttgcaacgggcttcagaaggtcaagtgtgcaagcatcggattcgcgaagaaatcagaagggactgtgcaagtgcattgctgctacagtaaatggacttactgtaggtagcatacttgcatgtacacgtaatgtacttgtgcaaggaggagcttgcagaagctgtgcatgtgtgctgtgattggttggcagggaggccaagccaatccagccgttccacgtggcccaaggagatcattgggtcggttggcatcaagtccaatccggcctgtccagctcgggagctcggtcggcccaagcacgttgctgactcaagatggtgaaggccaggccgagcagaccctagacatgacgacggcccagctcggctcggcaaatgcacaggcgtgtgcatgcgcgcgcggaggcgggagatcgtacggcacctggaggcgtggcggccttctgttcgtcaaggaagcggagactcgtgggaccgggtcccccgcggtttttcacatggcgcgcgcgggaacgtggttttcgcgagcgcgcgcagaagcggctcggcgggaggaacggcgacatggcggcttctgacttgtggcgcgcaggtgcgagaggagcgggcgcgggctctctgggacgcgtggcgcggatgcattggcttggaggagcacgacgcggatcggtgtacactgattggcttggagtggaatcacgcggatcgcacgagggcacgcgacgtgaagagctcggatcaacaacgtggcgactatccaggaggtttccttcggatctaaggaacaatggacatccaggattttatcaaggctagggtttcgccccacgggtatttgagacaatgtcttaggggtcttaggctataaatagagggatggatgcaagggtggaggttgctccttttgtaatccttttgagatgctcggtgagagagtttccgtgtgagtttggagtgtgtttgcccgagaggcttttgtattaagattagtttggagtgtgtttgtccgagagattttaagtttgtgttattgttcctctgaaggtgtttgtttgctcctagttgagcggttattttgcatcacctatgaatgaaatgatttgaaggatttcgtttttgccttgtccatttaaattccgcaatttaaattccgcttgaaatttgaactttgcgatgatgagttttgctctctcctcctaacctctcttctagttttcgggaattccttttctcttcctcttctagtttcgggaattccttctctcttctttttctctcttcttttctagatccggcttctctaatagccgcggttctagtaaggattttgagaaatccggcttgatgagtattttcgggggaaagatttgaattgctatattcaccccccctctatagccgttcttggtctttcaattagtatcagagcccggttaagttcgttgtaacctaaccgtggcaacgaacgcagctatggaggaaaaatactctgcgaaaccatttgttttcgatggacacaattttgtcatttggaaggcacgaatggaggcctacctccagtcgcaagggcataatgtgtggaataaggttaaatcaccttacactatgcccgatgatgctgacatcacgcctgcaaatgtggctcaagttgattttaattatcgtgcaagaaatgcaatcattggtggaatttcttctggtgaatttaatcgtgttcaacaccaccagtccgctcatgacatgtggactgctctgtgcaatttccatgagggaaacaatgatattcaattggttcgtcagaatcaatttcataaagaatatcaaagatttgagatgcacccaggagagtccattgattcttatttcaagcgttttgaagaaattgtttcgaagttgagatctgttgaaaaagaattttctgataatgataatgctcgccatcttttgaattgtcttgattatggtgtttgggaaatgaaagttacttccatcacagagagtgcacctttgagtgaccttaccatggacaagctttactcaaagctaaaaacccatgagatggatgtcttccatcggaaaggcctcaaacactcgatggctttggtagctgatccctctggtagtacttcttctaatgacttagcttttgtgtgtggtggcttctctcttgccgctttacactcagtcactgaggagcaattagagaagatccctgaagatgatcttgctctttttactagaaaattctcaagagcttacaaaaatgtgagagatagaaaaggaggaaaaaccaatgaaccatttgtgtgttttgagtgtggagagcctaaccacataagagtgaattgtcccaagttgaagaagaagagtgacaagacaaccaagaagctcgagggacaagggcgaaaggggaagaaggatttgataaagaaggcgatccacaaggtcttggcggctcttgaggaggtgcagcttagcgacatcgactccgacgacgatgatcaagaaaagggggacaaggacttctccgggatgtactgtctcgccaacaacgaggacttcatcaacctgtgtctcatggcacttgaggataaggatgactcatcggagcatcatgaggtatgtcttgatgatatcccttccttggatggttctctttgtgatgattcttgctcagataatgactctgttgatgatgaactaagcaaagaaagaatgacacacttgatgattgaaattagtgacaagtataggtcttctaagtataaaattgagaaactaaaatatgaaaatgatggaatggcgctagaaattgctaggcttcgatccatgattcctgaggaggatacctgttctacttgtgcttcatatctttctgaaattaatctcctcaaggataagttgaaatcatgtgctttaggagctgggaatccttatagtgctagtgctgcttgctctacttgctatga

SEQ ID NO: 9239 - DNA, 70223 bp, Oryza sativa
ttcatctagatgaaactcatttcacctcttcattattattttttttgtcatatcatcaaaaatgctgacatgatagtcaattcaatgagacgtaggcgtgtatttgtgtttttgagtttggtgttgtaagatcttggtggagggtttcacccaccactttctttctcttttagtggaatgatatgtagatctcttgcgtattcgagaaaataatataatatttttttatttatcgcacataaagattgtgagcaattaaactttttgttttttcttattaaaaaaaacatttttgtgttttcctgccgatggtgttgctggcattgaagtttcttcactccgttgtaggtaacatgttcttattcttattcttcctaatatttcctccgtcccaaattataaggcctatatttttttatatagtcttcagtgatatactttgaccattaatttattccatattttgtttccaacaaatatgaaattagcatcatatgaaagtactttagaatatgaaactaatgatatagcatgcataacacttacagatatatagatatgattggtatgattattagtcaaaagttatcaagtttattcttaaaaaaagttatcaagtttaacttttcagaaaaaagaggacatcctataaattggaacggaaggagtatgttggctccactttccttatgaatgttaacaattgtagttagttgcatggggtgaggattgtgcataaactttatgggaactttcttcttggtaaatctctcaatctcttataaagaaacatgcgcatggatttggtctctgttgttctcacttctcagtatgttcgcttttgtgatcatatcatgcacaaattatcctgctttccagttagttgaagccacttttttaacacttcacacattacttagatgaacagtgttagtagttcgatattgggaagttgttaatgtgaactgttcttcagaagtacatctctatatatgttatcacttacggtggttgttgatgttaactggacctcgatgcatacatgctattgagctgcttctttatactttttccttgagcagaaagctatacgtgttttttctgtgattctgttcttgagaatatagtaaaggaacttctttttcaaagactgattaaaaaaacatgacctttgaatcaagcttgtgacctctcagataacaaactttttctgccacctagttatgagtataatatggcttacatttacgcaggcgaaaaatggaaacgagaaaagaaaaggcacaatgagaaacaacggctgatgtatctattatgttctgcccttctttcactgctgcaaaatcgattttcccaaacggtaaaaaatcaattttcgcatgtggttggtcgaccagcatgtgtgaaaagatccgtgaaaatcatcattttctcatacaggtagcgcaaccacatgtaaaaacgggattttcgcatgcggtcaccttagccaaccgcatgcgaaaatattttcggcgaaaaaaaataaaaattcaaaaaaaaaagccgaaaccctagctggccaccagccacgccagatgacctcatttttgcatgtgaaaatcgattttttcatgcgagccagcctcttaaaaaaccgtatacgaaaatatcctctcgatttttcaggtccatttataatctacggagggtctcgtacaaacatttttaatagtgtttgttgtgacgaaatgtcttaatcacatggatggcggggtagctggctgttgcagtagcattaactgccaactgtgcgctgctaatctgatttgatccaaattatatggttattaatcaaatcgtgcccggagaaagcttctataagatatgctcaaacttgtatattttggtgcttctgatgctgcgacagtgtgatgctctcgcacatcgattggtggaacagagtatcccggtcaaagccattagccaccatcccgacgtcttcctccatctcgcatatctctgcaatggcagggaatgcgtcagtgatgcggaggctctacctctctttctacaactggattgtcttcatcggatggtcagttctactgcctgctgtttgttgacttgtgtatgaatatcgatctcacttctagcatctttctttgctggccaattcttggattgtacacagggtgttgttttgatcgaggatctttgatttggatcatgcagggttcaggtgtcgtggtccatgatattggcattgttggagaacggatatgaggccgtctatgctgccgtagagcagcatctgctgttcgcgcagactgctgccatcatggaggtttgtttttttttttctcttgttgcctttgttgtagtaaaactgtaaatttgaatgcagctgtacaacttttttttgtttcattgctcatggagattgagaggcgctaaactttttatgttttgctgtttgcctggtgatggtgatgctggtagtgcagattcttcactccattgtaggtgagatatcctctttctttataaagaaaataataagtaataagggttggtgaggtctccagtgtcttctactattccacaaatcactggaaggttgttcatgatctggggcatcttgtggagcttccctgaggtaatatcaggaccttactccaagttataagaaggtttatatcttaaaaaacaagttttggattagaaagcacttcttagaatgatgaaacatagatgttaggtaatgttgcagctattagaacatatcccatactttcatttatgatcaaaatgactctaagtaggcattggacaaaccgaagctacagaaattgcttaagtaatgaagcggatgcaattacatcatggagaaggacaaaatagtgttcttttcctagattcctatttcatgtatttaacttctaatcaagtaattgttttatttataaacaatatcggtgaatcactgtccacatgttttgcagacacacactcatatttttgttacctccttgctcataagctggtgcatcactgaggtatatgttacttcctaaaacttctcaccaaattactcacttggaagatcatggatttcggatgcaattttattatagttctgcttcttgaaatgacagtagttgttgaagttcctgaaagaaaatcccaagctttgaaagttcctgtgttgagcttagttgaacaaatattatgaaattttcttcacttcagagcatgactttgtagacaaaaaattactaattccttgcaggttaccagatattgtttctatggcatgaaggagtcatttggatttacaccttcctggctcttatggcttaggttggctctagtcgtaaacaaatcataatatgtagcataaacttcagcgaattctcttaaaaatatgctgctgttacttccatactaattactttgcaggtacagcaccttcatagtatgccttcctgttggtacggttagtgaggttggcctaatctacattgttcttcctttcatgaaggtaacttaaataacttagaaaggaagatctctgcctccatttcataacaaatcttgtttaaatgctcttcttttgcatgagcaatatcaggcatctgggaaatactgccttaggatgcccaacaaatggaatttctccttcaactacttctatgcctctatctttttcatggttttgtatgccccaggtagtgtttccatgggattgtacttcatttagtaattgatgctacaacctagtactccctcggtcctttaatatatgacgccgttgatttttgttacaagttttgatcattcgttttattcaaaaattttgtgtaaatcttaaaaatataaataatgcttaaatttcatttagtgttaaatcaagaaaaatatttacttaaattttttgaataagacaaatgaccaaatataatgtaaaaagtcaatgacgtcatatattaaaggacggagggagtattttttttaaggtagttgtaggaatttctgaaatgaaaacaattaggatttgataacacactgcgttgttgtttcatttggatgagtgcagtatatccacgcttgtttcgctacttgatcgcccagcggaagaaggccttggcaaaagcaaaaaccacataactatactcaagagctatctactctgatttctgctcgcggctacagctcaggttgctaccgtttcttgagcaaataagtaaaagtgtattagaatggaaatgccgaaatacagactatcttttcccttggtaaataaaaatgtacacgagtaccattttcatgatttgctaatggtgtgtcctaccaaagatcggcttttccttctgtaaataaaattgtactccatatctgtgcccaaaaatgatgtgtagattttctgctttttaaggatgaagaaggtaactatcaccatttgattcatactagatgggctggcgcggctcacgccgcgctgcacttgtggtatcattgaacacaatagacataaaacagactattggtaatgacaataaaaacacaagaacatttaaataagttcacatgctaacaaagtcttttgtctgtttcaaattacttgttgttttaactttttctaaataaaacacttgtatattctatcatcaattcctaaaaatcaacttaattaaaaatcgtaagatctatgttttagattcaccatgaacaatacttttacaatatataattcacatcttacttaaattaaacaaggtttttaaaaaattaatgatcaaagcgtttgacttagttaacagagggagtagctaagttaccgcagttataggctttatcaagcctgtagaaatcaagaaaccgctcagcaaaataaccaggtttgagaaaaaaaatgctgaattcaatttttaggcaaaatctgtaagaattcgccccatgtttttgtcaataatagagtgaaaccatgattactggaagagcaaaatcacttacgaagttatgattccctgcagacaccacatattacaaatgtagatgatgcttgtccgtctgtattcccattgcccaaacccctcaagttaaatcagagacaacggaaaagataagaagatacaaaacgacacttcttacatgacacataaaacaaaaaaaaaagaaaagaggaataaacaccacacacatctacaaaccatctctgaatcttgttcagttttctgctcctaataacagctacagtgaagagtgacatgatccatgccccctcttctgccaaaatcacaacagccttgcaggcaatgccggtgacgggcggcgttggtcaggcgaagcggttgcgacggcaggcgacggtggcgaggaggctagcgatgccctttggttcacatgtcaatgctctctatggatgctgcactcgaactcgatcacccggtgctcttcatttgctacatcattttcttcaacaaaatcaggacatatcacagatatctctttattttttctagggtaatatcacagatatatcaggggtacaccgtatacactcgtgggtatctaaaaatttatagacatgcagtaaaaaaaaataccacgtacatatcgtcagaaaggccatatacgagcaaaattcgttcagatgggctgaagggaagagtttggcgtttcagtaaaaaaaaacaattgattgattctcatataaccatcctgcaaataatacttgaaaagattgctactcttatatggcaaaaacaaaatcaacacaagaaaacatttgagttgccctgtcgaaccagaaattttcaaaaacctgctactccatcaaatgtttctgacaaaacttactaatatggtataaatgacggagggaatgagaagcaacaagcacaccaacattttttcagaacaacatagtggaaatctagagccccaaaattcctaggatggattcattatgaatagagcagcacatttttagttgctttgttgaacagagcaggatatcaaagctcctgaacggaaaactcactaaaaagattatcatggacagatttgtgctactttactgcataagaagactcaagtggtcaagaacaagaatatgactgaacacaaatttatagaacttgcaggttgcagcaaatagcaaaaaggcggttcaaacctccctaaataattcagagcttcgagtccgaataacagaagctcgatggggctcatcacccacgcatagatcagagcttggaccacgggatgcagatcgcttttgagctgctgtgtgctagattcagttcgggtcaggggcgccgagatccattgctccatccatccgccatcccatgaaaaaaaatgcaaaaggagtaaatcggtcactcccgatgtgtacctgctcctggccgcacaaactttgcagctcgagatctaggggcaagcagacaggattcgaaacaacaaattccacaaaacaaaatgaaaaccttcgaatgggaaacaaaaatggaaatgaaacaaaatcatgagccaatcgaacagagtgaaaaccttcgaatgtggcatgttgaccaagcgcttcggctgactcgaaatgattttgttgaatcgaatagcaaatgatcaatggtgtttgggtaggttacctttgcgggtgcgcttgaggagtcggtgccacgggcgaggagttcttggctgcagatggtgaggaagttgttgtcgtcgtcgtcgtcgccgaagctgttgctcgtgttgctgccgttgccacggtggcggtggtgatgctgctgcttctgggcgttgtgtttgtagtgttggtgatggttgatggcagcgatggcgttcttctcgacggggatcacagcggccacgttccacacgtccctgaacgccctcgccttgaccgtcgccacgcctctcaatgctgcgttcagatatcaagaacaagatcaatcacggtgcctcgatggagatgatgtgaatgggtggaacagcgagggcgaaccgttgccccattggcagcggcggcggtgatggtgacgatgtcgccgggaggcggacgctgacagtgaaggcgacggcggcggtgaggtggtcgcgctcggcaccgagggactcggcggcctcgacgcactgggcggggaacagcttcgccgcggacggaatggtcatgttggtgcgcgcagtgcggtcgtccctgccactgctggaggacgcggtggtggtggccaccgctgccaccgacacggcggcgtggacctgcgcgttgtgcgcacgcgtctcctcccgtcttcttctcattccctccttcagccacctccccaccgtcttcccaccgctgccgccgccgcatcgatacggctgcagcttcggcgtgctcaccgctctgcaaaacaacacattttttttcaaaaaaaaaatttgttaaattagcaaataactaaggaagaggggtaccagctccggcgccgccggcagccaccgccgcgaggtgaggaagaagaagacggagagggacatcgacgtcgaatccgacgcgccacgcgtcccgacgacaccgtaaggggaaggggagggggacaacggcaccggcctcgacgccgtcgcaaggggaagaagaagaatgttagttgcgatccaaattcatttgtacttaataaaggccagcttctgccgtagcggagtggatcatcatcccttttagggttccaccacatatatatatatacctgttgtaagccgccgtgcggcgatataacctcacctcacatatagtgaagataattttgctggctggcgcctgtggttttttctctcctgttctgagagggttttccacattaaatctcgtgtcttctgtgattgatctattgttcttcatcgtttgttcgcctatcgttccctaacaagtggtatcaaagcttgttctcatattagggtttcgcgatggcgtcgatgaagtatgatctatcgctgctagactacaagatgagattctcgctgtggcaagtcaagatgcgggctgttctggcgcaaacttcggatctagatgaggcgctggagagcttcgggaagaagaaaacgactgagtggaccgctgaggagaagcggaaatatcgtaaggctccgtcgctgatccaacttcatctatctaatgatattttgcaaaaagtgttgcaggaaaagactgctgcagaactttggctcaaactggaatcgatctgcatgtctaaaaatctaaccagtaagatgcatatcaagatgaagttgttctcgcacaagttgcaggagatcgttgccgacctagtgtcgatggaggtacagtttgatgatgaagatttaggtcttttactgttatgctcactgcctattccatatgcaaattttcgtgacaccatacttttaagtcgtgatgaactaaccctagcggaagtttatgaagcgctccaaaacagggagaagatgaaaggtatggttcagtctgatgcgtcgtcctctgagggcgaagcattgcaggtcagaggcagatctgagcagagaacctacaacgtgtcacgtcctaataaattcatcccgaaataaaaatcattttctaaaaggaataatagaattaattaaaattctaaaagaaattggcaaacactaaaatacgtacaagaaaaattcaaatgtagcccggagaatttttgttaaattctccttggtctaaaaagagccctcaaattttacttaaattttcagagcaccggaaatatttattaagcaacaacaactatgatcaaagtttacttaaaaagaaaaacctaaaattaatccccctcctccctttgggccaagtttggcccaaagtcctctctctctttctctccctctccgtctctccctccttctcttcggcctccccttcccctcccggcctactccctcctcttctcctcctgggccgcctcggcttcgcccggcccaagccgagccgcgcctcccacccgtgccgcgcacgtgcgcgcgcgtgcgcgccgttgccgcacgttgaccgcgcgcctcccgcgtgggtcccgcctgtcaggccgtccccgacctccagctgccggcctccttcctctctctcccgtgaaccttagcgttgttcctcctccaaatccaccccattcaagccggctctttccaaattaaatagggggaattaatctccattgattcctctttgatttcccccgttttcccccttgaatcgtgcccccaatcgccgggaacggacgcgccaaccccggccgccattcccgcctctgttccggcctctctcgttgccggctccctccccgcgcctataaaatggaaccccctccttccgttctccagttttagccccctcccgcgctctcccgtggccgccccacctctccccgtcttctccttctctctctctccggcgtatggccatcggggaacagaccagctgcacgttcatggaggttgctgtgcccaactcctcaaacagagactgcagccggcagtatcactttcagtcttgctgatgctcgcaagaagtttgcagattgatgatgttggattttagtactagatgtacggtaggtaactggacgctgtgatttaatttagctccatgaataaatcggacaaataagatgggagcaggggttttggtagtttgtgcatgtgagaatcgtacaaattaattaaaatagttccaagaaagctcccatgaagtgtactgtaactttatattgcattttattacaagttaggtgggccatgcatttgtaagttcaggggagtgaaaagaatttagaagaccaataattagtaatacctgaaagaaaataatccctaagagttgggacgtgtaaaacaaatatcatcgtcttgatgaagttatggagttatagttgtgggactcgttttttttacataatggattaaaccggcctctacatccaaacggatgtacacagccaaagttgtgggactcattttagtcgagataaattcaaatgacacctaaaattaaagatggccttgtgaattcttactctggaatactcggtgcagagactgagaattatttatatcaatatctttaacatcacttattaccaccgacaatatcccatatattgatgcttcctatgtctccttcctctcttccatttctgtgtttccagatagcctctgttttttttttttggtcaatacatggtctatctcgtctcttactgaatgtctatctgataaatgaaacagtacctactgcttaacaggagtacccttcatttgggaataggtggcatgaggaaataagcacattgcttttttgaggatatcatgttaggaagccaatgaaaaaggacagggacactgcctgcttttcctgggagccggccagggatattaatcgtcggagatatcaagaacacaaagttgaacacaaagttgaacaggcgtcgaatctcgcaagaggcaaagaagcaacgactagccaacctgggcacgaccacactgtaccatatctgtgactttggatcctttatatcagacaaatttgtaactaaagatgcatggcctgcatgcatgatccacatgtccaatttactaaaaactaagtagttaattttgaaaaatttcatatatgttttatcgaagttgcagaaaatttacaattggcacttttaccacagtgttggtaaatgcattttcccacgaaaacacaaccatgtgtgtgaaaacatatgtagacatcaaaataaaaatgatagatagtcaagcatctcaacaactccatcaccacagtctgcttaaccagagtgaatttttatggccccttagtgagcaatttcatgactttctgtgtgtaatcgaggacgattgagaagtaagtaaatttgaccttaagaaagatttcggacatgcgacaaacactaaaagctattaaggccattcccaacccaataactggatggtgtctatagcattaaataagctgccaccgagaataaaaaatgatgtggcaagtgaataaatgagtaaagagaagaaaccatgtcttgcatgaaacatggtttctacgtaacatccaagacatcatgtgagataaatagcattaaattgaagtatggaatagtggtgtttgcattggaaaagtagtgtctagtactagtttcttgatgatgtggagtttatcgaaactatgtatagtatcatgggtaagtaatggcctaagaagatcatacaaaaaggtgtgaaaaacaactgactactcctagttatgttttctccttgacctacgtgcatacctacgtgcatacttattatgtacatccttttcacctctccacttttttttctttcaaaaaaattaactgtatggccacctacgcaattttgacacttccaccatccattcctcctccagtttacattattcttcactagataagggttacttcccctatttgtctgcaaagtgtgcggcgacgcgggaggcgcggctagatcggcggcgcggtgtggtcgagggcgtggcacggtgcggccaaaaaatcgcgaaggcagcggaagacactactacagaagatgtaaagggtgccaggtgggaaagccccttcggtgccggtttttccaaccagcacccgtatggcagcactgattagctagggtgaaaggtgtcggttccaaaaacagcacctttgaggcgcccatgagccaaaaataaatcggctagatgcatcgagccgatgcattgagccgtcaagccaatcccatctaatacctaaatctcaaaatttcctcaaatcctcaaaaatcacattcatcaagaacactcgtcaacatcatcacattcattaaaaacactcatcaagaacacatcaacatcatattcaaacacattcatccagaacactcatcgagaatcaagaacactcatcatattgccttcaccaccaccgccactaccgccactaacgtctccaccgctgccaccgtcatcggatggagaggagggcgccgctgccgcagcaccgctgtcgctgtcgccgggccgccgctgccgtatccccttctgccgccgggccgccaccgccatctccctcccgctagatctggtggaggggagggacccgccgccgggccgtcggaccgccgtcgcctcccctcacgccgccgacctgtcgccgccgcacccccttttgccgtcgcgccgccgacgccacctcccctcccaccagatctggcggaggggagggcgccgccgctgggccacagtatcccctcccaccaccgaccggccgccgacccaccgccgccgcagcatcccctcccaccgtgcacgccgattcagctgagggagagagagagagagagccgattcgatcggtggagaaagagagagttgagagagagagagagagggagggaatgcataaggaaaggagaggagaggagatgaatggataagattgatgtgcaggccgggggtcgggtcggctcagctctgctcgatttatttggttgtcggttctttctttaaaaaaccggcacgtataatatattatatgtgtcggtttttaatcaaccgacacctataatatattaaaggtgctggtttttattaaaaaaactggcacctatagaatatatattctatataggtgtcggtttggttttatacgatttcaacccgcggaggtgggaaaaatcttataggtgccggttttagtactttcggcacctatagtggcgacacctaattaatgttttgtagtagtgagaggacgtgagatcacgacgcatgcgcggaagaagcggcgaatttgggtaggagaaggaaaccagtatttgataccatgtagagaattatgagacaccacataacccaacatgaggggattgtatttatatagccaatgcattagagattacaacaaactcttaaataagagatctatacagatagaatagatatctaggctatacaaatctaatataactctagtattgttcaagtcatttcggaatgtgtggcatccggaaagaagcatattggaccatccagttgtgatgtatgttagtgaagctaaggtctgaaccacggtccaaagactgggaagagtcccagagacacggcctcaccacctgttgatcatggaccagcgaagtatacgtggactacttgttcctaggtcgtagcatttgttgtaatatgaagtgaattactccgtattttcttattagttaagttgataggttgagctagtcgatgcatataactttgtatggaactagagttagacgcctcgagttcaaatccttgctagtgggcaattaaataaaaaaactacagagcacttctattctacgctagatacttgaggcgacctcgcatgcggaggactgtttgaggggggcttgcgtaaggagggatctcctaccaatatgtgaggattaatctgtagccagggatttttatataatttttgtaacaattaaattgcttcgtgtgaaattcatacaaaatttctacatttctgttttcaaaggagtactaaatctatgccctgttgcatgcatgacccacttgtcatttcaaccaagtccataaaaatgatttattcgccaatgcgcattggaaatgattcttatttacatcaagctatatttttatctagtcgtgatagttatgtaaaaggcctgtttgcggcacacaatctgaagtgtgttcaacaaattcttggatccattggaagtacgaaagtaaagtacacagatatatctttgtaccccacatctcccttcaattccaatctactaggatatgcctcttttttaatccacatgctcttctcgtccatggcttgaaaccaaccatcgtggtttccaatagggtttctgcctcctctttctgcttgcctaccagatgaacactatttcctccgtttcatattataagacttttagcattacccacattcatatatatgttaatgaatctagacatatatatgtacctagattcatgaacatctatatgaatgtgggtaatgatagaaagtcttataacctgaaacggaggtagtacatactttttctttgagagatatttatatttgtatgtcaaaatatgcacgaagtgcacaacacacataatagaatattttatttgagaatgagcgacatcagataaagaacatacatgatattcttgatatcaagtacactgttatcagggccggccctgggtctaggccggttgtgcgaccgcctagggcccaggccggtgaggggcccatcaccactcccccgggagcccagcccagccatcagcccacgcgcaagacaggagggagggatacagaaggccacaatgccggttcgttaatcgctactacctccgtcgtcccggaatataagcattttttagagttggacatggttattaagaacgttggtataagtaaatgatgaaggattgtgattggctgagtagtggaggtaggtgggaagagaatgttggtggagaagttgttttattttgagacaaatcttgagagctaagagttgttgtattttaggacagagggagtagttcgcttcgttttctccttttctcctcgcgaatcgcgattccgtttccgcgagtaactctccaactccgcgaccgcgacgcgtctcatctccggctctccgcgctgacggcgccagattgccgggcgcctggccgagtggccgactggccgccggcacgccgccatgccagggccgcttctatcctctaatcgccaacacctgagcgcccgagcctctgagcctcacgcctcttcccgactccccatctccagtctagtagtctcctgttgtggtgttgccggccataagccctcggcaaactgaggttagttaggtactccctccgtttcaactttctagcattacctacatatagatgttaatgtatctaaacacatacatatgtctagatttattaacatctaaatgaatgtgagcaatactaaaaagtcttacattatgaaacggaggaagtaattaggttaattagacaaacaataaaccgaggtttgttgcttgcatcattgtacgatatttccactcgaaaaattagattaattaggctataattttcatgattattgctgtataatttactttacaatatatttactatttcaggtgttacaatgttatccaaaaacatttgttgggtgcttagaaaagaaaaaaaaacatgaagatcaattaataggttcacaaaagaaatgatttcgcttcaagaaatgtgcgaagaagcccttttttataagggagataggatatttgtggtctcctattaagtattcatattactttgtttctatggtgtttttttcttgccaattatactatcaatattatttatcaataataaattacaatattgcaacttgtaaactattattatttaccatgttagaaatgtttatttgtgtcactatatagtgacgtatatgtgctttatatagtatatatattaaaaataaaaatatttagcctcaacttcttaaagacctattgtgtcaagttcatctaggacctctcaaatgtcaggaccgaccatgactataagtcatctgaacctagggccgatcctggggcagggcgagcagtgcaaccgccctttgttcccgttacctcaagcaaacaccagccttgcacaatatgtctgcctagcttgcacggccattacacgtaaagtagtaaatcactgattatgtgctagcacaagcacgttaacgttatcaaaaacccggaagctcatcggtacttgcgcccctactcaggaatcgcccgccgttgaaaccatctcgttcctctcgaaggcatctactctctcctctcgatacaaacatctatcagtactagttggcattcctaagcaattggtctctcttggcaaccatgaactaatcttatcatatctttagcctatggtctatgattaataacatcttgaacataaaaatcagatagaattttgctgatttcctattgttttatagctagagataggagcttgaatgaacaggtttgggcccgggtttattacttctctcgattggttgattcatttctcttgtagctctgcactaacagatagtatttttttatggagacataatataaacttgaataattttaatttgatgtctttttatagtatttaggtatgctattcaactatcacctaacaatagtttgtgcttaatgatgtctaaaagttaaacattactttctatttgaaatataaattatttgtcatacatacatatgtactaatgttacaaggctctttatttttgcctcgtcctgggctaccaaaatttcaggaccagctccgactgacactgtatctactctcgcgtccttctactcggacatgagacattaagggcccctttgacttggattcaatggggccctaataggttaattaggtcctgtttcgattttaacttttttcttcaaacttttaacttttttatcacatcgaactttcctacacataaacttctaattttttcgtcacatcgttctaatttctttaaacttttaatttttaattttgacgtgaaacaacatagcgttaattggaagatctagccggcaatctcgctcgtgtccttctctcttttgtttcggcttcactgcgcgatcacacgtctcctcttttctgttcggcttctgcgcgatcgttgcggctgcacccacctgtaggaatgttgggcgctgctgttagtagttctgggcgaggggtgccaccaagagccaacgccagctgagaattttgcatggacacttttttatttttgcaattagtcacttgacaacttcttgaatagtatgaatttgttaattactccctccttccctaaatgtttgacgccgttgacttttttaaacatgtttgaccattcgtcttattgaaaaacttttgtgaaatgtataaaactatatgtatacataaaagtatatttaacaataaatcaaatgatagaaaaagaattaataattacttaaattttttgaataaaacgaacagtcaaacattttttaaaaagtcaacggcgtcaaatattttgagatggagggagtatatgcgttgtttgagtaaatttcagttgtgtcagttttaggacgaagaataacactcatcttccctctatagcattcatatttcattatcactacttcttaatggtctttatttatgcccactattatgtaatagattttcctggacgacgccttattttatttctatgcggttcgtaaatgcaaccatatagaaaaatagagaaaccagtgttaggctgtcactcacacgagaaaatatattgtcccgtgtgggcggcttaactcactcgcacgaaaaaaaaacttcccctatccctttctctctctcctggcctctccctctcgaaatttcaaaaaaaatttcatcctctcaactctctctctcctccccttcgtccttatccttatcaccacctcatccttattcttctcaccacccacccctctctctctcctctcctgcaggatgtgcttgccgagcgaggggggcacggcggaggcgaggccgatcccggcggcggcggagaagggggcggcgagccctagctctggacgcggcagcgagccctagctccggacgcgccggcctccgcctggacgacgatgacgacgacatcgccgacgcggcggagacggaggcggcgagccctagcagcaccggcacgcgcggcggcaggcgcacgggcgcgctcctcagcatggctcgatggccggcgcgcacggagtcgcgggcggtgcggagcgaggcggccggcgcccggatccggcggcggcgcccctctcccgccctcccccgctcgacggtgacgacgacgacgttgccggctccgacgatgacgacgatacgttgccacagcagggcggcagcgagcgggttggcgcgcgagtagggcggcggcgcccggtcctgattttcgttttttttattttcgctttttttgggttccgtgcgggcggtataatttgaccgattattccgtgtggtccacttaatccgaccgcctgcccgcccggttgggtcgtccgcccgcgaaaatattaattttcccatacgattggctggagacgggccggacaatcgcacgaaaaaatcgaaatacctgtatggaaaaatgttgtccgtagtagtggctactgatttaactatgtggttatcgataattatatccagttgaaagtaatatgagttaatcgtataagtcgatatggattattaatcattccatcaggtaaaaaaatcaaataggtttgattttcgtttcataagcttccctggtaggcctgtcaactttttatccacgataacttatatatctacttcatgcagtccaagaaatagatagttatcgtggataaaaaaaagagtatgaataccctcttgaactatcacagtcgatcgaattacccccacccccaagctaaaaaagagatattttacaccctaaagtatataaacaggacaaataaccccctaacttaatctgaagtggtttcaatcctatatggtagtccaatcagcaattattttattaaaaaattggtgggccctgcatgtcatactctccctctctctacctctttcccctctcacctctctctctactcttatcatcctctctctctcaccgagcatagcaaggaggaggcgacatctgctgctctagcaattaatcccggtgtatgcattatattgaatgagaaaaggtcgctcgtgcaacaaatggacgtagtggtgtaagtgggctaacccacgaattcccttatagactaatggaataagttcatctgagatcccttaatttgtcaacgaatccgattttcgtccttcaaccggaaaatcagatacaacgggtccttgaactatcaaaaccagtgcagatgaagtccctcagcggtttagatggcggttttggctgatgtggcgcctatgtggctaatttgactcggtcttcaactgacgtggcattcacgtagcgcttacgtgacaattcgatctggaaaaataataaaacccgcgggacccacatgtcagtttcacacataaaataatttcaaaatggtggggcccacgtgggccccacatgttagcctcactccaccctttatccctctccctcggcttcctcgccatcgtcgacctcgacggtcgccgcgtcgtcttcctcggcacctccaacatctacggcttcctcgccaccgtcgacgtcgacggccaccgcgccgtctccctcagcacctccaacatcatgctccgcaactgcgagctcaagataacgacctgggccatcggcgtcgcggtctacaccgtgcgggacaccaaggtcaagtgcagccgcctggagacccacacgaaccgcgagaccatcgtgctcactctcctctgcaccctcgtctccctcctcgccggcatctggctgagcgaccacagcaacgagctaggcgtcatcccctacttccgcaagaaggacttctccaatcccaacgagatcgagaactacaaatggtacagcacaactcccaggtggtgggcaccgtggcaggggccggggtggtggggctggtcggaacgctcaaccgcgggctccgacgacgaggacgaccactccggtgccatcgccaccgcgtgcgccaagaaggcaccgccctccatcgccgtcaggctcgagaaggagatggcattctacggcgacggcggtggtactgagggcggggatgtggccagcgcaggaccccgcggcagcgctattgacagtcgttatcgatcagtttcgaccgtcaatattattaaaacaggcgagaactagtgatgcttgcgatgcatatatctgttagaataataatattccactagttttagatatactaaccttttgcagagaatgacaataaagtagaggagaatcgacatcaacacagacgataaatcaatcggacgatgtcgagaaccagacttgtgtatgatgggccaagaacgcagacttgacacgatgaatcaggccaaaattcacaagtctacgaagtgaagcaacagaggaggccgctagccgaaattgggctggattgggccagccccaggttcggccgaacctccctcgcctccgttggatccaggttttggatggacggtggagatgaagccgcaatgacggttggaggtattaccgactattccaaccgtcatagctgagctataaaaggacttcactctcttcacttcaacacacacctcaagcaagagctctctcattcctctcaagtttagtttagtagtatctagctggtagaatagaattagaataggaatcaggagtccggaagcgttcggaagagttcgggtatggctctagtagctttcctttcctcttttgtaagctttgtacttttattagaatactcttctatatacatttctggtattgaaatactttccgagtatatgagtacctactttacattatgttcatgttatgctgaatatactgctagcttatctgtgagatgctttggtgcgggtatagtctttgcctatgcaattactctatgtcatgacgatgatattagagtagtatctggcagtttagacgtggtgtctagattacgggataccattatttggggttatatattgcggatgataggtgggccgctgatggtgacagctcagtacgggtattcctccgtatttagccccggttggatggtcatgacgggctgtcgtaaggaactcgacagtcaggggtggcttctcgaagtatcaggagggcatcggatagagggtattagctagtataccagttaactagaatgtatgtatactatgtatattagaagtataggaatagattctctttctcttttctttctacctagcttagattatttattatgaggatgagtagtaatggttgtgtgtcactctacccttggattatcttaacccctacttagaatatgattatcacaagtgatatataaattattagttgagttctctctacatgatcttcccacaggataaaataaatacgatacccttggaatactctcgggtgatatgctacaatagtatatccgtgcgcttgcaaatgaactctgtaaccataatataccagaagtatttatgcgccattgttgggaattatatttctaggaatgtcgttaagaaataccaacaagcgccgaccaccacgccgccagtctcctccaacaagacgcctgcacccaccgctgcgccgaccacccccgccactcggccgtggggcccaacaccccgcgcccgccgttgcacttaccaccaccttacccgctgcagtgccgaccacccccgccacctcggcccccaccacggcgcccaccgcctcagctccggccactgcggcgcctcctctccgccggtcgaggctcctgtcgctggtgccattgtccaccatcttggggatccctgttgcggcgcacggcgagcagccgccgccactggagctcggacagccctcctcgctcgcctgctccgccgtccacccgcctgtccgctccggcgctcaacaggaagaagagagagagaggggagacggaagaagagaggagtgaggatgaggaagaaatgagtgatgaaagggagatggaagggagtgaggggagatggaatggagagggatgaaagggagaggaagaaataagtgatgaaagggagtgaggggagatggaagggagagggataaaatgagtgaggctgacatgtcgggccacgtgggccccaccattttaaataatttttttgtaactgacatgtgggcccatggtttttattatttttccgcgatagaattgccacataagcgccacgtcaatgccacatggaacgaagacctagtcaaacaagccacgtaggtgttgacggtcattatcgatcagtttcaaccgtcaatattaccaaaatagaggagaactagtgatgcttgcaatgcatatatatcttagaataataaaattccactagtattaggtatactaacctcttgcagggaatgacactaaagtggaggagaatcgacatcaactcagacgataaatcaatcggacgatgtcgagaaccagacttgtgtgtgaataggccaagaactcagaactaaaacgatgaattgggccaaaatttacaagtctgcagagtggagcaatagaggaggccaccagccaaaattgggctggattgggccagccccaggttcggtcgaacctggtggttcggccgaaccaatcctggcgtcgttggatccaggttttggcgtggacgtccaggattgcatcccaatgacggttggaggacacttcggacaattccccttccacaaccgtcataactacctctatataaggagctcactctcttcacttcaacacacacctcaagcaatagctctctcatttctctcaagtttagtttagtagtatctagctggtggaatagaaatagaataggagtccggaagtcttcggaagagttcagatatggctctagcaactttcctttcctcttttgtaagctttgtacttttattagaatactcttctatatatatttatggtattgaaatactttccgagtatatgagtacctactttacattatgttcatgttatactgaatatacggctagcttatctgggagatgctttggtgcgggtataatgtttgcttatgcaattactctatgtcatgacgatgatattagagtaatatctggtagtttaggcgtggtatctagattacgggatatcattatttggggttatatattgcggatgagtggtgggccgctgatggtgacagttcagtacgggtattcctccgcgcctatatataatcctaagttaatttcctggggagggtatttctccgtatttagccccggttgtatggtcatgacggactgtcgtaaggaacttggcagtcaggggtggcttctcgaagtaccaggagggcatcggatagagggtattagctagtatattaggtaactagaatatatgtatactatgtatattagaagtataggaatatattctttctcttttctttccatttagtttagataatttattatgagaatgagtagtaatgcttgtgtgtcactctacccttggattatcttaacccctacttacaatataattatcacaagtaatatataaattattagttgagttctccctacatgatcttcccacgggataaaataaatacgatacccttggaatactctcaggtgaaatgctacaatggtatatctgtgcgcttgcggatgaactctgtaaccataatataccagaagtatttctgcgccattgctgggaattatatttctagtaatgtcgttaagaaataccaataagcatttctggcgctgttgccagggattatatttctagtaatgtctttaagaaataccaacaagtatttctggcattgttgccggggaagattcataatagagattgcttgaactaatactttatatttacctctatgtaatcatttcctttgcaggctaaccttggttgttttcacttgttgttgtgaaaacagggtagtgcgtgactggtttcaacctaccagaaagcttcaaagaaaatccagaagctttcttccggaccgtcaggccgtgagtcgttgctctgcagaaaattctaccgacagagaaaccagtcgtaccagcgccaccgaccttcaagacaatggccagcaagactcttcgcgagttcgctgctccctctgctgacaatgtggccattgggccgcaggtcaacataggagacgtggatttcgacttgaaatccaacctcatcacgatggcgcaggctagcccgttctgtggcaagcctaatgaggatgccaacgctcatctgcaacaattcctagagatatgtagcacatacaccatcgagggagtcagacccgacaccgtcaggctgcgactgtttccgttctccctccttgggagagcgaagcagtggttttatgccaaccgtgctgttgtcaacacctaggataaatactctacagcattcctctcaaagttcttcccgatgggcaaaaccaatgccctccgtggaaggatttccagtttccagcagacaagggatgagtctattccggaagcatgggagcgtctgcaggagcatgtggccgcctgtcctcatcatgggatggtcgactggctgatcctgcagaacttctacaatggactcaccccaatgtcccgcgatcacctagacgcggcagctggaggtgctttcttctctaaaacggttcaaggagccgttgaattaatagagaagatggtctccaatatgggttggagcgaggaacgactccagacccgtcagcgaggcatgcttaccgtcacggagacggagttacttgctgccaagctggacctcgtcatgaaacgcttggacgaccacgagaaagggccacagggcaccgtcaaggccatggattcacacgtcacgtgtgaggtctgcggcggcacgggtcattctcggaatgactgcccggaaacccgtgaggagacgatgtatatgggcaacaacaacgggtaccgtccacaagaaggttaggggtggaacgaaccacgcccatattatcaagcaggtaacaataatgataacttgtctaaccagccctccttgaaggatctcatttttgcacaagctaaaaccactgatgcactaagcaaaaatcttgctgctaacgataagatcctagagaacattaatgtcaaactagatggctttgcttctgcttttcaaaatcagtcgagctttaataaaatgatagaaacccagttagctcagttagcatctttagtccctgcaaatgaaactgggaggattccggggcaacccgactcttctattgaaaatgtcaaagcgatcacaacgagaggaggtaagtccactcgtgatccgccatatcctaaccctgcaggaactaatgggatgtcaaaagaagcgccatctaatgactcggcttacaaggagattcagcccaacaagaccgtgccgctggaatactacaacacacggttgctgccattccctcaacggagtaggaaaccgtcagtggacgagcagttcgctcgttttgttgaagtaatccagaagattcacatcaacgtgccgttgttggacgctatgcaagtgccgacatatgcccgttatctcaaggacatactcaacaataagagaccgctcccaacaacggaggtggttaagctgacggaacaatgcagcaacgtcatactccacatgctcctggagaagaagaaagatccggggtgtgccacgatcacctgcttgatcggggcacaacaattcgaccaggccttgtgcgaccttggagctagcgtcagcgtcatgccaaaagacgtctttgacaagctcaacttcacgatgttggaaccgacgccgatgcgcctccaactagttgactcgtcagtccgttacccggcagggatagcggaggatgtgccagacaagatacgggattccttcatcccggttgattttgtggtgctagacatggacacggggaagaagacgccgctcatcctggggcgtccattccttagcaccgcaggagccaacattgacgtgggaatggggagtatctgtttccatatcaacgggaaggaggaaaagtttgagtttcaaccgaggacggaacaatgctccatggtcagaatcaaatacgggccaaacccgcagaatattcaagaggtcaaagtggagccgcccaagacggacagcctagtgaaattcatgcaaaacttcctggagaaggaaacaacaatacccaggaaccgttattggaggacgccggtaaaatcacctgtatcggccaagaagttagagcagccggctcagaagaagccgccctctgcaccaaaaccaaagaaggtgtggaaggaaaagccaaagatgcccgctccatcacctccggagacgggtagaaaatccgcgcactaaattggaaggaggtacggtcttgcacgtcggactttaaatgacgcgaccttcaccaacaggcaaattggtatgtatccacatatttgctttcaacaatttgaatttttgcatcatcacatgtttgaatttcaaaattgcatttagtatttttgaattttgagggaattcttcaaataaatttttcaaagcaaaccaaaataaattcattgtgcaccgaccacactgatcgttggaatcaaacggccgaaagtggggccggttgggcccaccaggggttcggccgaaccggccaggccaacggtcggctgcctcttcctttgaggcaatggctagtgggccacacaggtcggttttgaccgttgtgggtgcactacttaagccaaccaaccgggagagggaactccacctcatttcaacacattttcattccctctccaaagtttgctctcaagttcattcaagctttgatagtttccctcaaattcaaatctttagttgcatatatacaagttgctttggtgaaattaaccggcgggtgaaattcttgtcatttctaacccccgccgagttagtccgttcttgcttcattgtgcagaatgaggaggcgattgtctcgtccattcaaggggaccggctcttcatcaagtcgtcatgacgagtctagtacttgttcatcagccgatgtctcaatagaagatgccgaagctacgtgacaactcctgagcgacactgaccttgaccttgtcagtgatcgggagaggcaagcctactacatgctgaatgaccgggagtatgctcacacgcgagaatactcaccggatttgctgaaaaagataggtatggatgttgaatttcgctctatttggaaagctattggttggtagagatttgctgtggtagatgagcctggttctcgtttgcttactttgcaatttctgtgcactttgaaagaaatagaagatggtatttcttttcgctttttccatgaagagtttacatttacatggaaaggcttaagtacatttcttggttttcacgattcctgcaaaatcgatctccagaaaggaatttctgggttcgagaaaaataggttttgggaagacatttctggtgctccaatttgcaagaaaccaagaacgaatgatatccttaatcctacacttaggctcatgcacaaatggattgctatgactttgtttcctagaggtgatctgagacccattaagggagatgaattaattatcatgtttgccatggttagaaaaatcaaaattgctactgtgaaatgtatgataaggcaatggttagaaagtataaggttctctgctcctgttgagtgcacttctctgattacttgaatagcaaaagggctaggggtcgttagcgaccaaattgcttttatcttagccgctcgtccgcgtattgatgaggcttatctagtgctagcgcatattttgaaacatggagcagatggatctttgatatactttttccctggttgtacaaatgaaatcccgttgccaaatgcggggtatcatttgtacaactgccacgaactaaccattcccctacagaccatagaagaatctcgtgcaggtggaacattcagggagatgcacaacatgacaaggaacgaacgagaaatttcattatcctcgacacccgtgcagatgtatgaggcaggttggacaccaactggggatgcacccggatggacccaagctccacgccgcagcatcggagtctcaacctgggcaagcgccagtgaggaccggtggcatgcgcctcatgacatccaaaggggggacaatcaacctcccagatcaagtgatgtgtcttcatctccaagtgaatggcgctcaagttcctctcgttgggacttgggtgaaatcactaggagaatggacacccttgatgtgcagacgggggagatccagtacaacctcacggaacacatggctcaaacgcaagaatggcaacaatctgctgatgctcagttcgccaacatcaacaacatgatgcagcaacagcatgataacctttaggcgtactttcgatttcagggcttcaatccttatcaaggaccctgagcgaaagccaagcttggggggagacatcgctccccccactgaggtaacttgtatcacattgcatatttccctttctaattgcatatttgctttcaaattgcaccctataaaaaatgaaaacaacataaaaatttgcaaaatagaaaatacccaaaaaaaagataggataggtgtgagtcatgctaggtaagacaagctagttctctttgttgaaatgatgaatagttgatttgttttatatcttcgatatatgggttcttggtaagtgctctcacgaagattaaatataagtagccaacaattatccgggaacttgaggtaaatgggctgcacttgctgatctaagtctaagttgttgcgagatatgagatagtaaatatgagttgctacgatcctgatactagtttgacttgaattccggatgatttgtttttcaaaatgataaattgaaagttcctcatttgatataaattcctaccagagccaaaaatatgctatcatgatttaaccatttacatttttgttgcttttcattccattgaactttgtcaaactcttgtgacttgtgtagatatttgtcatgctctatgatcaagatcatacacccacatatatgcacatgctaaactcctacactgggagctaagcaatattctattccatttccatattaccaccaaaataaattctccatgctttcatgtgctttcttctcctaaaaaggaaaagtccttttgaaaaaaaaagagaaaagaaggagggaaaggcatggttatggaaaaaataaaaaaaaataaagttatgctccatcaagcatgagcatgatgttaaaaaaaatgtagccatgccctctcctaatcaataaaagaaggattttgggagaagaaagtacacacaaaggagaagcatttttcttttatttttcctcatataccgtttccactatataccacacacacattatacacgaccttgatcttgagtatgtttagttatctgctttagtctaagattttgacttagtaataaatgtgaatgcaattatgtatgtttgatccctatcgagctccacatatcaaaaccttagagtaggaattaaaaaggcatcatttggtgaggaattcaaattgatacacttagagagacagagtgaattatttgaggaacttggctttatttttcaaaatcatttgaaaactttcggaataagagttgaataaagatcaggtgattggtgctctaattgctgttctgtctttcaaccgcccgaggcaaggagaagcagtgtctcgtgggaatcaggggtaagagcaagccaccgtgccaaagattatttaatctgagagagagtacatataccttgcacctgtatctttgagatatgcagcatagtagcaacttctgatcattgtttcctttcgtccttcactcgggacaagcaaaggttcaagcttggggggttttgctgacggtcgttatcgatcagtttcgaccatcaatattaccaaaatagaggagaactagtgatgcttgcaatgcatatatctgttagaataataaaactccactagtattaggtatactaacctcttgcggggaatgacactaaagtggaggagaatcgacatcaactcagacgatacatcaatcgaacgatgtcaagaaccagacttgtgtgtgaataggccaagaactcagaactaacatgatgaattaggccaaaattctcaagtctgcggagtggagcaatagaggaggccaccaggttttggcgtggacgtccaggattgcatcccaatgacggttggagggcacttcggacaattccccttccacaaccgtcataactacctctatataaggagctcactctcttcacttcaacacacacctcaagcaatagctctctcatttctctcaagtttagtttagtagtatctagctggtggaatagaaatagaataggagtccggaagtcttcggaagagttcaggtatggctctagcaactttcctttcctcttttgtaagctttgtacttttattagaatactcttctatatatatttatggtattgaaatactttccgagtatatgagtacctactttacattatgttcatgttatactgaatatacagctagcttatctgggagatactttggtgcgggtataatgtttgcttatgcaattactctatgtcatgacgatgatattacagtagtatctgatagtttaggcgtgatgtctagattacgggatatcattatttggggttatatattgcggatgagaggtgggccgctgatggtaacagctcagtacgggtattccttcgcgcctatatataatcctaagttaatttcctggggagggtattcctccgtatttagccccggttgtatggtcatgacggactgtcataaggaactcggcattcaggggtggcttctcgaagtaccaggagggcgttggatagagagtattagctagtatatcagttaactagaatatatgtatactatgtatattagaagtataggaatatattctttctcttttctttccatttagtttagataatttattatgagaatgagtagtaatgcttgtgtgtcactctacccttggattatcttaacccctgcttacaatataattatcacaagtaatatataaattattagttgagttctctctacatgatcttcccacgggataaaataaatacgatacccttggaatactctcgggtgacatgctacgatagtatatccgtgcgcttgcggatgaactctataaccataatataccagaagtatttctgcgctattactgggaattatatttctagtaatgtcgttaagaaataccaacagtaggcgccacgtcagccaaaaccgccttctaaaccgtagagggaccttgtttgcaccggttttgatagttcagggaccggttatatctggttttggtgttgaaggatgaaaatcggattcggtgtaaagttaaggggactcagatgtacttattcctatactaatttataggctgaccaacgaattacctgcttatttagcccataattggctttgtgagacagcccacttacacccctaagttacgaattgctttgaatctttgcttgcaccggcacgcgttcaattatttttaaagaaatacaaaatatagcaccgctcaacgtgtggttcatgggcacagcataagttggttcaacatgagctctcctagctagtaacgtccaacacacaccaacactgaatggacgaacacctataggcgagaaaacagtgcaagaaacagaaaccgatcgagttggtgctgccaaaacttggtagcttttgtgtggttctttcattgcttaaaaaaaataaactgaaacacaatatcgtggtggttataagccgccctaaacgcacgccatgacgaccattagtccattaacatcgaccatatatcctatggaccaggttacaacgcatgtaacaacgcgccagaagcagaaaaacacagaaccccgcatcaacagagcatatgtgtcgagcacaaacagatgagcccgcacgacgctcacgcgaattcaaggggcaaggccgcaagcatccttcaggaaaacaacattgcatgctttcagttcaggctggacagacaaacataaccgaacacgcccgatcgattattgacttccatcgtccacccgagcacaaaacaaataatagcccataaattctacccctacatttctacaacagagtaaagtgaaatgttactacttccgtccctattgcctttttccgttatgaacctagagagtgatgcagggatggagctaatttggtgagctaatttggagagtgatgtaggggaggggtcggagacgagtggttttttttctctctttagcctggtcacatacacaattttcacatagaggccgtttggtttatgaaagatattttttagtgggatgacttttatgtggatggattaatatgctaccggcaaaagtgtggatggtgtggagattatgggtaccccatacccacacggcatggttatccgactgttataagggatagcttatatctatggaatttgtaacagatcataacttgggtattacgtttccatgtatattatggaacggcctaaagtcctggtttgataaaattgtaaagtagatttaggaaaccgataccgtattgattaagatttctatcttgtaatcctggcccccatcctatataaggtgggcaggaggccctctagggggcatgagatacaatcagatcataatatctataatacacccggcggattcaaatccccaaacaggagtagggtattacctctcattgagagggcctgaacctgtctaaatcctttgtctccgtatccatccacttttagatcttgtgcgctatccccttttattattgccgaattcatgtttcgacagttggcgcgccaggtaggggctgcgtcgagctttccatcgagaagtgcgatggaatcaatttctggagatgtgctgagatcgatctcaaagagtcgtcggcttcgtcttcacttcgcttcgggatttttgctttgtcatcgccgctgacaactttaacaagttttcactctctgacttggatccaaaccagtcaggagagattcaatctaagtaagaaggagatggctaaaccctgagaccaatcgccgttgcagtcctccgcctgatcctgttcgtatcggcacgagggcagcgacgatccgatggatcagatggtcatccactaccaagcctactgaaccaatcaatctaccccaacgaagatgctatgatgctgcaagatggatctacagacacgaggcatgacgaaaccgatctaatcggcatgcataggagacggttgcagctgatggacaccgacgacgccggggccgcgcacgcagctacgccgcctgcgcgcggctgcgacctccgcctcctccgctccgacgactacgtcgcctccctccccgccgtcctcctggagtcgcggatctgttcctccgccgcttcaaagtcggcgaggactgcccggctgctgccgcgccgtcatcgtcaactagtcgggcaggttgcatcacgcgaaggagtccgagacgtcgacagatccctgctacgaccgcgacatcgctctcgccatcctcaagctcctcgtcttcgccaccggcgacatcatcaacaaccaaattcaacaaggctgtgaatggcaacatggccaacaaatgatatgatgacacgtcaccagcatgcacaggaccatgcatcggcaacatgcatgcccatcaagccagcaaccaatcacacctcacgtgatatttgtgcatttatctttaattaattccttgctgctgctgatcaatttaattatttgtttgattgcatgtgctactgagacgccgtggtggtcaggccgtcgccgtgccgcggagtatcgacttgatttgtcggcgtgttagcccgcactcactattgccgggcatcttcgcctacatggttggctacatccgctgacactgtcgaccgtctcaacaagttcgcgattggctgcttccacgctgccgagcccgactatcgcccctgcatggctcacgctgacccggctgcgcctctcatagctcacgctgacccggctgcgcctctccattggccgttgctgatgggaatcgtcatcttcaccgccggcctgcctctgtcgccgccgactagtgtcctcgtctatacagttggttggtcacactaccgttcatgggcgtccacgtcttcaccgaccggtctgcctttgccgccgcctactggtgtctctgcctacacggctggcctattatgccgctgttggtgggcatcttcgctttcaccgtcgaccgccttcgtcgccgccgactggtgtcttcattgttattgatggacgactttattcccacattggccacctctgctatcaccaaggggaatattacaaagctaagtcatcatttattccttatatgatattttccttttcctctgcctcactacatcaattggttctccattgagtagtgagtcgggggctacagatgttataacatatttttcaataattttcataatatttatcttgattgcttgtgacataatctgagtacaaaagtgtctatcgagttatggagttctatcttcctatgctttccgtttggtttgtcatggatagttgcctttgggccgattcctagcacccgggggctcgttggatagaccgagtaacgcaaggtgctaagtattattcggaataaatcaaaagcatagagataagataatttatttttctgctcttaataattgcaaaagtacccgagtagtaaactccgatccgtgaaactttgttccattaatgacgaactcatgtcactcatatgcatgtttgggaagtgcttaggccgactcccagtgcttggtggctatgactagtcgggcagagtgtttaaacgtaatgagtcatctgctcgtggaaatcaaaattaacaagagaagaaatacatatttataaacattttaaaatgcttgaatttttctcgagtattatatttacatcagatactactcatcctatatgtttgttctgcaggatccaaatccagatatgcataaaagggattcatggctttaagcttatctcttacgctccacgaatggatcagtcagaacatcaccactggctcgccgtcgtcgccgccgactggtgtcttcgcctatacagttggttggtcacaacaccgttgttaggcgtctacatcttcaccgccggtttgctttcgccgccgccgactggtgtcaccgcctgcacagctggcctattatgccgctgttgttgggcgtctacatcttcacttactggccgcctcgtccgccgccgactggtgtttccgcctgcacggctggcctattatgccgctgttgttgggcgtctacctcttcaccgactggctgcctcgtccgccgccgactggtgtttccgcctgcacggctggcctattatgcagctattgttgggcgtctacctcttcaccgactggccgcctcgtccgccgccgactggtgtttccgcctatacggttggcctattatgaagccgttgttgggcgtctacctcttcactgactgaccgcctcgtccgctgccggctggtatttccgcctgcactgttggcctattatgccgccgttgttgggcgtctacgtcttcactgaccgaccgcctcgtccgctgccgcctggtgtttccgcctgcacgattggcctattatgccgttgttgttgggcgtctatgtcttcaccgaccggccgcctcgtccgccgccgactggtgtttccgcctgcacggctggcctattatgccgccgttgttgggcgtctacctcttcaccggccgtctcgtccgccgccaactggtgtttccgcctgtatggttggcctattatgccgccgttgttgggcgtctacatcttcatcgaccggccgtctcgtccgccaccgactggtatttccgcctgcacagttggcctattatgccgccgttgttgggcgtctacgtcttcaccgaccggccgcctcgtccgccgccgacaggtgtttccgcctgcacggttggcctattatgccgccgttgttgggcgtctacgtgttcaccgactggccgcctcgtccgccgccgactggtgtttccgcctacacggttggcctattatgctgctattgttgggagtctacgtcttctccgaccggccgcctcatccgccgccgactggtgtttccgcctgcacggttggcctattatgccgccgttgttgagcgtctacatcttcaccgaccggctgcctcgtccgccaccgactggtgtttccgcctgcacgggtggcctattatgccgcagttgttgggcgtctacgtcttctccgaccggccgcctcgtccgccgccgactggtgtttccgcctgcacggctggcctttatgccgccgttgttgggcgtctacgtcttcaccgactggccgcctcgaccgccgccgactggtgtttccgcctgcacggctggcctattatgccgccgttgttgggcgtctacctcttcaccggccgtctcgtccgccgccgactggtgtttccgcctgcacggttggcgtattatgccgccgttgttgggcgtctacatcttcaccgaccggccgtctcgtccgccgccgactggtgtttccacctgcacggttggcctattatgccgccgttgttgggcgtctacatcttcaccgaccggccgccacgtccgccgccgactggtgtttcctcctgcacgggtcgcctattatgccgttgttgttgggcgtctacgtcttctccgaccggccgcctcgtccgccgcagactggtgtttccgcctgcacggctggcctttatgccgacgttgttgggcgtctacgtcttcaccgactggccgccttgaccgccgccgactagtgtttccgcctgcacggctggcctattatgccgctgttgttgggcatctatgtgttcaccgaccggccgcctcgtccgccgtcgactggtgtttccgcctgcacggctggcttattatgccgccattgtaggacgtctgcatcttctccgaccggccacctcgtatgacgccaactggtgctatcgtcttcacggctggctatgtcgccgccaccgcaaataggcatcatcaccttcaatgcaagctgtctacgtgttctaccgactggtttcttcactaccatggctgcatgattttgccagtgttgattggccttatcgtcttcatcgctagtcgtctcttctgctgctgactagtgccctcgcctctacggctaatttataccgctaccactactgatggacgtcatctccttcattgctggtcaccttatctgacgctgactggcttgttcgcctccacggctgcgcgtcttcggtaccggtttgtttctgttgccgccgacttgtgttcgcttcatcacggctatgcaactttgtcgccatggtggagcggcttcatcttcattgtcttcagcaccagcaaactctattgcctttactttgcaagctttcctacttcaccaaccacgacgtctacaggagcttcgacatctcggcatgcgtcaccaaatatgatgccgtgttatattattacagcaagtggtgttccaatcttcaatatttctactcggacatcttcaacatatatcttcactgaagcaatgactactcgacgacaagaagctacagttcttgactctatgttcagttgtttctcaactaaccaaagagtcgggggctacacaaatacaagactctcaaaattcgacaagctttatgtcaagatgaagcaatcaatcaatcaacgagtcaactcggggagttattatcttcgtcttcgcttcagagccgacatctaatttcagcgactccgattattacaccagcaattttggcttcttcacgccgccacaatctattccaaatttctcaagtttgagatttaatttacatgtctgggagtttggagtcatcaaccaatcaactcagatcagattcaatgagttgaacaatagcatatactttcctctaagtggagcatctgcaacaactataacaccaagttctactgacgtctttataaatcaaggggcattgcatcagtcttcgttatgcacacgctcgcatcaaggaaactactcgagcttcaatatcttctcaacagtttgatggattattgtcactgacatcatcaccagcacctatatttcatcagccttgatgtctccgttgttgctaatgggtgactacgtcttcgcctctggttgctttcgtcattgccgacttgttatttcgccttcatggttggcctactacgcaactaccgatagaggatctcatcattatcgtcggctgctacaacgctattgactggatcaccgacatcgtcatcttcatcaacatcctgtcaaacctcttcaacatagcctattctactgttgtttgatgcgcaacttcgttatcatatttgatcatctctattgctgccaatcgtcattaccatcggttgcatttgtcgtcgccgactattttcttcatcttcatgattggtggacttcgtcatcgtctttgatgcgtgtctatatcttcaccgtcggcttgctttcgtcaccaccgactggtatcgtcgccttcacggatggcttattatgtcgccactagtaggcatcttcatcttcttcaccagctgccttgtctgtcaccgactaattatttcgctgccatggctacacaactttattgctgggcgccttcatcttcattgctggctgacctgactgctgccgactggtttctttgccttcacggttgtgcaacttcatcacttttgattggtatcactattttcactaccaccaatatttttgccacctctagtgggcaatattctctctatattggttgtcttgtctctatgccaactgcgtcagctaccatcaatggacaattgtgactacgacaaaaggacacgctatatgctcaggggcctactagctcaaacacaagtatcataccttcaatttggacttgttccggatacattcaacatggattcatggtcatgagttgatttatcctgctcaactactggaccactcattattccccgtaagggctatcaactgaatacttgcaccaatcaggatttaattgttatatctattttggagtatcccataaaggataatcactcagatcagaagctattcatatgagctacacttggtctatatcacccggaagatttattactcgggagcatgttacatgcgtcaccctttaaagggtgtcgaaggcatattttttgccctaggcctaatatgtctgcagcccatattatcaggtgtggcctgtcacgttcttttagggacttaggcactttttgcttaggccaaagtgcgcgtgatcaagtgcccaatacctcaaaatccttttataccgcagttactcaactttttaggagttggtacaatgcatcttaaaaggtgtcaaacagtaaagctttatatagctgctccgctgacttttttatatatagtcaaggcactgtttgggtttatcaagcaatttattggatacaatatcattgctttttgccacgtaactgtgcatttttattgaccaatattatggcttaggctgattatatatcttggtcatttttcaggcggttggtaaattctttatgagtttatttactcggattttacaccacgtatgccgtatatttctgggtgtggtgaaaccatgtgtcttttagggacttaagcacatctgttaaagcagtgtgcacatggcgtatgtccaatactttggaaatttctttattcacagcattcaagcttttttatagctgttttgctatatgacttttcaatgatgttgtcagctttaggttgcacgcattatattttacaaagctgtcggtatatcactcggatcatgttatttggagattcacaccgcatatgctgtatattgatatcaagtcacttggttgactataattatcgaaaaccactctgttggttggattatttattccttgactatatgcttggtttgttcaactaaccacatagtcgggagctacacctattaggtgcatctagtcgatgcacctaagtctacattcaatttttgttcagccctccgtagtcttcagatttggtaaaagtactcgggggaccatgaagaagatgattgaagcactcggctttggagtaatctagttcgagagaagattatcttttcaactgcgaaggtctcaggggctactgtggagattatgggtaccccatacccacacggcatggttatccgactgttataagggatagcttatatctatagaatttgtaacagatcatgacttggttattacgtttccatgtatattatggaacggcctaaagtcctgggttgataaaattataaagtagatttaggaaaccgatatcgtattggttaaggtttctatcttgtaatcctggcccccatcctatataaggtgggcaggaggccctctagggggcatgagacacaatcagatcgtcagatctataatacacccggcggattcaaatccccaaacaggagtagggtattacctctcattgagagggcctaaacctgtcgaaatcttttgtctccgtatccatccacttttaggtctcgtgcgctacccccttttattattgccgaattcatgtttcgacagatggcttttatatttttagtattagttttgaaccgctgagaacagacatatagtaatcgtagcttttttttttatttatgttgcatgcctttaacttataagtataagttagaaaatgaaaaaacttacaaggattcttcgtacccttttcctccagcctcccttatttatatgctgtgttctttcatttttgtctaccaaggccatgatcagtcattcgtcaattgcatgaaaccatgtaactgtcctccctatccaagcaatctgtcagcgtccatctgcttgccaaataaaatataaaacaatatcttctttctatctcttcccctcttgcattttcatgtttattaacttctacaggtactctctccgttcttaaaaaaaaaaaagctaatctaggattggatgacacaagattcgtcgttttttttataaagggaggatgtagcatcacatgttactagagttcattcatttgagaaatgagaataggcaataccggaaaagaaacgtggttcacctccatgctatccagcggattacgcgagaattccaggcaacccaaaggtagaggcatggaccgacgaccctggggtgccgccaagcagcgcgtactcactacatcactgcagatcgataggctgtcaggctgccatgacctgcatgaaattaggtagctctagcagggtacgagcatagtattgggcctgactggagttgttgacatatagccgatgcaatataggacattccatagacttaactgcaaattgttttcccaacatgcgaggccttatttcaatggagagaattcttggtaaattttgtgcaaactaaactaattcctaaaaaaaagtgttctaaaattcatacagtctagtttgcaattaatggggcctaaatctgtaacatatggcatgcattgcccccttggcatattaactcgaaacatagtaaatacttgaccgaagcggaggacttgtgcactattctgtatgaagatggttcttatccatatagtgcccatttttgcataatttggggttgggatacgttaaaatcgagaagttggacctgaggatatatcatattctatggttgtataagcgtgcgatactgttaacacaagtctaaaactagatgattataaatcattttatttttgcctataaacttatttatttactataagaaatcagaagttgcataaacatgccaaacaggtttcaaggggaatagatgcgatcctatacaagatcttaataaataagcacatcaatgtttattaagcatattttagcatgatggagcctgcgcgaggggcttggcccttttgttatttcatactaatacaaatagatataatacaattgagctgaaaatcatgagtaaagtgctactccttaaatgagccaggcctgcatataattgggcttagcccataaacaagttgctcactatagggaccttgataggccataagccattttgggatattctttgtcttagataatgatgaaactagatgacaccccgcgcgttgctgcgggatattcatgtacatattactatatattttaatatatagcagttgtaagtcttagtaaaaaaataactaagtaaatagaaaggaaaaaaaagactcaagtagggttggtcagatgtccagtgcactgccactcaggtagcaagacccacagcgctgaaccttaggcacaatatcttgtaatgtaatggaaaatgatgctagtgatcattgttcttttaccgaatacacgcatatttccatgcctggtcttacattctttaataataaaattcctctgacattgtaaaagataaactaaacagcaaaaaaaaaaagagagcggaggaacttaatttttgcagtccattcgatttctatagacatgtttcgtagacagttatttggaagcacgaatatcaaatcaaacaattaaagcaataagatttttctaaaaagaagtaaggatagactaactgtgctgatatatcgagaacacactccgctagagacttgtatatgtcaagaagccagagttatgtgataccctgaatatgaattgaaaaaacaaaatcatttctaccaataatattttcctgcgtgctgtaaggttaaatcaaccatatatttcgccatcaaaaacaaaaataagccaaacattaattccaagacagaaattcatatttcagcgatgtaccgtggattgaatagaatgagtctacaatctataaagcttgcattcagtccctagaaccgccacagctgcgaccaattaggcaaaagtcataaagaaaaaagattgatcaatctctctattacttactgtgttgctgcaacagcagctccgtcagttcctgaagccaagacatgttcgctgaggtttcgccatagccagcggtgtgtatgcatccgccgcgggctgcttcagctcccatcgtggtgtttagcaaaaggtgatgtaacagatggaaagttaattagcgtgaaaaagaatgagcgatttactcagcatacaaatagctattgccgtcgattcgtatgccgtgttagatggcagccgttcctctaatacggagatgacgcagcagacgattggaagggttccgcatgacttggtgacgtctgcaggggaaggttgaaggtctccatgcctcattgcctggtgggctgagaagaatttccaatgctcctaatcaagtgaatgggccacggaaaggagcatattggagatgatcagatggttgagaataactccctcgaatgatctaacggttgatttttagtggatgacgtagcttcacagaatttgagctttatagcactaaatgatctttaatggataccaattatattggaagaaaagatgagcatcataaagttaataacgaaagaaggatcatcactaaattaatgatgagaaaaatacattttcggtacaaaacatgattagggacgcattttaggtgataaacgaatttccgttacatgaacttcatagattttgaaatgtgacataattctcagtttattgaagtaatgaaccatttcttatcataagaataacgctgatcctcattatatgacatacatattttattatcactactttataatatggtcttatatacactaccggtaagaatgattttgtaacaactttttgtaggaccgaatcacaagaactaagctaaccagagggggggtgaatggttggtatacccaaagacccaaaaacttttagcggaaaataaaagttaccctcgaatcgatggatcgcggtttgaccgaagatgttgtaccggtctgaccgtcgagatgcctccggtctgaccgaggtagaagctccagtcgaaccgccgagattgcctgccgcgcctgcctgacgccgccagtctgaccgttgtcgctccgccggtctgaccgccgccttgccgatgaaacacaaatcgaagaactctcgaagtagatgacaactttattacttctctctttgtttacaaagtgcaacaacagcactccttacaaaatctcgactaaactcgaaaccctaaaacacagcgctatgaaaagcaacacaaaagagataccaggaagcctcacgctccccctctatttatacatgaggtaagcagcccaaagccacgaaccaaactcatactagatgtcctaatccacctaggaaaccttctagtacaaaaaacaaacttaacataaccaatcataccaaatttggactccatccaaattcgactccgcatcccatacgcacacaatacctccatcgtatgccatatggaatcttcaccaaccacatgcatcaactctagcctgagtatcccgcatgatctctaaccaccacggacatcgtcttaccaccaagccgactcccggtccatcaccgcaaaatactatcccgaggcgtcgagtcacctacacatgaaccaaaaaagaaatcatattccgagaccaagctatcaccaacttgactcattgttagcaaacaacagtatcacatacgtatagtatccatctagaagtcataaatatgaaacaaactcggatatccaaagaaacaacccgaaaccgaaaccgaaaccgacacagcgtcggccggtctgactgcacggataccgccggtctgaccggaccacatatccagcaacacttgtaaatccaaacatctccaaaaccacttcgaagattaattccaaatatcaaaactaataatcaccgatgctaattgttcatcacagaataagaatcaaaacaccttgatctaacactttctaccttattagacaactgtactcccttcgttctattataagtaattgatttggtagtgtaaatagatatggttaattaaaaaataggaactctacatttactattactaaataccaccataaaagctattattccatatcggtgttagtacgcaagacgtaggagcggttgcattttacttgacaaatttcatcttctagttaattttgttttctttctaggatctactttgtctggtctagttatctgtgtccattttatacctctgtatatactttactacaaccaccaaaccttgttttcatatacttcacctctcttctcatcttatatatatttatgttgatcaataagcaggggttgattcctatatctctctaccatataaaacaatacaactatctctacgattcttacagttatgtagcatgtctgcatgtacgctacacagagcatgttagaagatttttattttaagaatgggtggcgtcggaaaagtagcacagcagatatacacactatcatgcacatcaattcaccaatccacggaacaactgacccactatctgtgaacccgatcagtggctcgagacaatgagctcatcagaatgcagccatggaatgattgagttgcaattgaggtcaagggatggaaaggggctagggcatgtctttgacactgacatttcgcatggtctagcaccaaatttggcccagtgtgcagccactagcattttgtgcctgaagctggtgtgtggagaaagcgatctacggaatgatccttgaccatgatcagtcgaaagcataatcccaaacttgggcatgtgcggatgacacgaatgcccgcagaatttcgctagcttgcctgagtgcaagggcaattgtgcggacaatgatgccgttgcatgccttggaacaaatctggctattcgtacgtgaaggaacatactgcttcgattcgacaatccttcctctcttttttttgtttgctccatgggtcatagttagctaaatatacatcggtcacgcccagatgcactgctagaacttagattattcacgaccaaccttaacaaacatctgatcgttgatagtcaaagaagccgcggtaggccctccgacggccatgtaatcgctggtcgttactacgtgcgtgtatgtggtcgctaataaggcgtcagttcagaattttctatagataacgaaattggtggaccgatccccttccccgccggcttagatccgctgcactggtgcaccagcaccgacgccccctacatggtcaccactgccgctgcacccagcggtcgccggccatccctgcgcgcctgctcccgctccaggcttttcccgaggacaagatttggccgccaataagccccaagccctagcgcctgcccagttggggcagctctgactcgccgaaaacggcggcttagcagttgggcatggaacagcggcgaggcgtgaacggcagaactaggtcagatgatatcccttgtaactttttctctgccttgttttagcgttgtggcttgaggattatgatatgttcgttccatgatatcccttgtcgtcctgtaattctattttccaaattacggctgggtttaattgtttaacttgaggattatgatatgttccttccatgagatgaaggaatatataagacctgtagtacatagccattttttcttgctgatctgtcaggctagtttttcaaaggaacaatttgtaactatgcccaattgcccattgcagtttaatttaccagttatactgagtgagcttgtgatttgtactactcttgtagatttgaacttagaatttgttatagatggcagtgtgacctccattcatgctctcatgtccattcatccatgaagtctcaacaaggtatattttttttcaacatggcgcataacttcttttttctttctgaatgattttgagtttgatcataatacttgagaggaaagtcaatttttcttgcaggataatctagtcaatatacaatgattggtttatttatctaaaattacgggattcttcttctgtgaacacgcaaatttgtggaggcatcttggcatattgtttaatgtttacagttcagtaacaagatatagcatggccctgataccgctgacaaaacgataatttcattttcaatcaatcatttatcttcccgtactgcaattcatggcttcttgcaggcagttgatagtttatttaacatattctacttattggtatgaatttgccctgctctatgttatcagtagcagagcacacttgcttccatttggatttattaaaatgtgtttagtttctcatattacagctcccttctcttcatggacagattccagtgtgacatagctaaagtgcaaagaaacttattttgtgtgcccagatgttattatttccaatggttcctgcaggatgatttatatatgttgatcaacattcttggatttgatcaacatcaatatgatatgcactgatagtctggtatatggcttgccacttcctttttttttccaagttcaataagatagcatacatccccaacttgtaatgctttggagaaatcaataagaataatcaacagactaatggactattaatgttgaccctaacttagatattgttaggtttacacttaccatagcttggtgtaaaagtagtatctagttcataacataagcattcagactgctctattatacaggctgaattatatgttctcctataactccacatatcgctattacaattcatttgtgtattgattggtttaaaccttggattttgcagtgttcacaacatggatgaaacaagccaagagttctacgactgggttgaagacctttcatgtagttgtagatgtatagtacattatggacgtacatttccaaattatatgtaatgaacgaattaaattatttgcatttgattaataaagagtggtcaataatttcgtttattggtctattaacatctcgttaatctaaatacattaccattactagtaaaaaatgtgatatcgtcattaataaaataaagaccacacagtgttgtcatcgttaaaaaaaaataacgacacaaatcatggtcgttaatgaatataacgatgtcacaatgtcacagtcgttaaagaaatgacgatggcagagaaactccgtcgttagtacaataacgacagaaaaaaagttagcgtgctcgttaatattattaacgacggagcctttaacgaccactgacgatcacaaaaaatatggtcgttaatgacctttaacgaccacatttggactttcaacgaccatattttctgtcgttaataatgatttctctagtagtgatgtcacacaagctagattatgtgaggcggagaacagggggggatccaggatttttgatcgatggtgtgtcatcatcaactctactaagaagcttggtttctaagtacagtcaataatacatatgaaaagtttaaaattaatggtaaacaatagagaaatgagatgaacccacctattaatctagaaatcaagcaatagagagataatttagcaatcatatgtctacatgcaattcaaagttgacgtcaaacatgagaagtagtagcctaaaaatagataaatgaatattttatatcaatttatatctaaataccatgtttaaaaaaatattttcaacaacagtttctatatataccgcatgtccaattggtgaaattaaattatactactatgaactaaatttattagatacacatgtaaataatagcaccgccactaatttgttttactgaacctgatgcatggaagaaaattagaagctcagggccttggctggcagttgcaaacagtagaactgctagctgcggccgcctgccgatgtgggcatgtggccaactaaattagtaagggtaatttatgggcagaacaaatggtgctcaattagtggttactgctgttttcgtgtgagtatggcgttaattggtaaggtgcactggtgtcactcatcgtagactagaacaggttacatgcactactagaaaaattatttgttaccacgaaaaaaatcatggtatcaatactaaaattatggcaatagatatatgttaccacaattttaaaattgttgctagccgttgtaataaatagcgtggtaataggttattgcaacgatttttatttagtggtaataaatttcgatgttgccacggaatggatgtaacaaaaaatcatattgcaacacttcacatcgttataataaaagctattgccaccactccatatttggcattagttctacgtaccaaattaaaggttcaaatattaatttatcatcctatctatttatttttttgatattgtgtcttggctaggattcgaacccaagatctattcttcacgcgtgctttcctttaccaactcacacacgcatcaattcttttggaaaatacatatcgttccatttgaaccttacctaactgagatttgaatcatagatttaaatatctaaaagatttcaaatgaaaatgttgtcacctataaaattgtagatctcatcgacagctataattcccatataaaatttgtctcaatttgtgtccatatgaaaaaaataagttaaattatgagacgataatttttttattgcaacgaatttgttgatcgtggcaacaaaaaatagtgaaaagtaccatgtactatgtaaattgccacaaaaattaaaattgtggcgatagaacatgtttttttttgcaacagtaagactttttgtggcgatatctcattttttattgcaacaaaaatactaaataaaacaacgattgtagattgttgcaaaaaaatataattatttgccacagaaaaattatcattgcaatagtataatatattgctacgaattattttttgttgtaataatttggggggaatagctcaattatcttgtagtgatgggatggaccaaaaggtattggtgtcagctgacaccatagctaacatgatggatccgcccctggtggagaagagaagggaggagaggaaaaaggagcgccaacctgtatataactccaaaagagttaaaatcaacatagtagtggattagatggaaatgaataaatgaagatttattatattttggagcttgtgtattagaggtagtctattgtatatgttaccttttattggataagtagatgatgtacactaaattagagatagcaatcatctttacttttaaacatgcacttaatttcctttcatttgtgaatgatgggagtgtcaacctctgttttagctttcatagttggttaagagagtactagataataatactagtgcacctactatgtccgctccccgccccgcgtcttccctttgtttaagaagatccctttacctctcctaaatgtaagattctcatccataaatattgatccacgatctatttacttatttcatacattgcaacacagtttttagaggcaaggtattaaaaaaacattcattgtatcttaggacacaaatgccatctcttccttttagctttaattctccgaagacctagattgccataatatttttcaatctcgcataacctcaccctatttatatacttcgtagataggtcttctatgataggtcatctagttcatccatcacatgaaaccagagacagatgacgaaaagataatgaggtgtggccaaatggcccatggccatgcttgcaaatttaaaatgagttatctttaatggcattgatattgatattatagtttagtaattagactcaacaagtcaatatttaacaacccatttgtaaacatgcataagaagaagcaagcattcaaaaaatatcactatctaccactggaccatggctaaatttggtcttcaaatactatgcagttctgcacccacaaaacaagagcaaaaggtacaatattttcttagtaaatgcttgtctaaattgattaatgaggatggtgtttggcagtaaatgctctgaaggaaataactacataattagacaattactcaagtggttaaaaaaacaggtgactctcatttctagccgggtctaataaaagttaaaaataaatttctaggttttgaatcttttgtcctcaatgtagattttgggaggacaagtggattggaaactcttcttttaaagggtggtatctatctttatataatattgtgcgtcggaaaagtgcgtcagttgcaactatcatgaatacagttcctttgaatgtttctttccatagggaactagtgggccagaatatagttaattggcaaaattttgttgctcgaattgtacgtattaaccttaatgataataaatatatgtttaggtggaaccttcatcaaaatggtatcttttctgtttgatccatgtatcttgctatgatcaacagtgggtatattgataggaataaagtgttacggaaattgaagattcctatcaaacttaagattttcatgtgttatctagctaaagggtagttctaattaatcaatgataatttagtaagaagaaattagaatggtagtactagatgttgttttttatgtccaacatctattctttgattgtcaaatggctaatttttttagaaccatttttatgtcttttaatttggtttacaatactcatatgttttataattggctgattgggatttactcaaagaccaaaaaacatatttcaattagagcatctgccttttatgttggctatatggttaaataggaatgatatggtttttaataaaataccaactaaagtttatatgcatgtactcatcagagcaatatactggttcggttttgacccaactacaaaggtgtgaagaggacattggtggttattcacgctgtatgtcgaaaattggagacaaccgctatgcaaatttttgttaactttggatggagatttaacaataggattgttcttgaataagtgtctctctttttttaccgtggcatttattattgtatcgtttctttatcctttattaaaaattattatacttggttttcagctaagaactatatatgtggttgtagcttccgttaaagtaaagctcagatattatccattatctaaaagaaacttagcacttagcaataagccagtgaaaaaactgtagatattgacatttattcaaactagctaattaaatgtccataccttgcaatcgtacgtaagttaaagaaagataacttaattatatattgtaaagcgtatattataatatacacgaagaatggatcaaaattatccatattatactactatcctattctctcatttctttcattctaatttgttgtactaacatatattatattaaactataagtggtggaggcagacactaccatcaccgctggcttttaaagtagcagagattcacagtgcagctgctatgtcaagggggccggtgcagcgcctgctttgcgtcttggatgcacgcgcgcaccgccgcttcctgctcctttgctcagctagctagggcaagtaatataatacttcatatattgcctctaagagtgtcacattggattgaatgatgagatggaggagagaagtgaggagagagatgatgagccacccctaaatcaagaggtaacctctacacaaatttcaagaagagtgtgagagtattagatatattggtatttttagtactagaggtgatacattgtataggttgtctcttattttatgagtgaataaaatagataaatttagaggtggtagtcacatctattatagcacttgcccttacctgatggatcgagttgaatcatcatttcagaatgtgtggcatcgggaaaggagcataatgcacccttcaagtcattatgtactttcaggtcattatgtgcactagtactgaagccagtatcagagcgatgatcaaatccatggagtggaggtgcctgcgtccgagcatgagcacaatactggataaggtttaatttgcgtgagttctgcatatggcaaataagcataactttgtttaagggtgtgcttttttgaattgtgctctgtatgtgatggctgccacaagagccacgcagtaacgatcggcagttgaaaatttgcagacacaccccatatatacattttggttaattattcacatgagctctccatgaagaatacgggttcgtcaatagctcgactttaagtaggttgtcagtatgactataaaagaaaaatatgttgatttctattttgaatccatatgtattccattatggccacttttataatggtctttaccgcaagtagaaacgattcgtggcattggttatgaggctcttgctttattgcacaactatatcctgttcactataatatttgttattaaattgatatggtttactaaataaaagagagatcaattgtcaatcatttctactactagtaaacaccaccataaaagtatagtaggcaggaagtaaaagcagctattgtattttactgacaattcttaatgcatctatgtagttctcctgtatatcgagaaaataaatttgttgacagattccatcttccagtttagttttctttctaggacatactttatcatttcaaataaatcaaaccggcccatgattgttggttccttagaacagtcactgatactactctgaaccagcagtgatacttgaatatcactcttggttcttgttatgaaccattactattgtatcactgctagttgttcttgttataaatcggcagtgataggaaacaagcatcactggttcttcataacatgaaccagcatttatactcaattgaccggacagttcggacctatccattgaatattggaaaaggccgacatattcaaatgatagttttttccttttatgaaaaactttatggcaaaatcgtagagttcgacgagttctacaacttccttggatccatttgtgtcagggttcaaaatttccgaacgaaatttcaaaagatttggtcatatcggaccccacccccaccgatacgattttattttttaaaaaaaattctcatgaattttagcaatatttgtttaaatttaactaaattttgtttgaaatttcggaccaaaatttcggaaatatcaccatatcggcacccctaatacaaataccgaaaacgaaagattgaaccatgtattttttttatttagatgttcaaagtgttgggatctatttccacggaagaatgtttaaaattttcaaatgacgtcgtatggggaaaagctatatatgaaatttggactgcccggcaatatctacaacattatagttaatgctttttttttcatttgaagttatatctacaatgccaaatatgaattacctgttttttatagtgagacatcagaataatattattttcatacagaaaggatgttacacgtcgacagatgggtcccaggtacgaatcatatatatacaacagaagcgtcgcatgaaaaattgcataatatatttttcaccaggttaacatcttacaaaaatgatactcccgaaatgatatatatatgctaccatgttttacagttcatcaaacatattaaggaaaaacatctcaagcaattaaacatataaaattaatagggcaaccatataaaatacaagaaataaaaaaaacacataaacaagatgttttacatttgaaaaaatatagtataaaggaaacatcatgcgaggtatattttgttagcaccttaatgtaactgccctaggattcgtgcaaggtgtatatatacatggtgtaactgtgggtacatgctctcgcgtgcaaaaaaaaaaaaatcaactcatatatatcagtctgccatataaaacaactcatgctatttacatgtaattttttagttctgaaacatgtaccttgtaaagagcttgctaaaagatttcattttaagaacgggtagcattggagaagaagaggactggatgttcactttaggatgcatgacagttcatgcaccagcagaaccaccagctggcgatcccgggcggtggctcgggagtcgggacactgagctcattgagttggaattaaggcaaaaggatgaaatatcgtggacctctctcttgatctcagtgactgaatttggctcagtgtgtagctggcagtacaattttgtccccgaagctggtagatagccaagtccctaacttgggcatgcgttgatgacaagaatgcgctgggattctcttacgagcttgcgagtgaagggcaactgtgcatgcaaacagtgatacaattccgatctgccgtaacgatcgtacttttttttttgggactagtaaacatgagaaatgattagtatcttctcaaaatgaaggtacttgacgactccatacagaccacaaagctttagagatgatctcttggtgacaaaaaagaaacaaagtggtaagagaaaatcactaataatatgtgctacaagtataaactacatattctacgtgcatatatatgttagtgagtgaaaaaaaaattggaggaaagatcagtaattaacattacttgaaaagaaaacatttgtggatgtaatagaaagaccataagatctcgtgtcgctctccacatgggcaacacgagaggtgacgccaccgccaactccctcctcccccttcttccttctctgcctcgccgccgcctgagcgggcgtaggcaaagccgcgtggccgcaaggacggcggcggcggggctgcgcccagcgtgcgtccggtggtcggggcaattgctcggggcggcggtggtggcaaccgtccagatccgcgccattctggccggatctcgtggggtggaggctggcggttgggctgagtggtggcagcggcggcggcagagcaccccgaccagatccgcgctgcgccggtcggatctggcggggatggcggctggcgatggcagccgggcttgagtggttttggtggcggcgaccagtggtgctggcggcagcgacggtggctgctagcagcggcgggcgcgaagccggctggagctgcgctggcatgcagggagatgggacacggccggcgcacgggaggaggatgcggtggactggcgtgtcgacgacggcgatagccagagaggaggcgaggaaggaggtgaccggcaatggggaagaaggagagcgacggccgcatgcgggcatggtgggttgtgggcgacagcgacggcgtgagcagtttgatggctgcggagcaaggccggaggctgacacggcgcgaggaggcgcggacgatggcgatggaggccgacacggcgcgaggagatgccaccggtggcaacggaggccggcgcagcacgtcgaggcgcggtcggcaggtggtggaggctggcgcggcacgcaaaggctaaccggtggggagagccggtgcagtgaagcccacgcgcctgtggaggcttgacggtggtggagcaacggggcatcatttgtagactcgcaggcggtaggcgacgggtaaaaacctagcccggccttggccttggccgggctagcaacgacggcattttcgaacgtctttacccttcttgagggcgttgtcgtgccgccccttcacctccagtggggctatcgggtgaaaacccagtcttggccctcttgaggccttgacggacaacggcggcggtgtatccatcgctcctctcgttagagatgccgtgtaggcacccccttgccaaaatctcccaagcaattggtgcaagctctctctaattcatattctcttatgtcggcatcctagcttccgcaagttggccacgttggagggcttagggggagaatggctgcattcttctctctcaccctctcaccctcaatcccaaagatttagatagagctgtgttttgtgtcagttgtaatggtcgggttttgggcgatgtcggctgtgttccgttgtacggcttagtggctgtcggttacacttagcggtggctggtctgatgctagccttctcctgagtctatgtgttggcgttgtgggtgtgtgagtggtagtatactttttttttctttttcctggttaccatcttcaagggttgtaattttgttattttttcctactctatcagtagaactttacactctctagtgcgattcgttaaaaaaaaacaaagaccatctcgttcagtttcctttatatggcctacatggtatatatagttatcaacttctgatcaacttaagtgtatttttgcaggtggacaacgatttcacctcacggttgtcattttcgcaggtggtcatttagctcggagaggcctacctacctgaaaaaaatgtcatcgtctggaaatttgcttttctagccgtgctttcttcaaagttaagaaagtactccctccgggttgataattcttgtcattttggacaagagcatggtctcaaaaaaacaactttgaccattatttttcattataatatgtataagaatgttaaaaaatatatgattttattaaagtactttttaagactaatctatacatgtaatcaccatatatgaaagataaatattttaaaaatgattcataatcaaagattgtaaagtttgacctcacccttatctaaaatgacaagtattatcagtctgaagggagtatacttactacaaccaccaaccgagtattgattcttcttatatgtcccgtggctacttccactctcgtattcataagctttttctatccatctacttcatcctttctatccatctacttcatcctttgcaggaagcaaactatcatcccatccaagtaagtgattttcctcctgtcgtacgtctgtccagactctagatctatccctggcaagtgataggtaatgctttctatttagcactgttcgtgtttgtaacatatacacgtactacagcaacactgttacatcagtttacttgagaatggatggcattggaaaagaaacatactgcatgatctgcctacctcttacgttactctagcaagcgtcggagccaatgtctgacgaccctgggcttcgggctagggccctgggctcactgtgtcaggcagccatggattatttgtgcgacgatggaggtggttgggcccaagcccttggactgagagtgcagctagctagctagttgttgccttccacagagacatggctgaatcatgaattaaattttcgcgtacgtggttacttatgtacttcttttttcatcatcgatcctctcgtcagagttcagacatgattcttattcagatatataagggctggtttttccatgtggatgcatcatgggtttagtagggcttccaaagctcaagcatacagccatggagacagggatacggatagtctgcttaaacattttctaccccagcgatcccagtttgtgcacttggatgaaaattggtagtgtgttttgcaggaaattagacatggatttgattccaatggaacattctcaattgaaaaaaatagcatccattcctccaagtttctcgattttacaagattttgtatgcattctatgcatccttctccaacgctaacatatcggcgcaacttgaaccgcggaaagctcgatctcttccaagttgtattaaatcagctctcctggtcgaattcaacacacacgtgaaactccaaaatggacgacacatcaagttggtgtgctgccaaaaacatcgcagcgctcttctccgagattctctcgctgcatgcttacaaatccgaaacacattatcatgatgtggtcaagccaccctaaacacgtgtcatggtcatcactatccgtgccgtcccacagacgttcaggtcacgatcgacgagcacggcacgacgaagcaggaaaaacacaggcctgcgagcgtgtttccaacacaaacaggcgtgagcagcatcactactaagctcacatgaattcaaacttgtaaaggagaaaactagaagccaaggttgaacaagataggaccatcgtctaagattcgagtacaccacatatacaccatgccccagtccatagtgtccatgatctgttagcactaatcttgacaaggtttatgttagctagatatatgttatgggtgttcacgtattagacatctaataggattcatgtatgtcatgtactggactagcgtgcaagtgtagatggctcaattagtaactgcacgtgcgtgtgctgtatgtgttagtaggagtaagtctcaggctgttatagctagattatatataggatcagcaagtggtgcagtagaatccgtagctgcatgcatatatatgagtggagcacgtagcatgacttgcgaggatggctgatgcattcgtatgagttagccaagtcgttgaagctgcagaatgcatgtacacgaggctacttaggctttgttcggcaccctttgtttccaacccctctccttcgttttccacgtacacgcttttcaaactaataaacgttttgctttttgtaaaaaaaacattatataggaaagttgtttaaaaaatcatattaatccattttttaagttaattttagctaatccttaattaattatgtgctaataagctgttccgttttttatgccggagggataaactctcaaccggcacaaacgaacgcaaccttaagccgccgtgtatcacttggttgtcaccaagtgtgtgaattgcaataagaaaaagtgtgcgtggctggtgtttgtcatcatatcccgttgtgtgttaataatcctcaaaatttatttcttgtgtgcatgctctcgtgtgagttttcgccggaggtagttcattgctccccggcaatttaaagtgttgtccacactactacaaaaagggttattggggccggttgggaatcgactataagtaccggttttccaaccggcacctattggtcggcaccaataatataaaccggcacctttagctttgctcgagaaaaaaaaaagagccggctcgaatcgagccgaactcactgagcaccgtagccatgtgcccaaacccaaatccccaaattatccacaaatcgtcaccaaaattgattgacatcacatataatcattcacaaaccgtcaccaaaattgatcaaaacatctaatcaaaaatctacaaagaagagatgagggaggaagaggggctggccgccggtgggcccctcttgtgccgccgcccgccgcctcccctccggccagatccggtggagggaagggcgctgccgctgcccgccgcctccctcccgccagatccggcggaggggagggcgccgctgccggccatcgcccggtgcctcccatcacgccgccgcccgccgcctcccctctggctagatcctgtggaggggagggcgctgccaccgcccgccgcctcccatcacgccgccggccgttgcccgccgccttccatcacgccgccgccgaagcccgtcgcccgccgcagagagaagacgagagagagacgagaaccaagagaggaggcgagagaaggcgagagagagggagatagagatgaggccgataagtttgactcatatagggcgtcggcatggattggctcggctcggctcggcttggtttagaaaggtgccttttttttaaataagtcgaaacctataacttattataggtgttggttctaaagaagaaccgatacctatggtataggtgtcggttttctttaaaaaaccggcacctatattatattaaagaaaactggcacttatattataggtgtaggttcttctttagaacgggcacctattgttgtttaaaggtgtcggttttatgtattttcagtctatagaggagggaaaagcattataggtgccggttttagctggtccggcacctacagtgccgatctctatgagctttttttgtagtagtgccactaggcatttggtactacgggctaacggaaaccccaagtattataagcataaaaggataacaatgtttaagtataaacatatatgtgtgaactcacaaagacagcaaattataaatggaacaaaaaactgaacgagacaacttttgtatttcaagtttatatattgcatacgagttgggttgtacatttgtaagttcaaacgagggaaacgtaaggaaatccaacctcactagaacgggatcgcttatctctaacgggctgaaagcctcatcactatcgggtaaggcccccgtcagtgggcacaggtcactgatgtgagaaaatatctcaatcgggctaaagcccgtcacggatggatgctatctcaatcgggctgacaaccaagcccgtcatagatgagtatgaccagtcaaaccaccatagttaggaacccgtcatggataactaatctcaatcgggcacaccactaagcccgtcacggataagtagtcatctccatcgggcatttagccagagctcgtcaccgataggtttgaccctacgtgttgagtcaaactagtcccggttcggatgacttatctctatcgggtgtattctaaaagcccgtcacggatgactaatctctaacaggcttgactctatagcccgtcacggatgagttatctctttcgggcattagctaaatgcccgtcagggatgagtttagaaccaaaaaataaataaaatttgtctttttggctagcctcaggcctttgctagccatgcccgctgcaaaaatgacagaagcatatatatacatagtcccattcccagcaaccccattcccagcatcaattcacatataccatcacagccaattcacagccaattcatatagatccattcccagcatcacatcagccaattcacattcatattccatcacagcatagccaattcacaaaatcaaacacatatacattcacatccacaacccattcacatatatatgtcattcacatccatttttctctccaaaccgccgacatgcatcaaaacctgcaaaactaagttataaattggaacaattttatatgtaagtagaaatgcaagtatatacagagacgagctacctaggacattactctaaagaatataatcgtattacaaagaatatttacaaaaatcaaatgtttgtcgcatatgcattgcaaatgttctgccattccgagacgagctacctaggacttcactctaaacatccctttcggtgacaagatatcatctagtatgaattgtgctatctcctctctaatgatttcgatgttgatttccgaaatccttgaaataaattcctgaatgttcagcgccaagttagtctacatacttgtaaatttgtcatcctatgtgtgtataaacaattgaattacacacctcagggtcgagcaatgtcactttgtctgcaaagctcctcatgttatggcagacatgaaacccgcactggtcgccaacttgttggcgtattgggaagtctttcttgtgaccgagtttgggatgcccatccttatgcctcccgcctcttgccacgtattggtcccatgcctcattcaaggtagattcgatggccgaccaatcgtatatttctggcttgatattggagttaagctagtgtatcaaactccacttcggcgttattaccagaagaatccaatattgcctgcgaaattattaaattgccagttacatactacagttgtacgcgtcgagtatttgagtataagtacggtacacgcttactgttgattgtaggcacacatagtgaagtccttgtcttgatgggcaaataagcagtccttgatatagcccactatgtttgctcgatcgtttttcagcgttgtctcattgatgacagctggatcgagtaaggcaacatggggtgctttacgatggacatgcttccaggttaacctacgagcaagacaagagtcacggtaagtgtaatttatggacagtcactaccatatcgcgtaccaagaaatacttacaaggagtagcacttaaggaggttggtatcgatcgctcgcaccctatagaggtctcatagatctttgaagtctacggcgatgaaggcagtaggcctgaggaacggctgaccaccgtgctggcctaccatggaggtctctctattattcctccttgcgttggacttctccatgtagtacccatgcaactccttgcatgaaaggcccatctagaataaggcatcgtctccgaccaatggcatgcccaatgtgaattcggctggaggctttggaggagctcctgacgccttgccaagatcaagcttatttggggctaatggcacctttacttttcctctccccgttccagcagcttttctgcgtgtgtcaagcttgggtggagaagatttcgccctcttgcttggagttatattgatctcaatgttgtgcttgggccattgaataaaggtcccacgtgcagccccaagggtcagaatctcatcattaggtgggtgtgggatagtgtagccaacccaattgggcttcactaagtccacctgaacttcggcattgctggctagcagctgcgccccatgcactcaggtctccggggtaggcttgaatgcttgaccctctgcggcaggaattgcaaatcctggtgtcatcctaatgactagggtacacgatgtgggttcctgcgatagattcattagtgtccttagtatatgttgcaatgtattgtggtgctaatacagtatatgcgttattaagttgtttttaccattatgtggaccaccgcggcagggccttcaagctgttctgcaggagcctcagttgatgtgcagctgctacgcctctgcgtggggctcacttgtactatgggaccgggagtggcatcggtcgacctatccctgatgcgtgcctccatccgagcctccatacctaacagctcggcagtgagctcttctctaagctcttctttaagctcctcccgaagttgggccttaatgcgtgcagctttctacgccttggaaagcttgtgcttcttgtactgccacacgtattggggaaacccaaactttcatggaacattggagccaatgccccttgttcgtccacggtgttcttcgtttcccaacgctttcgtgaagatgtcatcctcgcgtttttgtgagcagacctcttgggaggcctgtctctcagcattcagttcgacctgcggtacagttaggacgcgttaaacgaagaatacgatacaacataatgaaacttattctatgtgttcaacttacaattttctggtacaccgcttgatcttcgggatttgggaacgaaagagtttcgtcactattcttcttcacccatgcccttgcccagttccttgcccgctggaccgggatatcagcaagcacttgcggggtgttagattccgctgcagcttcatcctccttgtcctattcagactgtttccccgcgtagcctccggtgccaagccggtgcgggtgaaggttccttgcctgcagatcacggtaggcctggctttttgcccgagactctttcgttgatttggaggcatggaactcatcccacatgggtcgggtgatgaatgggtatttcccaaatggttttggctgggcggggttgaggacgtactccatgaccaacgttgtcttgaaatttttccaacaattccccatcttgcggatagtctgccgcttgagtcctgcctcggcctctgtagggtatcggaagctttccttgaactgcctccaggcctcttcttcttcttcttgagggaccagatcgatgtggtccttcagaatagtgaagtttcgcctccctaggactccgcatatcgtagggaactttttgacagctttcgtcggagccgtcggatatcaaacatcatccacctctgttatggtgtagacttccttaggaatcttattctgggtcctaggattccggctcgaagtagtcccagtagtggtcgtcgacattggttcgccttgctacaacatgtcctatgtcactgttgtacggggagaaagtactttttaaacacaaaattgcatctacacacattctctgatggtttgatatacctctatctcctacctgtgttcgcctcgtcgacggaaccatagcatccatgctcaataaggccggagcagccgaaaactcgacctcgacatcagtatcccactcgaacttgctatcaatgtcactaccataagatagtggcaacggtagcaagttctagtgggatatggatgtccaggtcgagatcccgtctggtccggccctaaggaacatggatgctacatatctgctgacgaggcggacgcagatagaatacacaggcaaccaaaacctttcctatccaagatccctaacgttattatcagcaaactcctagattgcgtccaagatcatttcgttagggaacccttattcccatagatacaacaaccatctttggatactgaatttatgggaatggggtttcctaaagaaatgaccttgaaagcaatctaggatattggtaacgataacagatttctagaaatgttgtatttgaatgaaatgttctgtttaccaatttgtcttggtcagtaccgtgcaggcagtaacccgaccaaaccagatttggcaactgggacacttcgtattctcctaaatgccataatttcagtaacttcatttgataacagatttctatgcatatccatcccatttccctcaaaatcacccaaaacagcccatactacacaagtcacatatatattattttttgtacctaaaaaaacaaaagtcatgacatataataagtttggcctcagttttgctaagaaattatgcatcaattaccatcatttgcaactgcccccacccccaaaagaaattaagaacaattgtagatggtctatcctcatgcaaaaaagaaacatccatataaaaacagccataataattcaaccatcacagccgacatcaattcatccatcccattggacccaaaatatcccaaaaattttgcaaagaactatataagaacaagtctagagggtctgttcttatgaaaaaaaaaacagtcatataaaaatagccataaaaaacacaggtcacataccaaaattcacatttcccccaaaataagtcaaccatcacagcccacaccaattcatccatcccattagacccaaaatatcccaaaaattttgcaaacaaccatataagaacaagtgtagagggtctgtcatgcaaaaaaaaacagccatataaaaacagccataaaaaacacaggtcacataccaaaactcacatttcccccaaaataattcaaccatcatagcccacatcaattcatccatcccattggacccaaaataccctaaatattttgcaaacaactatataagaacaagtctgtccttatgcagtaaaaaaatagacatagaaaaacagcccacaacaattcatcccaaaaatggtatgttcttgagcaatcatcactggccattcatccatcatagcccacaatatttcatcatcacagcccacatctaaacatttttcccaacatcccattctcccccaaattcatccatcacagccatataaaaattcatcactagctaacacatataaaaatgcacaagtcatcacagccatataaaaattcaccactagctaacacatataaaaatgcacaagtcatcacagccatataaaaattcatcattagctaacacatataaaaatgcacaagtcatcacagccatacaaaaattcatcactagcacaattcatatgtagacattagcatctaaacattgaatcaacaaataatcgcactatcacattatcgaatttaaacattatcatcgaatcatcaaatcatcacatataacatgtacacagcaaatcatcacattatgcatcatcatcggtgaggagtacctacctcgcttggggacggcggtcttgggcggcgccgggctcagggacgccgtggagggaggcgtcgggctcggggacgctggtcttgggcggtgccgggctcggggacggcgtggagggaggcggtggccgtcggggaggccggatcttgagcggccccggcctcgggaacggcggtcttgcgcaacggcggcggtcggcaatcagtagagggaggcagcggcgtgaaggaggtcgacgcggcggctaggacgaggtcgacggccgctgggcgtagatctagagaggaggatatgaggcggccgtggtcagtgaggccggatcttcgagggaggaggaggcggcagcgttgaggacgaggaggcggcggcggtcggtgaaacggccacggcgtcggtcttgaggactaggcggagaggaagccggcggcgggatcttgggcatggaggacacggacttggagaagaggccggcggcggcggcggtcttgggtgcggaggaggcgctggcggtcggggaggccagatcttgaaccgggagacggcggcggcagtcggggaggcggtatccacgacgagggaggaggcagcggtggatgttgaaccgggaggaggtggcggcgtcgaggaggaggaggcggcggtggatcttgaaccgggaggcgtggagggaggcgccgacggcggtggatctgagagagtgagagtgtgagagagtgagaggcggcgtcgggatgaggattgactaaataaaccctagtcaatcctcatctctatcgggcagactactatgcccgatgcggatgacactcatccgtgacgggcgttagtactctgcccgataaggatgaaagtcatctgtgacgggcattagcactaagcccgatagagatggaataatctctatcgggcatagtactaaagcccatcacagatgacttattaaaatatttttaagttataaaaatcatttataattaacttctacccgatttaaaatttctattacattttatttatcacatataattaacaaatgtcttatttacatagtttaaaattcctattaattttttaaaatcatataatctacaattgcctttctcacatatagtttaaaattcctattaattttttaaaatcatctaattgacaaatgcctttctcacatatagtttaaaattcatattacttttttaaattcatacaattaacaattggctttctcacatatagtttaaaataacaagtataattttttaaaaccatataattaacaaatccatttcttcaaagagttttaactagaatggcatgaaacatatgcaattcattcattaaggctccaatacaaattaaatacatcattcacagtgatatgccttccgaatggtctgaacgaacgtaagccacttcgtctttgggatcatcgtcaaggtcgatttgaggtctgacatgaagattcttgttgtattcttcttcatcgacgatgttgtccacccccacaattcttctcttgccatccctaacgatgtgcatcttcttgtttgcggggtcttttatgtagaaaatttgttcaacctgcttcgttagtacgaatggttcgtctgcgtatccaaccttggccaggtccactaatgtgaagccttccttgtcgaccttgacacctgtgcggatattcacccaactgcaatgaaacaaagggactttgaagtttagatagttcagctcccatatctgctctatgcggccgtagtatgtgctcgatccagcctgatcctgatatgcatctatacggactccactgttttgcactgtgcttttctcatcttatgtgacggtgtaaaatgtgtatccattgatatcgtacccatgccatgtgtcaacatcccaagatggaccccttgccaacctttgtaatatctcacttgggccatcggtcgaccgtactacacgatccttgaaccattcgttgaaacgagcaccatgttctctgttgatccaaatatctgatcgaccaatattgtcctgtcggaccttcgctaaatgctcctcaaagtatggggttacttcagccatatgttgcagcactgcgaaatgagcctgcgcgtaggaagcttgatctagaacaattctttttctgccagttgtgccgacacctgccaaccttcctttgtggcgagacgaaggaactccaataggatcagtctcggccatgtaatcgatacagaactcaatggcttcctcggtcatgtaaccttcaatgatgctcccctctggttttgctctgttccgaacgtaggacttcagaattccaatgtacctctcgaatggccacatttctctcataaaagctggcccacatatttttgtttgcttcactaggtgaacagtgagatgaaccatgatatcgaagaaagccagtggaaaatacatctccaagtgacacagggtactgacaatatcggcctgcaaaccatctaggtcttctggatctataatcttctgaccaattgtattgaagaaggcacaaagccgttggatcatgtgatggacttgtggtggtagaatgcctctgatagcaactggcaagatctgtgtgattagcacgtggcaatcgtgagacttcattccaaccagctttagatcctccaatttaacgtacttacttattctcgcgcaatagcccgaaggaactttaatatctaccagacatgatagcattgcgatcttctcatccttcgacaatgtatggctagctggtgggaggtacactcttcctgtcttctcatctgtaacaggctgaagttcactgcgaatgttcatctcctgtagatcgagacgcgcattcaacccgtcctttgtcttgccaggcatattcagtaatagccccagcaagctatcgcacacattcttctctacgtggatcagatcaatgcaatgacggaccttaagaacttcctagtgaggtagccgccaaaatatggattttttcttccacatcctcttcttgtcctccttgctacgttttcttttcttcccaaactcattagtaatgtccttcaccatgttgtgtacctgatctccggacaaatccgcaggggcagaccctagttctttcttaccattgaaaattttcttcgttcttctaaaggcgtgccgtagggggagccatctcctatgacccatgtaaaccatctttcttgatttcttcagccacctactgcgtgtatgttccatacagtcagagcatgccttctttcctttcacggtttgtccagaaagattacccagcgcgggataatcattaatggtgcagaacaatagaactcgtagcgtgaagttctcctgaccatatgcatcccaagtttccacaccctctttctacaaaatctcaaggtcatcaataacaggctccaagaacacatcg

SEQ ID NO: 9240 - DNA, 78876 bp, Oryza sativa
tcctatagcaacgatatgttttttttttagtttcccatgacaaataccaaaacactgcaatgtcttgtgataaaatttgccctaaattaagtatagatctgaaaacaagttccagtcttacaacctgagttcatatgccctaggagccagcaatacatgatcaagcaatacatgatcagaaagagctggatctcacaggaacgccagccagagaagcaatgggccgggcatgctcttttgtctcaaccattgtgtggaaaaggaaaaaaaacctactccctccgtttcacaatgtaagtcattctagcattttccacattcatattgatattaataaatctagacatatatatatctatttagattcatcaacattaatatgaatgtgggaaatgctagaatgacttacattgtgaaacggaggaagtagatggtaagtatgccagaaaaatacttgcctgacaatgacatttgctagaatgctcgtcactttgctagccccttctcctctgatatttatatatagcacaatgcattatcctttttgtcattgttatcacagatatatatatagagagattttatgcctacagtacaaagggatatatagagctgagtacaaaaacacttaatcttcccatgcctgacaagaatatgaagctactcttcccacagtggtgaatttcttaattgggaatgggtaccgtcagggaaacaacatacaaagcttgcacaattcgtgttgcgagcggcttcatcccacggtgttggtgatgcttgaagggcgagggattctttagttgtgaattaggggtaccaggataaccaaattttgatggatacaatgggctattctgaacccggtttggcagaaggtaaagcagtatacacacagtctagcatcaaacacaagacacagcagttgaactagcttgcaatagcaggctctcctgcagctggtatataattcatttgctttggtcaggaactcaggatgcctttcagtacgttatccggaaaaaaaaattaaattggtggcagctcagtacatgattactctgattattttccatcatggtcgtgcactgaaaaaacaccagctgtaaatatgaaaccgaaaagccctaaagttggtcgctgtcgtcttctaactatacagtgttgttcactcagctagaacatataaccacaaaccgtcggaatgtcatgcacaaagtattgatcaggctgcactgtgcacagcagctactcccaaaaggttcatgaatctctcccaaaatccaagtttgtgattattctgatttgtttctccatgaatatgaaatattgatttcctagcccacccatccatattttgaataaacattgtgaatctttaaagcacaaagtgcatatgaggggttactatcctttttgtgttgtttgttggtcctactctagatcacttcttattgaattaaaaaaaaaatagccacgctagtactccaagctagatacaaaatgattttttctactatgttcatgttataaattaaatactacatgttcatctcgatcttaatacacattgatgtgatattctcaagggggttaattttggaagccaataataacaaagagaagcaataaactaaataaaatacatattatgtagggcagaaaaaaaatctagtcatcctctttacctgtatggacttgttcagctaatcccccaaaaaagagattggatgggattgagggggaacaattccacaccacaataggtgcggatatataaaaccccctccgaatccgtaacaatcccctctgggagtgctaatcgaacaaggactaaaagaattcatcgctttgtgcttgttttttctctaggaatacaacttcgtttgcagcatgcatgcctgattgtatgcatcgttcattgattaaagtgagctttcaccacaacaatgtacatggcaccaggaacatggatccctattttcattattgcacttttgaaaactcaaattctacctgtcatgcttcaatttattctatggtagtcctattttttttttcagagcatgaattgaaccactacaacaaggcactgatattgtttaatacccctcggtatggcatgtgtctaccctcttgccataggcttgtgccatggtagctgccgaaggtgttcgtgtgttgggtccgctagtgaatctctcttgcttatataacacatttcttaacttcgcctctagctttccgtagtttgtttctccattgatataccttctctgtatcgcgtaagaaatgagctagcccttctctagtatactgccataaaccagtaacttattatcaggggtatttgtcactttgctggcccttattttatatagcacaatgtattcatctttagtgttgtcatctcgcatatatagagatattttacacctgcagtgcaaaggaccaaagctgagcaccacaaatagcggtctcacacactttcctcctcactagcaagaatacgtgcatagccactctgtttacacttgcttgtatctgtgaattcctttacataagaatgggtggtgtcgtggaaagagcatacaatgcaccatttgtgttgtcaaggggtttcgttccattagagcacggggcataggtactgctcgaacgacatggaatttgagctagcagtgtttgtgggacagcagctataaatttccatagcagcatggtatcatgatgctatgcacagatatccaaatcctgtctcgtacgttatggtgctgatcaattaacgcacgtatgttggattgtgacgatgacatacatgtccatcttatgtcagccaagaaaattcagtagtacctactcaaacagtaacttcaaatctttagtttcggtaaaaaatcactagcagcaggcaatcaaatatggctgtcaccattgaaaaaatatcaggactaaactacttagtaacacagaaacctggatttaacaacactaaattaaaaagcaatctgacagaatgtttaagcactagcaaccatagagtcctcccattgttcaccaacaatacatgaacaaaaagagttgaatatcacaggaactcaagccagagaagcaatcaccagccatgctcatttgtctcaaccaactgacggtaataaaaactttgagggaagatgggatcatgccatcgaccatgatgatgtggcagagaaaaaacctctcatagacaacaagtacaccagcaaaagaaaaaacccaatccaataataaggacatactgtaccaaggaaaaagatctttttaacttaaagagagatgtaccaaataatagggacatattacaaaataggtattcacatggaactctcatttggatgggtttcaaacatgttctctaaacttgtcctttacaccagtctgtcacacacctcatgcatgatactaatgcccatgccactacttgtgcagaagtgtcacacctcgacttggcacaatacaaacaatgtttaagagggtgtgccacgtagaacagcgaaccatcctctacagaaccgcgatgatggtaccaatccgaggaaacactattgaaaatttttatacctatatgtaaccacgggtaatcatgggtagcaaccttcatccagaaacagcaacatgtaaaaccaagtgtgattttggtttatttgtgatggaaaattggcaacgaaatatttaaccatgagttggttttgagtgagaaatttggtttggattattggcgattttaggcgtcagtgcttacgactaacgtgggtcaggttgcgataactgtgcctagaatcggatgtttggtttacgtgtgtgcaggtgatcgaagtcaaccgcggtcaatgacgaggaccgggactatgctcagggaggagcagaggtccagcacggtcaagaggccatgtgacaaggttggactgacgtcatgatccctgatggtcaacctgggtagacggcggatcgggtctagactcagggggagttgaggtccagaacgatcgacgaagccgtgtgacaaggttgagatcaagatgacgcgcgatggacgaacaccgtgtcgggaagacttcgcaacgggcttcacaaggtcaagtgtgcaagtgccgtgttcgcgaagaaaatggagaatagaagaggagctacagtacttcgaagtactgtagcatgcaggcatgcactggcgtgtgcatgagatggcaagtgcagctagctgattggctagctagcttacacatggggtcggttggcatggaggccaagccgacgcctgattggctccaggcccgagtgcttggctggcagggaggccaggccgagcaggcccaagacaagacgacggcccacggcatcggcaccatgcgtgggcaagtgcgggagatcgcgcaaggtgcgcgcgcgcggtggacacgcggcggcaaggaattcggcgcgcacgggcgtgggacccaagcggtttccgcgagcgcgcgcggagcggctcggcgagacgcgtggcggctccggactgggcgcgggcgtgcgtgcgcgctgtggaaaaggagacgggacgcgcacggcacgactgggcaacgtggcaagcttcgattcggaaagacggagacgacgcagatcgatctcccgatcggtgcatgctgattggctcggaggagccttctcacggatcatggggcccacgttgaggagcacgcgggcgcgcacatgggaggaatttggtgcggattctttgtgaaaagaggatcccggtgtggcaagagacgtggcttcaatccaggctacttccttaggatgtaaggaacaacgtaaggcctagattgcatctgagttgggggtttcgccctaagggcatttgtgacaatgtcttagggggtcttaggctataaaaagagaggtggatgcaatggtggagttgctccttttgtaatccttttgagatgctcgatgagagagttatggtgtgagtttggagggtgtttgcctgagaggcttttgtattaggattagtttggagtgtgtttgtccgagagattttaaatttgtgttaatgttcctctgaaggtgtatgtttgctcctagttgagcagttattttgcatcacctatgaatgaaatgatttgaaggatttcgttttttccttgttcatttacactccgcaatttaaattctgcttgcaatttgaactttgcgatgacgagtttttgctatctcctcctcacctctcttctagtttcaggaattccttttctcttcctcttctagtttcgggaattccttctctcttcttttctagatgcggcttctcaaatagccgcggttctagtaaggattttaagaaatccgtcttgatgagtattttcgggggcaagttttgaattgctatattcaccccccactctatagccgttcttggtctttcacaacaacaatataagggtgagtactttcaatggcttaggtgtagggacatggcctatccttcattttcttcaacctagactatgtgaaggggagagtgagtacatgataataagagagagagagtacgtacttccatattcccctagtcactagaaaatgtgaatcatgcaagctttgcaaattctttattttaaaaatatttttcaaaatttaagttgggtttttaatataccactgaaggtatcgagggcactaatattggaggttaataacaaagagaagccataaaacaaaataatgcacatggaaaaatattacaaccatgaacggatccaggaatacatgatcttttctgcatcatgcacgatcagctgcattgttcattcataaagtgagcattcatgacaaaattgtaacgagcaaccggcacatgaatccgtgttgttttattggtgtacagtcaaaagctcaaaactatatatgccataccaccttctatctagcagtggaactattgtctctatttttctaatgcatgacacacttgacttttttatttggattattctccttctctaaaaatatttgtacaaacgacaaacatactatacatgcttaaagtacttttgatgacaaatctagtgatgctcttttcagcttacttaactaagtaaatagaataaccatttcagtcaatgcttgaaaagaattttaattgcgcatcatatattaaaaaacagtgatagtacaaatattccagagacgtgcaaaacccactaatactggccaccaacactacttgataccagcctcctcctcaattttactcaatggtgtcctaggaaaaaaaattcaattgcctcagaggtgtaaagcagggagaccctatctctccccttctgcttgtccttactgccgatcttcttcaatctataatcaacaaagctctcaacctgggagtcctctcccttcctattcctcaaattgacataaaattccctataatccaatacgctgatgacacgcttatcattatgaaggcatgtcaaagagaagttttctgtcttaaaggcatcctgcaatcttatgccatatccactggattaaaaatcaacttccacaaatcttctatgatcccagtcattgttaatcaggataaaattgaactcctggcaaggacttttggatgtacaattggagcacttccgtttacatacttaggtcttccggttggaacaacaataccaaaaatctgtgaatttgcacctctcattgatagagtggaaagaagactcccggctataacgatgtttttgaatcagggacagagactaaccatggtcaactcagtcctgtcatccctgccaacattttacatgtgcactcttaaaatccctaaaaaggttctgctgcacatcgacagagcaagaaggcattgtctttggagaaagtctcatgaaattgatgcaagaactcactcactggcagcatgggacaaggtctgcagaccaaaaaaaagaggggggggtgggtgtcatcaatttagaatttcaaaactgtaccctcttgatgaagcatctcgacaaattctttaacaagaaaaatctccgatgggtaaaacttctctggacttcattctataccaatagatctatgccaccgcatgcattacaagactttggatccttttggtggaaagatatcactcgactaatacctctctttagaggtatcagctctattcaagtcaactctggagacacagttctcttctggaaagatctctggtcagataaattatttcaaaactccttgcccgctgtattctcttttgctattaatgaagatctatctgtcagagcttttcttcaaaataatttggctcaaaacttcctcctgcctctatctcctcaagctattcttcaattcaatgaattatcagacctcctggagaatattcttctcattgatcaaaatgatatttggacttactcatggggaccaatctacaagacaagaaaaatgtatgacctcttctttgctcacattacccctcaccctgttttgacatctatttggaaaagcaaatgcagcatgaaagggaaggcattcttctggctccttcttatggatcgattaaacacacgagacatgctacaaagaagacacctttctattcaggatggaccttcttgccgaatctgcaacttagatattttggaggatatgtctcatcttttcttcacatgcccatttgctcaaaactgttggaattcccttgcaatctattgggatgtgaatcttgatctttttgacatgatccaatctgcgtttggaaattttggtcaaagcttcttcatggaagtggtggggactgcatgctggcaaatttggttgaaaagaaatgccctcatttttgacaatgtccaaccatcacttactatttggaaagctgatttcaaggaggatttcactcttcttttgcatagagtgaaggaggaggacagacctagatatcaatcatggattgacaacattttttaatctttccccctttgtaaatattttttgtaattttgttgtaactcctatttatatttaatataattaccacagtaggagcctctcctactgtttacagtcaaaaaaaaaagtacaacatgtctacccttttagttgacatcgacgtgcgaattcaggtagtggcggagggtggccatatatgtcttgggctgtcggttcctctctgttgtttatatcattccttacctccccaatggctttctgcagcctgtttctctattgacataacttatttgttacaaacatagcaaatatgagttggctttaactgttgtacttagctagtgctggctgtggaagcattgtgttgtttgcctaggatcggaatgggcatcattagagagaagacaagcatactgttctttgtcatgaccatttcgatacatcggctcgatcgtggatagtgcctgtgttgatctcacacacaatgcttcagaacaagtctcgttgaacttttgtcatgatttgagaataacatagatacagatgtcctaattggcgaaaaaaaaaactcgaagtggcatttgatttgtgcacatacctacgtgaagctatattgtgtcgaaaaaaagctacattaagctatacccactaaacaaataacaatatgacaaacaagtgctagcttaacaacgtgaatgcataagccctagtacatatagcctcctccccccttagatcatcagcaatacgtgaacaaaaagagttggatcttacaggatctcagccagagaagcaataaccagccatgatcttttgtctcaaccaatcggcacgtgataggaaaaacttcgataggagatgagagcaccatcggccacggcattgtggaagagaaaaaaaaaaggacatatgtcacacaaatgtctagacaagtaaaaaaagaacccaattaaataataaggacatatattgttccaacgaagaatatcttgataattaaaatatacatatccagaaattggaatggattaaaaaaaaccatatatgcacagcatccctcatttggatgggtctaaaacatagcatatacacatgtgtataggcctatagggcaggcattgaaaaaaattccaataaatatggattgacatgtatggccttgtttggatccttcgggctattaaatagccctatggaattttgctatttagaattattaaacgtagattaccgacaaaaccgattccataacccataggctattttgcgagacgaatctaatgatgtatattaatccataattagcagctgattactgtagcatcactgtagcaaatcatggattaatatacctcgttagattcgtctcgcaaaataggctaggggttatggaatgggttttgtcagtaatctacgtttaatactcttaaatagcaaatagccctccggatccaaacagggctatatatatgagccggagaaagcgtatcacattttcattctacaactcatgcaccacatgaacaaggctaactaatggtccttggctccttgccacaacctgtagagaagctagcccacctctaccggcctagcagatcaaaagcctgttaaacagccgaagcccctgttgaaaatatggtcatattcagcatattttaatctaaaatataaagacaatgaacatgacatttttaggaaatgatttgcaagtgttaaacagtagcaacatcatgaacatgcttaatatacagtaagcataggaatagatatggcaatgcaatgctaacattgcaactaacagtaccagtaaacactaaaataagacataaagagaagatgtgaggagattatactccaagaatgaccctccgctggagtttggggcagtattgcctccattggtgttgacgttcccgttcacctccttgtctccaatgttgctgttgtctttggtattgcccgacatgttggagagacgatgcagaggaagccagagcagttgcgtcgagacgctcccaaaaaaccttatcgcctgcctacccgtgcaggcactgaagcggacgggttccggaggctctactcgtcccgtacacctatgcgcacaggtgaacagaaccggggaaggatcttgcagcacaagaggaagaaccgaagcaagagtcaggaagaactgaagaacatctgtacttctgttcattcccattggcggagtatatgtgcacgcgggagtaacgttcgggatcatcaaccgcgcgtgtttaattcagtaaccgacatgctctttaatacagaatcgatttccataaccgacatgctcgttaatacagaatcaatcaccatgtgttattaccgtatgttacaaaaagagagagagagagagccgcccacccgcccctagtccggcacgcgcgcgtgcggctgtctgcccacaatatcaaccggtgagactctccactagctccatgtttaagttgagacctcttcacttagatttctaaggtggtactattacccatagcactaaatgtaggccattggaatatattgggacttaattgggcctagcccattaatctaacagcccctagcaaggcaaagctaaaattaaatcgtcgtcatcatgatttgacagataatgtttaagaacaagtctggtcaaactttaagaaaagagtaattttatggttcttgaggaggtaccatgaggtatcactttttctattgttaatttgatacctttaggtatctaggtaccatgaggtatcaaattttacactaaacttttgtacctcatgctatctactcaagaaccgtagaattgctcgctatatgtaaataacagaggagaatggctatatataaatgaacaaatagtaacttattgtcaggagtacttgtcactttcctagcccttctctgtcatttatatatagcacaatgcattcatcttttgtcattgtaatcacatttatagagttcaaagggatagaactgagtaccaaaaaagccgatcacaaacacttgattttctcatgcctgacaagaatatgtagctactccgccgatctacactgtttttttgcattgcgaatttcataggtggaaatgggtggcgtccgagaaagaacatacaaagtttgaacaattcatgttgcgcgtggcgtcgttcgagcagaagggagaggcctgctagcgatgccgatcagacatgagctggagattttctttacgcatcatgacgctgcgtacagagatcgggtaaatcaccctgtacccccgtctgatcaccatcgcactactactcgtaggtttagtataactccaacttctaaatttaactttaggagcttcaatttctaaatttaactccaagagttagttctagagtggtgttatgaagcagtctaaacccagctctatctttctagtttattttgtgagaacgtttcacatagctccactatcattcattttaggtagaactgaaagttaactgagtctaaataaagtttccattatcttaaaaaaaaggtagaactgaaactatttggccgggctccaactctaaaatagataaagtttaaactgaagccatgccaaacagaccctacatatgtttacattggaatatcaccaagatctgtagcagccaagaacctgtagctaataaacaccaggcgatcagcgagcgtcctaaccatatgtcccattggttcatgacacggcatctgccaagaaattccagcacagctagcgaattactaactccaaatctcttagttcggtcaaaaagctctagcggcaagcaaacaaatatggcggtcctgtcgcactgaaaaaaaattgagaattaaatttattcagcagcacacagaccaggatttaattcaatagcaacaacataaaatgcaggaacagaggaaacgaaccaaccaccagccactctcttgtgtctgaaccgcttgcaggaaccaggttgagcacctcgtgtgcacactgtagcaagtacggcaaaaacaaagcagagtgcaaacagagagatgaggagcagagttcggggcaattttcgttggttttctcttctccgaaagtaaattgcgtgattacaactaatgcatgagctaaactatttatggaccatatgccatcgtcgatcccacgttcaccacgcaaccaactcacgccacatagatcaggtgcacacacacgcagctggtcgacacggtcaccttgcgatcatgaaactttggcttcaataacacattagtttttctccatacttgtctggtttgatggccgtaaaggatgctaatgccttcttacctgagaatcgaaatttgctttcatacggtacgatcttgattcagcaaaatgtcataaaatgccttggctcaattgaccttctgtgtttccatatgttcagaaacttgacaaattcagggtgttattatctttctataataaaatgtaacgtaccacttggttcttcgctatttctcagactcaacaagcacaagcagtttcaggtaaagcttgattcttctcgtaagtgcttcagaacaggtttgccgttcaccatgttgtttgagatgtttgcttgtcaggtatatatagacgtatagtaaaccatgctttggcctgatcctttttcttcgtgaaaatcccactaaggatttcagcctgtgatgcaaaactctgatccaaagtctttgaattgcgtttaatgtatagatgattattatgaatagtagaataggtgctccttgtgcgcttgtgcccccaaatgcttctcggtcatgtttttacctgcatgcacatttttccttcattagcattaaatttctgggttaattaggttcgtgtcattacaaattttctgatatgagaaaataccactactttcgtgaaacctgtcgtgtgccattgaaattttttaaaattcgaaatataccatcaccattccttttttgggaaattttgctacagaacacttgttatatgtgattttagccctaggacactatccaaactcacttttgggggaaaacactccataaatatggtaatttgccagtggacaccgcgctgattaaaataatacttttcggttgggagagggagaaatcgcgtgaaaggtcaaaaatgcccttgggcccacatatcagctctatctcccatctctcttctcatctctcagaggcgcgctcgcacagggcagcgtcggtcgcggcggagatggcgaggacggcgaccggcggagtggagcggggcggcggcggcggtggacgacgagcacgcggccggcagagcggcagcgtcggccgagcggactggcggcggcggcgagcgagcgcgcggtaggagccacagcggagggcggctggcgagagcggtggaccccatggcgacggcgatggcgatgcaagctcccacctcgctcgccagatggtgttcaccgagaagcctcgcggccgtggctccgtcctccccctcctctgtggccacccctccacccacatccgcctcgccgtcggctgccgaccgccaactgccctccgcgcgcagcagccggcggcggcatccgcccacgccgcgcaccccgtctcccttgccgtggcatccgccctcgccgcgcaccccgccatcctcaccaccgccaacccgctcaataccaccaccgagatcgccaagcaggtcgccgacgcccgtcccatcctcgcctgtcgcgcgctcactgtcgctgccactccgctaggccaacgctgccactccgccagccacacgctcgtccgccgccgccggccgccgtcctcgccatctccgcgcgcgaccgacgctgccctgtgcgagcgcgcctctgagagatgaaaaaagagatgggagatagagctgacatgtgggcccaacggtatttttggcatttcacgcgatttctctctccttcccaaccggaaagtattattttaatcagcgtggtgtccactggcaaattaccatgtttatggagtgctttcccccaaaaataagtttggatagtgtcctaaggctaaaaccacacataacaagtgtcatctagcaaaattcccctttttctatcagctccttccatcgtcgggcccacttgtcagggtgtcttgagtctccagctgagctgctgcctcctctctccccagtaaaaacctagctagcctagcgcctcctccagttcacctccctcaaccatccttcccaacgaggccttttacaataccttccactaggagatggtagtagtgtagtaggaataaatccaattgattaaggggaattactcctctcaactccctctgcaatgcccccacaaatcccctttcattagggtcccgaatcgtttgccaatgatagtgccttaacccgtcatcttcatggccaaccattgagttttttttggcgcagccactagttcgggcgcacttcgttgctgttcgtttccaggctcttctcctcactctgctgcatcctggaagacatgggaaactgtggtccggtgttggaattgacctggtatatgatggatttcttttagtccatgttcttggatttcttttcatggattttttttacccatgtgtgtttggatttgatcgatgctatggttgaggctttgagcaatccacgaggagaaatcggaatccatcgagatgacgctttagtgaattcaggagcaaaaactggagtagcaattcatgagtagaaactacatagttggtgctttcgctttgcccaggcacgggagatggctttggcagagacgttgctgctggttcgccgaggcatcgcggagtcagtcccttcacacgagcataccgcggctcgaggtggcggctgaagattgaagacacctgacgagtgcatggatccatcgaagacggaagaggatgctaacagaaaagatgacggagatggcatggttcgaattttaaaaaatatatatatagtgacacataacagatttcacaaataatactggtacttttttaaaacggcaaatttctaatggcattgatccaattaacccttaatttttcgttgtagtttaccgcatgggtcttggacacgattcttattttttgttatattaaatgttcatttttccttcatttcaggaataatagtcaaggtgttccaatttgggaaaaacagagcagcagcataatcaattttgaagataaaaaatggaatatgtacattatcttgacttccacacaaatttatataaaatggaacttcacaacgagggtttcatgtgcatggttacaactttagtaatattatctaatgctgtagtttactgtgcatgtcaatctactgtaaaatgaatcctgattcagtctgtgtggattatgctaagcatatgtcatcctatagtgacgcataggtgaataatagtgaagattattaacctagaaccatgaaggatgttaagcatttggtatcaagtttcgttcagttgctggaaatcaagtttctaagcaataggtgatgaatgtttcattataaatttcacacacctggaattgtatatagaaattttatgaatatatagtcaggttatataagtgtcatgtcatgtaatagagagatgaataatgatttccattgcttgttgatactacactttgcagaagtaagaacaatgttgttaaagttagaatgttgctattagatgatattatagttttctgaagttcaaaatcaactaaaacctgaacggttttcttatacaattgactttctttaatatgatctgttgccaggaagtggtatttaatgtttgtgttgtggtcaagcaaggataaaatatgtagcttcaaacggtaatatttagcttctagcattggaaaggccagctgattaaagggttaggttgaattaaaaaaaaattcctttctcccccctacgttcactatttatcctttactcccaagagctttggttatattacctccatccaaaaaaaaacaacctaggaggagatgtgacctctcctagtacaacgaatctagacaaaatgttgtgggacggaaggagtatatgcttgcagggccatctatattgtcattccacagtaaacagcaatatcgttaatgatttggaaacaattgcaaaccttgtgtcgttaatgtgtttcttttcttcttaaatgggaaatgatatgctaattgtccaagagtttaattaaaccatgtgtaattcttgttatggggaatatattgtcaagatattaattagtagtcaacctatgcattgtactgctatttttattgattatttgatgaaggccaagattagattaaaagaacgttcttttccataaaccttgcaacttttttaatgctatatatgttcccttgtcaaaacatatatttttcagatgtcttttagtcatttcatttacaacatcaattattgtcgtagcattagcacggacatattactagtcaaaatagtatatacttcattaattgaggattgtagtatatattgaccaaacaaaaaagatttagtacaaagtacaaactcttttaacgagaaaacattttggttaaaatgtcaaaatagcactaaatttttgtactagtacgtctgtaaaaagaaggacatttaaaatttccatgcagacatgcaagaatcaattatagaataaatatttttttggccaattttcaattgaatagttgtcatattataactagttgataaatcttagaggggtaaatgtgttttttttaagagtaaatgtgtttttttaactatggatgtataacgtcaacgcacggtataagtcgatggcatataagaaaaagagctaatttcatagcatgaaagagctaatttcaagtggaatataaggccaccgataaattttcagtggcatataagaaattccctcgtatattaatttcatcactctaatggaattatccatgtgcctgactacccacagggagaattctactagcctttagttcagttcatggtaattgccatggaattattcatgtcaagtgcaatttatccgataattaattgtatgtaaattgatcacgtaacacagttagtaataataaaaaccaagcatcatatacagaactaataattagggttttacctcgaattgcacgcaatgatagtccgactgaagaccatgcattcctccatcccatgtccatttatcgtgtcgactacaggaataattccatcaacatatgcagataaacattgagcggaagatgtaacagccaaaatggacaaacgagatagaggcatagagctctgcaccaatccagcaacctagcttaaaactcgagacaattttgagatcgaattggcaattatatatctaactataactctaactttaatccctatcacatcagatgttttggacattaattttgagtattaaacataaactacttacaaaaattaattatataaataaatgctaattcacgtgataaattttaatttttaagcctaattaatccataattagcacatgtttagcatcacataggctaatcatggattaattaggctcaataaattagtctcgcaaataagtccagaattatgaaatggattttgtcaataatttacgtttaatacttctaattaatgttcaaacatccgatataacagggactaaaaaatttagtcccaaccaaacagtcccataatgaattaagtagggaattactacaacatatttagtttttcctagcacccccactactacatgatagttttacctggacgccaccccttttgtttccatgcggcccataactagaaccgcacgaaaaattgggggggggggaccggcgctggactgtcgcccgcacgggaaaatgcattttcccatgcgggcgtcttaacccgaccgcacaggataatctttattatcccgtgtggtcgacttaagagggctgtacggaaaaaatcgattttcatgtgcagactttttaagtggaccgtaaaaaaaatatctctcttttccctctcacccacttcaaattttccacactctctctctctcttcctttttcgtttttattctctctccccctttactctcctcgatctcctcccatcccctctctcggcctctttttctcctccccacccctctctctctactctctctctctgcgcgctaccgtgtcatgacgactacttcacctgatccacccaaaggcacggatgatcaaggcgacgaaccaatctcacacaatgggcagagaaggaagtctgcgcgggagagacagcctaatagattgtataactcgagtgtgtggacccagtgatgttgggctgggccacggggagtgagagaggcccattagcgcagtgctataagaggccggcagggaacagattgaagcgaacattgtagaaacacttttctgaaactacttcaaatctctccctgttcttgctattcttccccaaattcctcttcctctgctgctctcgttctcatctcaatcccaaaattcctcctcgctaaaccctaattcttagaagtcgtgacaatttggtatcagagccgctaccctggagaagccacgctacacatctcgattgcaactccaagtcgaagctatggagaagcagaacgtggatttcggcaaggtgctcttggagatccaggagtcgttggtggcgctgaatcatgcacaagccgagactcaagcggcggtcgtcaagttggaacaaggagccagcagttggaaacctcaagtggaagccgcggttcaagagctgcgtggggaggtcgaagagatcaagcagcaattggatctcattggcaaatcacagcaagcttccgcatcggcgtcttccccttgggttccgtcgacagacggggaaaggaaggcgccactgctgcccacgccaccgccaaattctcttatggcctcggtggagggcggaagcaaatcggctcaaagccatcatcagcttcagaatcaccggggaaagacttcaggaggaaacatgaccctaggtccaaccccggtcaagggtacgtatgactcacactccttccagtttccaaaatttgagagttcgggggttgaaggtggagaaattgacttcgaatttggggagagacaatataatcaccgtgttccaaagttggatttccctaaattcgatgggttagatccccaggactggcgcatgaagtgtgagcattatttcgatgtgaataacacgtttcctggtttgtgggtgagggtagcaaccatctactttgtgggaagggctgcatcttggttaagatcttctagagctcatttgcgttttcctatatggggggatttttgtgctgctgtgtcggaaaaatttgatcgcgaccagcatgaaaatttgattaggcaaatggatagtattaagcagtcgggaacggtttgggagttttatgagagatttgctgagctaatgaatcaactattagtttatgaccctggggtgagtgcaaaatatttgactcatcgattcattgaagggctgcgaagagagattcgtaatcctgtacttttacagagaccaaagaccctcgaaactgctctgtctgttgctttgttacgggaagaggtgttggagaatcctcaagtttccagtgttaaggaagtcaagagaatggaaggcaactctggttttcgatcggcaggcaagggaccgtggccgttgccgcaaccaccagggaagagtggaagtttctctttgatgaatcgtcctaaagagaagagaagcactgatactgttcgcagtccaacaaattcgacagataaagtgactactctcaaggcttatcgccgagcccagggattgtgttatatttgtgcagagaaatggtcccctactcataagtgttcagcctcagttcaactcaatgtggttcaggagctgttcagtctctttatggaggagggagctcaggaaagtcgggaaacctcaattatatcagatgctgaaacgggtgaactaatggcaatttcagtgcaggcagtacaaggttctgagccagatggaactatgcgcattttaggacaagttcaaggaaaacaagtgttaattctagtggattcaggcagctcagtgagttttatcagttcacagatagcagctggtctaaaagggatacaatctcttcctcgacaattgtcagtcagagttgctaatggtggtacactctgttgtgatgctatgattcctcagtgtgaatggcaagtgcagggtcacagatttagaaccactttgagaattttgcctcttaacagctatgacatgattttgggaatggatttgctgaaggagcacagtccaatgttagttaattggtctcagaaaactatcagaattaatttgctgggagcaatggtgactctaacaggggttcagtctgaactgtctaggtgtgaattgttatcagctaaggagatgcagcaattgcaacagaaacaggcagtagcccatatggttcagctttgttctctctctcaagatgaggaatctgaagaaataccaaatgaaattcagttattacttcaggagtatgcaactgtttttgctgaaccaaaggggttgcctcccacaagacaattcgatcacacaattcctctaataccataggcacaaccggtgaatgtcagaccctatcgttatacacccgcccaaaaagatgagatcgaagctcaagtgactgaaatgttacagaatggcatcatacaacacagttctagtccttttgcatctcctgtactgttggttaagaagaaagatggatcatggcgattctgtgttgattatcgccatctcaacgcgattacagttaagaataagtatcccttgccaattattgacgagttacttgacgaattgtcaggtgctcagtggtttacaaagttggatttgcgagcgggatatcatcagattcgaatgaagactgaagatgaacacaaaacagcatttcgcactcataatggtcattttgagtttagggtacttccatttggcttgactagtgcaccagccacttttcaagggatcatgaacaatattctatcctcattacttcgacgctgtgtgcttgtgttcgttgacgacatcttaatctacagtcgcactcttgctgaccatatcaaccatttaagggctgttttccaaattttggttaaacatggtctgaaagttaaacagagcaaatgctcttttgctcaacagaaactgtcttatttgggtcacagaatcagtccaaatggggttgctactgaagaagataaaataaaggctgttaaagattggcccactcctaagtcactaaaggacttgagaagcttccttgggttagcaggttattaccgaaagtttgtgcaaaattttggtattttcagtaaaccattgacaaatctgttgcgcaagggtcagcctttcatttggaatactgtgacagatgcagcttttcaaaccctcaagcaagcactgatgtcagctcctgttcttgcaatgccggatttctccttaccatttgtggttgaaaccgatgcatcagataaagggattggcgctgtgttgatgcagaatgatcaccctatagccttcctcagtaaagctttgggacctcggcattggggtctttctacctatgacaaggagagtttggctatcatgatggcagtggatcactggagatcatatttacaacatgatgaattctttatcaggacagatcatcgcagtctctcatttttggctgaacaacggctgaccacgccttggcagcataaggctcttacaaaattgttgggacttcagtacaagatcatttataaaaagggtgctgataacaatgctgctgatgctttgtctcgctgtcctgtacctgaatctgttgctctatcagctctttctgtttgtgttcccgaatggacacaagaagtaattgaaggttatcatcaggatcctgattctgccagtaaagttcaaacgctgtgcatcaatagttctgccattcctgacttcacacttaaaaatggtctgctatacttcaagggcagaatgtggataggacataatgtgcctgtgcaacaaaagattttagccaatttgcatacagctgctattggtggacattccggaattacagtgacttatcaccgaatcagacaactttttgcttggacaggtcttcgtgcagatgttgcaaaatttgttcaacagtgtgatatctgtcagaaggctaaggtggaacatgtcaagtatccaggtgcattacaaccgttgccggttccggaacagtcttggcaaattgtttctttggacttcattgagggtctgcctcgctcatccactttcaattgcattttagtggtggtggataagttttccaaatatgcgcattttgtggcattggctcatcctttcacagccttggacattgctgaggcatacatgcagcacattcatcgcttacatggattaccagaggctcttatttcagatcgtgatagaatttttactagcactctttggacgacactattcaaattggctggcactcaattgcgaatgagttcttcttatcaccctcaatccgatgggcaaacagagcgagttaatcagtgtcttgaaacctttttacgttgttttgtgcactcctgtccctctcaatggagcaaatggcttgccttggctgagtattggtataatacttcatttcattcttctttgggagccacaccatttgaggtattgtatgggcacaaacctcgttattttggtctgacagctgcagctgcttgtacagcaccagagttggttgattggctgcatgaaagggataagatgcaaactctcattcgagaacatgtgctgcgagctcaaatgagaatgaaacatcaggctgatttaaagagatcggagcgctccttctctgttggcgattgggtctatatgaagcttcaaccgtttgtgcaacagtcggtcatcactcgcactaatcgcaaactttcttttcgtttttatgggccctttcaggttttggccaaggtgggaactgtggcttaccgtctggcactgccagattccagtttaattcatccggtggttcacgtctcccaactcaagaaggctttggctcccgtagaacgggtacagtctcatttacccgttttgcctgctgatgaagctgcagacatttcgccttgtcaggtgttgaatcacaggcttgttcgcaaaggagctaaactggtgaaacaagttcaggtctgttggtcccgccaagatcccgccgccgtcacctgggagaatcttcaggaactacgtcaacgctttccacaggccgaagcttggggacaagcttcatttcaagggggggagaatgtcatgacgactacttcatctgatccacccaaaggcacggatgatcaaggcgacgaaccaatctcacacaatgggtagagaaggaagtctgcgcgggagagacagcctaatagattgtataactcgagtgtgtggacccagtgatgttgggctgggccacggggagtgagagaggcccattagcgcagtgctataagaggccggcagggaacagattgaagcgaacattgtagaaacacttttctgaaactacttcaaatctctccctgttcttgctattcttccccaaattcctcttcctctgctgctctcgttctcatctcaatcccaaaattcctcctcgctaaaccctaattcttagaagtcgtgacataccggctccgagatcggctccgcgtgcacacgtggcgggcgcagacggcggcggggccagcagctcagcggttggcgcatgtgacaacgatgacgatgaggcggcgccgccggctccgcgtgcacgcgcggcgggcgcggacggcggtggggccccgcacggctctcggcggcgggcgcgacgacgatgacgacgacgaagcggcaccaccgactccgcatgcatgctctggatctcaagcatctcctactctctttcttctctatggctgctacgatagcaaagtggtgtggttgtgatgttgaactacaggcttccagtctcttgacaattgctctcaagcttgagttgaatccccagccaaaccgctagtggtggctgctattgctaatgttctggtagttgagactgctgtgctactaagagcatccacagtagtaaagtaaggtgttctctataaaacatgtatatctcagcaataaacttgattaataataaaccaccttaatagattgtctacattgatatctatagctctctcatgcattgcctcgtttttctctataaactatctctaaattaatagatagctttgctctctctcttcatttaatatcttaaaagtagaaaaatatgctgacatggatctcttgtagagagcctatagataaccattgtgggtcccctaatttctccatgccgatataaacggtgcttgagttcttgctctcttcttgctttgatctcactcggctgtttttcctagagagggtttctctggctgtaactagtactactgcaggctgcttgtttttggtttctactaccaaaatgacttggtcacgcggacggcggcgggcgccacgacgacgacgacgacgacgaggcggcgcggccggctccgcatgcacgtgcgccagcaggccgtggctggtcgcggcggtggcacccgggtgcgtgcggcgcccgcggtgattttcgcttttttttaattatttttggttatttttgttccgtgcgggtggtataatttcaccttacgggataatcgattatcccgtgcggtccacttaatccgaccgcatagaaaaatgattatctcgtgtggttgggtcgcaatatttccagacgttttggtgtagacggacaaatcctccacacgaaaaaatcattttaatcgcacggaaaaatgcttttcgtagtagtgtcgtgttactacacagattagcagaaagtagggtaacgttcccggatgaaattaatctttaggtgacaacatcaaatcgatcactcctaaattgaaccaaattaatatgtagtatgtgtagttcatgatagtgaccttttagtttcccccactgctggaaaaagcatttttataggcggccaaaagcaatttttgcaggcggaggggaggactgcctgcaaacagacaacggtgaaaatcatccattttcgcaagcggacaaatggcccgtctacgaaaatccaataaaaaacaaaaaaaatcgcctcgccaccgctgtagcattaggagccgccgccgctgccctcccccggcctccctccggccagatctgggaggggaggccggggagccgccgccggaggggagcagcccacgtcgccgccgctgccctcccccggcctccctccggccggatctgggaggggaggccagggagccgccgccgtcgcactaggtcgccgccgcgtctgcgcgccgccgcgtccgtgctcgccgccgccgccctcccccggcctccctctggccggatctgggagggaaggctggggaaccacgtcgccgcagccgccgccgccctcccccggcctccctccggccggatctgggagaggaggccggggagccgccgccgctgcaccgggtcgccgacgcgtccgcgtgtgcctccgctgcgcgtccgcgcaccgctgccgcgcactccgccgccggtggtgggagggaggggaggggaggggatggggagctgataagaagccggtggtgaagggagagagagagttgagaagatagaaatgagtagtggggaggggggttggagtagtagataaggatcaaagtttttttttttggtaggtacaatttttgcaggaggaccatataaggtgcgcctgtgaaaatctattttcgcaggtgcctcttaggtggtccgcctgcgaaaatagattttcacaggtagacagcgaacttcaccccgatttatatttttgtaagcggtcatttgactcctaggcttatgtccgcatgtggaaaaagactcctacgtttgaaaaaaagctttttctagtagtaccctttgccagggtatctttagctacaagtcattctttcaggtgatcaggtctacatgtatatatatagtacatgaaagaatcagagttctcaaaaatacaaacaaccgcaaatcctaattggtgtgtacgccctcggcgtgcacgcgccggcccacatgtaccggcccacacgtcccatcctcagccattctcagcgtatgcgctggcgagacgcgcgtttatttttttcggaattttttctctataaaactgattcaaaactgattcggttaagataagatttgtcttttttccgaagattattttaagtaatagattgaaaagaaatctatacgtgaagtcaaattctgaaaactttcaatccagatttgaaaacattcaacctaaatttaaaaactttcaacctagatttgaaaactttttgaagttaaattttaaaaacttttaacttttcatcccaaatttaaaacttttcatcctagatttgaaaactttcaagccagatttgaaaacttttaactcaaatataaaaactttcaactcaaatttaaaaactttcaactcaaatttaaaaactttcaatacaaaatttaaaaactttcaagtcaattttgaaaacttttaactcaaaatttaaaactttcaactcatatttaaaactttcaatacaaaatttaaaaactttcaagtcaaaataaaaaacttttcaattatacatttgtaaagaggtgtgcaaaagattaaaaaaaatcggaaagaaacggaagaaaaaaacacgctcagagacaaaaaaaaaaaagaaggtgcgaacatgaaaaaaaaacgcacgccgttttttcacacggtactaaacgctagggttagtaggggaggccaaaacgcgcgcggcttcccgttctggctcatgggcccgcagtaggaacgcaaaaacgagcctgtacgtgttatgcaaccgtgattaggcttcataattcagcttttctaaatacaaaatttttaactcttatatctatgctactaaaattaagaagacggtccgacaccaccatatcacctatatgtccatgcatactttgcttacttgtttctttgtagtttttactctctagctaggtttcagatctttaattttgtaaatatgcctttttttctttctgttttttaatgaaagattttatttaaatcaattaaaaatacatttttcaacaagtacttaatttgtacactttcaataaccttcttgaaacgcccgagcatttagctagtgttcaatagtacagcaaagagcgagcatatatagtctaaaaccatgcattcctgttgaaatttattggatatatactagcatattgcccgtgcggtgcaacagaattgcaatttaagaaaattatctttaacatgttattaacatctctcatttgtcgtatatattttttaatctctttttagttctacactaatttttttcttcccacaaaaaataaagagttggtgagagtagttgatatgtgggccatctagcctcacatgccattttttcgttgggagttgcagtggaggcagtggcggaaccaccaccgatactaatcttttctgtacggagtatagatttctaaatatgcataccattattaaaaaaaagatttctaaatatgcattccagtatatatgaggtcttacatgtttcttttgcagctttaatttttacagtaagtgggtatataattacatagaattattatttcgatgggattatcaatgtacgtgctagatctatcttactataaagttataatgcacaaaacatcatcatacactatggcacatcatcatccactatcaattattacatttaaacatcatgcaagcatgctatattatctataattttataatttattaaattttagagttttaaaatgcaaccatattaaatcatcatcccacgtaattccattaaattctaaagttaacatgttaagatgtcacatcatcatgctgtaacaagatgccacatcatcatccactaacatttattacaattaaatatcgtgtaagtatgctatattatctataattttataatttattaaattttagagtttcaaaatgcaaacatattaaatcatcatccatattattcacatattttttaatatatctcttcattatttcttataatatcatatgtacgtatatagttcatccttacttagttagtgttatttctctctttttctcgttaagtcatatcatatcaatttttttaattttagataattaatctatggtccaaactatctccctcactttcttttttcataaagcgacatcaccttatttttacatacgaatcgtagttcaaatttaaattattataaaccacatcaacttatgtaagttgttgtctagctatgttacatattatttttacttgagtattgctatatgtatgacacagttgtccaactcaggtacaactagagacatgtaaccatagatcaatcaaaggagagcatattcatatgcactacagtagtttataatcgttgatcaaattcagtcgtacgtgagtcagacagttgggttgggttgtatgcatagcaatttccttttttacttatggttactatactaaacttccatagcaacgcgtggggtttcacctagttatatatatataattccattagtctacttcaattacatttgaattgtagttcaatcgacacaattgtttgtagaatgattaccgtaattagaattaaaaataaaagatcatgcgtcatagacataataattaaagttaggagggtaatatgggttttgtcgttaaagcgtaagcaataatattctgaccggacatgcataatttaaatttcatcctttgatgtaaggtccatttcaatccatctaagagcaggaacaaatctattaatccctccgtattttaatatatgacgccgttgacttttcgaccaatccgtattttaatgtatgacgctgttgacttttcgaccaatatttgaccatttatcttatcaaaatttttgttcaaatataaaattttttatgtcatgcttaaaaaacattttatgataaatcaagtcacaataaaataaataataattacataaactttttaataagacgaatgatcaaacgttggttgaaaagtcaatgacgttatacattaaaatacagagggagtaacatttagggaaaacttataaaacgtgatgtaagaaacaaaacaaataaaaatagaggtaagtgtgaccggctgcaccaataatccagacttctctaaaaattcaagttaattaactagctgttaggtttggcccattgttaagtgtcaaactatcaaactacttgacaagtgatcaatgcactgttttaactttagaaaatacagccaaatatctacagtggcatgtatatatcaaacaattaactgttagggttggcccattgttatgtatcgaactatccttaagcaactcatatcttgttttgttggatgcaagggagtaagtattgtcctcctatctaatacttgttcccttcttccaacaaaacaagtagataggagttaccaacaacaagcttctacggctagctagcaatgaaaagttcagaaagtttaaaaggaagatttgaaacttcaaattattatttttaatttcagccataatagatatacatatttgcaaaactacaaatatacatggtaccatgcatgattgtgctttcaatattttaatttttatcagggataaacgaaataatatttctcgaactaatatatgtaaaatatgtcttaactaggaacatgaaaacaattaacatgttgatttttcattcagttaacgtaaatgggaaacgaaatttcaaactgataatcgtaaatctgttagaagtggagtactattctgcaatgcaagcatatgtacggttatgcaaaaaaaaatttggtgatgcataatttggtggaaacacaggtttatttttgtgaattcgttttgtcttgagatagggcatcacgccattgacaccgctctcgatcagcatcactattactcctgtttctcaatgcatggggatccactcaacaaactccaacaccagaagcaaactaatcgtcatcaaatttttattatagtgtttctgggtacaattctatttcagtatttaatcgttcttccacttgcaattacaggtgtaatgaaatataaacccaattgatgtcacattagtttactctcttggagagaacatgcatgcatgcatgtatttttcctatggagtgcgtgcgcggtaatgtaaattgagaaacggcccttacttttctaataaaagaaaattagaatgtaaattctatcacggtccacacacatatgcatagaactgtcaaatgatgtacgcctaatttcgttcccatcttcttcctcttctctctctctctctctctcactcttttttttttgcgcgaaaccaccttcgttaatttgactgggtcacagcatcactctctaaactcatgttttttaccattcttaactcatggtttcgtacctttagtagttttaaattaaacatctgtaggtgcatacatatgtacatggttttcgtcatgatcgtgtgttttatgcgtaaactacaacgccgcgtaaccaaactttcttgtctgctgtcaaggaaatttaatagcattttcccttatcactaaaatagtactaaatttttatggcaatcaattatttaaaagtttcccccacccaaattcttctgctctgggcacgacaccagcgtcaacccaagccaccactggtttaagcaaaatactccaagtcccatttgaattttcttgcaggtattttattatttgagatattttgtaggctttcaataattttctataattccttgtagaaagtgacttttaatttgggataaatttatcatgggatgacattatccaagggccaaggaaacccgggaacaatattaatgtgtatgcaagggttgatgttgagcttgtgaagcccaaggcccaagcacatgaatgagcaattaactagatatcccaactaaggaatacatattatcatacatattatcacaactctgagacaggccatacatattatcatgtggcatggcgaaagacggaaagagctaatatcgttccaatgatgaggagttatatcttctttgatacatcttgggtacatatcactagaagagaaatcacctaaaccacggaagaagagtccgaccccaccgccccctccgtcgtttccaaccaacaaaaagagggagagtggcagtacttcgaccatgatcgaggaaattaacatcatcacaaaagcgtgatccactctttagggttcctaaggagatgagtaggaacataatgtcgctcctcatgctagaagagaagaaaaaggaagaaccggtggatcctttgggcggcggaaatttcttccatgccatggaaaagagatggcgctccggaacctcctaagtcagattttacatggattgtataggaaaacagcacctgcaaacgatggtccacttgataaaaatccaaaggccaacaacgaacctgtttataaatatcgattcaaatcttctttagtagtcaagccaacacagataagcggtctatagaacgagatgaggattgagcagatttgttttttctttttgacagtaaacaacaggagagactcctaatatgctatatcaggtataagtataacaggaatattacagggttacaaagaaaaagaaaaggaaaatgaatttacaacaagaggattgagcagattacatggtacatatcagacttagaaaaaccactgccgccaagcctccccaccgccggatccggcactgtcaagactccccaccaccggatccaccaccgccaaggctccctaccgctggatccgccgccgccaagcctccccaccgtcgccgccgcaattcccgcccaccatcgccagatccgcctcccctaccaccgccgctgccgaatctgcccctctcgaggccagtctgctgcggatctgcgagggaggcgtagaggcccctccaccgtcgccatggttgacctcatccgtcgccaccatcgcaccactagccaccaccgccgccaagagagagaggagaggagtgggagatcgaaggagatgagtagggcagagaagtggaggagaggagaggagcggggctgtgggggacccgacaggtattttttttaaggtggagggaggccggctggacttttcgtaggcaagcctcttaacaggtccgcatgtgaaaataaccctattttcgcatatagacatgttaagaggcccgcctataaaattattttttatatacaggtctcttaaggagcggtatgtaaaaatgttggtcaattttgctgacgcgacaagttactgtccatctgcaaacaaaaggcggtctcatccagaaaaatcgtttttaagtagtgaaagatgctaatattgttcaaacatattatgaattctgttcgaattacattgcactcaagatactaattaattaaggcactattactcaattataataccttatccttgattttcaccttgtacacacataggtgaacaaacaaaagctgtttttatatatatatatatatatatatatatatatatagccatgccttttctgtcagtctttgctactgatttaattgcagtgatgaaaagtgacattgctgtggagagagggttgaaggtagcattgagcaaaccctaccctaagtaattattgctttgacgagaagaaatttcagctagttgctgtaaccgcgatatttgcataaaacatgaaaaataaaaagaagctaaaaaaatggaaaatcacttaaatatgtgtagaaattggggaagaatatataggacacttgcaaacctagcttgttgatgtaaaatacaaaaatgaagctcaatacattttttctatttcccaaacaattatcggttttgccctcaaatttaatttttttccttactctttttaaaaaaatttcttcaccatctaccattaaaaaacaagaactacatccataattttttttattttttccataaattgaatttgctcaaaatttctcaaaccctaaccgccggtaaccgatccccttccccgcggtaagcacgataaccgtgattaccgcgcgataacgtgaaagcctggttacggtgcgtatacctatattgtatatagatcatgttaaagttacacacaaaaaaacaggtagcgatctcaaaaaaatatacccaaaattaactaccaaagtcattcttatacagtacacattattataatattttcaccaatttgtgtatggtgttgtagacatacttgaactatttaacatgccctatattggcatatacttttgaattttttttcttaagtatagaaaaagagagtagctatataacattgaagacttttttgagtcaaaaagttgcaaatataactatattacaattgtggagtgtaattatattataaccataataacttatatgtaactggaatataacaatcacaaatgtgtgctgacacatagtagttaagtgttcgtgatgcgaagtggaggtgctgagttcaagtcttgcacggtttttattacactgtttctatagagaatacctaacggtctagaaattgaaagttctacccaaaaaaaacttttgacagtaaactagcgattccgtagaaaaattctaatgagttttcgtgcatacacaaaaaacaaacaaatctctacccatactctgataccatacaatgaataattaacgcttattattgcatatattagtacgtattattacaaatagggaaacacacacaaaggaaatctctcacataatttatttagttccgaatgaacatgaattactaatttactgctcaggaagcacataagataatatcaattatgcagccttgtaagtatacaaaatccttggcctgttaggatgctgccttgctcgtgtttcccaactttcctttgtgtatctcgagacctcagagtccagagttacttctttaagttctcgaagatcttcgatttcaataccagccaaacctactaggtgtctgcagagcagctggagtgacaccaggtcccgcagtgctcctgcttcaatcctcgggaagacagagacttgcaccttgaagcacaggcgtcgcagactacggaacgccccttgtggtatcacaaattcgtcaaggcaatcgctgatcagtttgaggtataacagacactttaggttatacagatcagagagaacatcccgtgtcacggtaattgatgaaaggcacagctcaacgagacctgtatgccatttgacaaaacggggcaacgaacgaagctcgccatgtagtttcagcgaagtgagctcacagggagtatcgagagaattgaggaggctgccggagaatgtttgcaggcagattgatagtttacggttatcgccaatatacaagggaggattgatgtactcctggatggcctctgaaagcttacgagccaagatactatcatgatctcctgcagctgatgactagcaccatatcttaacctttttcaaattgctcatatggcccaatatctcaagaaatccttggctcttgaagtcggcgataaatcccgataaggtctccaatttactattttcagataactttttgagcgtactcttgctatagccatgatattgaatcctaaactttccaatcagatggagtaagaagggcaaactaataacttgcacaggtagctcctctacactcgtcttacttagacagagcgtttccaaaagtttcagttttgctatatctttaggaatacttgtaatttctgccccaaggctgagatacctcagattgaaagaccaagaacggctatagagggggggtgaatatagcaattcaaaactttcccccgaaaatactcatcaagctggatttctcaaaatccttactagaaccgcggctattagagaagccggatctagaaaagaagagagaaaaagaagagagaaggaattcccgaaactagaagaggaagagaaaaggaattcccgaaaactagaagagaggttaggaggagagagcaaaactcatcatcgcaaagttcaaatttcaagcggaatttaaattgcggaatttaaatggacaaggcaaaaacgaaatccttcaaatcatttcattcataggtgatgcaaaataaccgctcaactaggagcaaacaaacaccttcagaggaacaataacacaaacttaaaatctctcggacaaacacactccaaactaatcttaatacaaaagcctctcgggcaaacacactccaaactcacacggaaactctctcaccgagcatctcaaaaggattacaaaaggagcaacctccacccttgcatccatccctctatttatagcctaagacccctaagacattgtctcaaatacccgtggggcgaaaccctagccttgataaaatcctggatgtccattgttccttagatccgaaggaaacctcctggatagtcgccacgttgttgatccgagctcttcacgtcgcgtgccctcgtgcgatccgcgtgattccactccaagccaatcagtgtacaccgatccgcgtcgtgctcctccaagccaatgcatccgcgccacgcgtcccagagagcccgcgcccgctcctctcgcacctgcgcgccacaagtcagaagccgccatgtcgccgttcctcccgccgagccgcttctgcgcgcgctcgcgaaaaccacgttcccgcgcgtctccgcttccttgacgaacagaaggccgccacgcctccaggtgccgtacgatctcccgcctccgcgcgcgcatgcacacgcctgtgcatttgccgagccgagctgggccgtcgtcatgtctagggtctgctcggcctggccttcaccatcttgagtcagcaacgtgcttgggccgaccgagctcccgagctggacaggccggattggccttcatgccaaccgagccaatgatctccttgggccacgtggaacggctggattggcttggcctccctgccaaccaatcacagcacacatgcacagcttctgcaagctcctccttgcacaagtacattacgtgtacatgcaagtatgctacctacagtaagtccatttactgtagcagcaatgcacttgcacagtcccttctgatttcttcgcgaatccgatgcttgcacacttgaccttctgaagcccgttgcaaagacctcctcacacggtgttcgtccactgtgtgcaaccttgtgtccaatcttgtcacctggcatccttgatcactttggacctcaactcctccctgagtctagtcccgatccgccgttgaccaagatcgactccgatcacctgcacccacatgaaccaaacaaccgttgtcttggcacagatgtcgcaacctgaccaatgttagtccacgcacacacttcttgcacttccggtacttgtcaatttcccatcacaaaagaactataaccacacatggtttcacaatctctctcttgatgggaacattgacaatctcaagcaaaattttgaaaatttgatttttgattcacaaagcaaaccattttgcaaaagtcgaactttggtcattttgaattcttgaaaaatcaagaccaagtgacaagaagaaaagggatgcaaatgcaaatgcaagaatgctccccctatgtgccaaactccccctttcaccgagatctaaagcaagttttaattttcaataagtgcaaatttctctccccctttgtcaatgatgccatcaagatcaaaagagacaaaaatgcaagataaaaatgagatgaaacttgcaaattttagtgttttgagagctttgagagttatctaaaggcatcaaaaggtagacatggatcacacagatacaagcatgtgctcaagcctagctaagcatgtgcataagaagtatgaaacatgtcatggatatcaagttagtatccccagcaagcaaaaagctttcaagtgaattagtgatttagtgtgcaaagctatttctagaagaagcttaaaaggaagcaaaccagctcataatcatgcaagatttacataatcaaagcaatgaatccatgctaatgtgctaatgcccagttcataaagagtatcaacatgataacaaagcatagaacatgagattttaatcttttctcatgacttttatttttatgattttttttaatttctttaaagacaatagcacaatcacgacggtccacctgatcttatcagtcagcaagtgatggttgtgccaaacactgccgtctgacctcaatcaagttttccagctaaagttcccattacaggctgtctcagtgctatcttcggcactactcatgcgtaaacgcactcagtagcccggacaaaaacagagataaagcttgtaaagcatgattgatacaaagtatggacgcataagcatgagcattcataagcatgtactgacagttattgcaaaaagaatataaacatggcatgagtatgagatggatacttcaatttaaacaaacttctagagcaatcattgcacattgattaagttcaaatgaatagtcaatttaagcaggtttcaacaagcttgaacagcataacatgatcacataagctacttaagcaaatgaaagctagacaagagatcaaactagcataagagtgacacatgcatagcatagtgatgaccaagagataacaagcaaagctcaattgaagaatgtataatacaatgcataaactaaacatgatgcaatatgttacaaatgcatgcaaaagaaaaacaactccccctcaaatcaagccataggggtggatcacccctaactcactccgcaagaactcaaaacgagagcgatcaagtggttttgtaaaaatgtctgccaattgtttttcagattcaacaaactctagcacaatggtacctttctcaacattgtctcggagaaagtggtaccgtatctcaatgtgcttggtcctggagtgttgaactggattttttgcaatattgattgcacttatattatcacaaagcaaaggaacaccagagaaagacagaccataatcttttagagttgaaatcatccaaagaacttgactacatgtactagcagcagctacgtactcagcctcagctgttgattgagcaatagaagactgcttacgagaggaccaagagaccaaagaagtgccaagaaaatgacaagtgccagaagtacttttgcgatcaatcttacacccagcaaaattagcatctgaaaaagctcgaactgaaagggcagaagagcaggagtaccaaataccgtacttaagtgtagacttgatgtagcggaagatgcgcttgactgcttggcgatgtgatgttcttggagaagcctgaaaccttgcgcacaggcacacggagaagtggatgtccggccttgacgcagtcaagtagaggagggagccgatcatgcttctgtactcgcgctggtcaacttcttcaccgtcctcatcaggaccaagcgatgaagtagttgccatgggagtggcgattggcttgcagtcggccatgtcgaacttcttcaagagctctttggagtacttggtctgatgtacaaagattccttccttggtttgcttgatttgaagtccaaggaagaaagtcagctctcccatcatgatcatttcgaattccctgctcatcacatcagaaaactgggcaacaagtgcatgagaagagccaccaaatatgatgtcatcaacatatatctggacaagaagaaaatcaatgccactatgaagagtaaagagagttttatcaactgcccccatttcaaaaccattttgaagcaaaaaggttttcaatctttcataccaggctctgggagcttgttttaaaccataaagagctttatcaagtttgaacacatgatttggaaattttggattttcaaaaccaggaggttgtttgacatagacctcttcctcaataacaccattcagaaaagcatttttcacatccatttgaaaaagcttgaaaccttttgaagcagcaaaagccaaaagaattcgaatagcttctaatctagcaactggtgcaaaggtttcttcaaaatccaagccctcgacttgggtgaaaccctgtgcaaccagtctggctttgtttcgaacaattgaaccatcttcacctagtttgtttttgaaaacccattttgttccaatcacattaaaacccaagggaggttctaccaaagaccaaactttgtttctttcaaaattttctaactcttcatgcatggcattaacccaattctcatcagataaagcatgacaaacatttttgggctcaaaagaggcaacaaatgctgaattgacaagatcataagaccgatttctagttaccctttcacccaggcggatgtcggttctagatgtgtcggggagctgtcggtcctgatgtgccaccattaatctcctcagctgctgaagatgatgtagttggtgcatctcctgaaggcgatgtagttgaaggagaacctgtttcttgcactggtggtgtactgtctagaggtggaggaatggaatcatcgtcatcatcatctgaatccttatccacaaagatgctttcatctggaacacctgaaatttctggtctagctcctgggctagcctcatgaaaagtgacttcacaagtctccacaattttgttagttgaaagaacataaactcgataagcccgagaatgagtagcatagccaaggaaaatgccatccaatgatcgagattcaaacttgtccaaatttccagatttaagaacaaagcatttgcaaccgaagaccctgagatgtgaaacttttggtcgacgaccaaatctgagctcatatggcgtcttgtgcaagatagttctcaaaaacacacgattggagataaaacaagcagtagaaatagcttcagtccagaactttcttggagtcgtaaactcatcaagcatagttcgtgccatctccacaagggtgcggttcttcctctcaaccaccccattctgttgtgggacatatggtgaagaaaactgatgttcgactccagaagaatcacagaaagattcaaatgcagaatttttgaattcagagccattatcactgcgaatggctcgaagagcaccaggaaactgcaaagccaaactacgagcaagagactgaaagaagccacatgtttcctcctttgtttcaagaaaatagacccaagagtagcgagagaaatcatccactacaaccaagacataccacttccccccaactgactggacctgagcaggaccaaccgtatccatgtgaagcagttgtcccggtccatctgtcataaccattgtaacaggcttgtgggaggaagatgtcattttcccatgacgacatggtgcacacacaagatctttcggagctttcaacttaggcaaaccccgaatcaaatccataccactaatgcgagacaagtggtcaaagccaatatgaccaagacgtcgatgccagaaaaacaaatccctattctctgaggcaatgagacaacgagaaggaccaggagcagaagagtcgaagttagcaaagaaaactcgaccaactcgagaaatgtcaaaaacaggagattcagaagcatcaagaactcgagacctgtcctttttgaaacgaacttccagattttcatcacagagttgtaaaacagagagcaaaatgtacttaagcttacttacaagcgcgacatcctttagcatgaatttgtcattgaccttgattgttcctttagccatcacgcgtccactgctcgcatccccaaaagtgatggtctcatcaccggatgcacgagtgagagaagtaaaccacttggcttcaccggtcatgtggcgtgagcaaccggagtctacaagccaagaattacttctccccactccaaaatcctacaagaaagacacagcagatctcgatgattcagtactggggttagtgagaaatgacttagtaatccagtactgaaccatgcgaggagtacaagcatctttagtgttatgagcataattatatgcaagatgaccatgtctgttttgccccaaccctgctaggtcacatcgagggtgcacatctcggcgaggaaagcgagatacaccacttgaatgacaatgacacgcacactcgaacctctcagggactctagcagctcttctagtcctaagacgttcttgtcgcttttttctagcctttctaaagcagaaacctaccaaatgaccagctttcccacaataggtgcactcatacttggttttctctacaggcttggtttgtttctggttttgcttgtgctcaacttgttttggatttttgggtctaggtaactctacagacttagacttgctagtcataggtaccatctttggttctgaggttttgggtgtactagaactagtgtttccaatgaaacctgcagacttgaaggttataggtttttgagctagttctatcatcccatctgtgacacctaaaatctcatgggtacctatcctcaaagactcagcaaaatcatagcctataccttgattgtttatggacactttggattggtctaggatcatgttcaactttttctttccttgagcaaacctctctaaagattgttgtaggtacgagttctctctcttagcggactcaagatcaactttcagagaaatgcatgatgaacatgaatcaacagatttgacataatcaatgacaattttagtatcttttagttcagtttccaggataacacaattagcacatgaagaatgaacaggctccttagtagcataagattctagcaaatcattcttggtcctaagcatgtcaacttgttgtcttaattcatcattgtcactagtgagaatgggacaattttcacaactacttatcctatcatgaacaaaattttcttttagttctttcaattccatctcaagcaaactcatatcaactttcatttcatagcaagtagagcaagcagcactagcactagaaggattcccagctcctaaagcacatgatttcaacttatccttgaggagattaatttcagaaagatatgaagcacaagtagaacaggtatcctcctcaggaatcatggatcgaagcctagcaatttctagcgccattccatcattttcatattttagtttctcaattttatacttagaagacctatacttgtcactaatttcaatcatcaagtgtgtcattctttctttgcttagttcatcatcaacagagtcattatctgagcaagaatcatcacaaagagaaccatccaaggaagggatatcatcaagacatacctcatgatgctccgatgagtcatccttatcctcaagtgccatgagacacaggttgatgaagtcctcgttgttggcgagacagtacatcccggagaagtccttgtcccccttttcttgatcatcgtcgtcggagtcgatgtcgctaagctgcacctcctcaagagccgccaagaccttgtggatcgccttctttatcaaatccttcttcccctttcgcccttgtccctcgagcttcttggttgtcttgtcactcttcttcttcaacttgggacaattcactcttatgtggttaggctctccacactcaaaacacacaaatggttcattggtttttcctccttttctatctctcacatttttgtaagctcttgagaattttctagtaaaaagagcaagatcatcttcagggatcttctctaattgctcctcagtgactgagtgtaaagcggcaagagagaagccaccacacacaaaagctaagtcattagaagaagtactaccagagggatcagctaccaaagccatcgagtgtttgaggcctttccgatggaagacatccatctcatgggtttttagctttgagtaaagcttgtccatggtaaggtcactcagaggtgcactctctgtgatggaagtaactttcatttcccaaacaccataatcaagacaattcaaaagatggcgagcattatcattatcagaaaattcttttccaacagatctcaacttcgaaacaatttcttcaaaacgcttgaaataagaatcaatggactctcctgggtgcatctcaaatctttgatattctttatgaaattgattctgacgaaccaattgaatatcattgtttccctcatggaaattgcacagagcagtccacatgtcatgagcggactggtggtgttgaacacgattaaattcaccagaagaaattccaccaatgattgcatttcttgcacgataattaaaatcaacttgagccacatttgcaggcgtgatgtcagcatcatcgggcatagtgtaaggtgatttaaccttattccacacattatgcccttgcgactggaggtaggcctccattcgtgccttccaaatgacaaaattgtgtccatcgaaaacaaatggtttcgcagagtatttttcctccatagctgcgttcgttgccacggttaggttacaacgaacttaaccgggctctgatactaattgaaagaccaagaacggctatagagggggggtgaatatagcaattcaaatctttcccccgaaaatactcatcaagccggatttctcaaaatccttactagaaccgcggctattagagaagccggatctagaaaagaagagagaaaaagaagagagaaggaattcccgaaactagaagaggaagagaaaaggaattcccgaaaactagaagagaggttaggaggagagagcaaaactcatcatcgcaaagttcaaatttcaagcggaatttaaattgcggaatttaaatggacaaggcaaaaacgaaatccttcaaatcatttcattcataggtgatgcaaaataaccgctcaactaggagcaaacaaacaccttcagaggaacaataacacaaacttaaaatctctcggacaaacacactccaaactaatcttaatacaaaagcctctcgggcaaacacactccaaactcacacggaaactctctcaccgagcatctcaaaaggattacaaaaggagcaacctccacccttgcatccatccctctatttatagcctaagacccctaagacattgtctcaaatacccgtggggcgaaaccctagccttgataaaatcctggatgtccattgttccttagatccgaaggaaacctcctggatagtcgccacgttgttgatccgagctcttcacgtcgcgtgccctcgtgcgatccgcgtgattccactccaagccaatcagtgtacaccgatccgcgtcgtgctcctccaagccaatgcatccgcgccacgcgtcccagagagcccgcgcccgctcctctcgcacctgcgcgccacaagtcagaagccgccatgtcgccgttcctcccgccgagccgcttctgcgcgcgctcgcgaaaaccacgttcccgcgcgcgccatgtgaaaaaccgcgggggacccggtcccacgagtctccgcttccttgacgaacagaaggccgccacgcctccaggtgccgtacgatctcccgcctccgcgcgcgcatgcacacgcctgtgcatttgccgagccgagctgggccgtcgtcatgtctagggtctgctcggcctggccttcaccatcttgagtcagcaacgtgcttgggccgaccgagctcccgagctggacaggccggattggacttgatgccaaccgacccaatgatctccttgggccacgtggaacggctggattggcttggcctccctgccaaccaatcacagcacacatgcacagcttctgcaagctcctccttgcacaagtacattacgtgtacatgcaagtatgctacctacagtaagtccatttactgtagcagcaatgcacttgcacagtcccttctgatttcttcgcgaatccgatgcttgcacacttgaccttctgaagcccgttgcaaagacctcctcacacggtattcgtccaccgtgtgcaaccttgtgtccaatcttgtcacctggcatccttgatcgctttggacctcaactcctccctgagtctagtcccgatccgccgttgaccaagatcgactccgatcacctgcacccacatgaaccaaacaaccgttgtcttggcacagatgtcgcaacctgaccaatgttagtccacgcacacacttcttgcacttccggtacttgtcaatttcccatcacaaaagaactataaccacacatggtttcacacagattccataacttgtgtatatttttcaggtgcttgttcttgacatcattgcattcttcgagatccaggactctcaaaaccttgtacctgtgaaactcgcaaatggtgtcacctgccgtcccgaagatcgtcaaagaccggacgcatgacaaatccatatctgttgtagttctgcgcttgtgaggtgtcctatgatcgatacagagatgacgaactttccttcgccagtcaggaaaggacatgatgaacctctcaagtctcgacgccttgtacaacatatactcgtgcacgatactgcgagtcttgcacatcttgacatcgccattattgcttgtgtcaatgataggatgaaagatgtcccagtctacaaacgtctcaaaattccaacgtgcaatagtctggtcatcaatgtccacatcttcgctccttgcgaatccttcagctatccaacgcctgattatcactttcttctcgagcggaacatcgtttggaaatatgctcaaatatagcaagcaggccctgacaacgtggtttgaaagacttgtgtaattatccatgatcacgcctttgagtctttcaaagttaccattgtcatgtatttttgaacctaggtagcgacacaattcgcgacagcgctgcccagtaggctcatttaaacctcccaaataattggccacacaaacaagggaaagtggatggccatcacatttcttaagtagttcttccgagcccatctgcaactcaggtgaaggtgcctccccaagagctattgtcttgcagtattgatcttcaagattttgcatttggtatatgaaacctttgccattgccacagcaggtattcgcttccgacttaatggttgtggtaactattatcctgcttccgttgtttctactattttcttcgaaagctgattttatagaattccattgcccattcccaatgtcatcaataacaatcaagtatctgacaaatttctgacaaatttcgggtaagagcaggtacaatagcaggctataagccaactgcaaatatattttaaggagataaacgaggagagagaagagcagtgggctacaaatttgtagccagctgtattacggactccaagacgcaatgtgtttatgataggtgggaccagttattgatagtgtagtatgtaactattatatgaatgagctattagattggctatagatgaattagagctagtagttgactatattattaaacttgctctaaccaacggccgggcgcaaggttcagcgaatgagtggttttacgatcctcaataaagtactcaatgtagtacgtaaagttccaatacattctgaatgaccgtaaaggtgtggatgggtaatgcgtgcaactgggaaacagctacagaaattctctcaccttctacccctgaggtagtccatgagctgggcttggagatattgctcgtcatcgaccaataatccctgaccccgatagccaaattgctggagtaatgatctgaaaatctcccccgcatttttctccttggctcgatcaacccatgcacggcaggaacgaaacacccggattctatcatcatcagttgagcggaacactgccttagcgagggtcgtcttgccggagccgccaaaacccacgatggcgataaccctcagctcctccggactttcctccagcatcgcgaggatgtcccccttggctccctcgacgcccacggggttgagttgaacatgttcgcgttgttgtgccgccgccggcgccagtggcggcggcggcgggggcttgtcgtagacgaactggcacaggcgttcattggtcagctcctcgaggcgcctgttaagcgccttgatcttgtccccgaaccggtagcgtgtgcagatggtgagcaggaagcgccccagccggcgcgcccgcgacgctccctcggcgcaggacacgcggtggaggaagcgctcaatgcagtcctccatgtcgtgcgtcagctcgcgcagctggtcgccgaacaccttggcggcggccgtggggttcttcgtccgccggaggtcgtcgtccatggaagctgcgagcagaactagtttacgtctcattgagtcgctatcatcgatcacgttcatgaccatcttacaactgcctgacagcaccttaaacagcggcggcatgacagtgttcacgaaggcagttatcaccgctttctccatggtctctgctgcctcaatcatcgatcgatacaacactaaattttggtactaacttgatctagatcttttttgctcggtatctgagattctgaagtggtgaagtgggggttgaaagtgttttttagtgaatgaatggtgctagaaagacgatcgaccagaagggtataaatagtggagaaccttagaccgggtcagtacatagttggttgcttggcaaaccgaatctctgatacataatccatgtcccacagaatcacacatatctaacccatgtcacgcagaatctcttgtatttaataccatgtcaaaccgaatctcttatgtatgattatagctgagatatttttagatgccgtacctttcggatccacggagaccatgagggacagtaggatttttttaaaaaaattacacagtacaacgcagacactcacaatggaggcacgtaaactctacccctatgagcatcttcgaagactgcgcaggcaaatccttgagattgacgaagtcaccacaggcgcctcgctgtcgacgggtacgtcgcctaccactgaaagcacaagccgttaaatcatggaaaatttgctcccatggagagtcaaacccagaaccttatgtgctactgagactcttgtaaccactaggttattgaccctttcacggggatagtaggattgtgataattgaagagaaggtgttgtcgtacctttacaagttgtgagggtgtactattacaggtgtagaccagaaggaaacagtaattgggatagctattgcttttggtagcggtgattctggcataggctcatcaaccatctcacgaggaatctgcaagaagaaaaccccaagtctagtggattggtgaatccacatgataattctactacttgtgggtggcgttacattcagtgaggtggagcatgttaaaataggtgccgaatatacttgtcctaataggttgtagttaaacttaaagttgtaatatatggtagctagagggtggggttagcatcagactccataacccggtaaccctttaaataaaaatgggggcacccactactagagaaacgattttttatcctaaaccccaaaacacaaatatcctgactagatcaagaaccggtactaaatatgctttagtaccggttctaaaagttgaagttcctaaaactatgtttaattccggttggtgttaccaaccggtaataacgatgcaattttagcaccagttggtaataccaactcatactaaagatatttttagtaccggtcggttggtaataccaaccggtactaacgatgtctctgggatcagttcaaaaagaaagcatctacattcaagtcagatgtgtatagtagtaggtggaatggtaacgtgtgtgaggactgagttgatagatcttgagttcgaatctcacatcccacactttttttttttgacttagtatgcatcttttgtactcgttctttctaccggtactaaagatagtctcgatttactggtctcggttgctacagccggtacgaaagggggttttaactagtattaaagattgtttctcctgcagtgaccaccaatgtaacaatcatgtcaataatgtaacataggcacgcagaaagagaatggcggcgagaccatggactcatagcagcaaggggtgctagctatgttgattacagaggaacacccataattagagtcccgtgcattaaacgtatactaataacaaaacaaattacagattctgtcggtaaactgtgaaacaaatttaattgttaagcctaattaatccatcattagtaaatgtttactgtagcatcacattatcaaatcatggcgtaattagggtcaaaagatttgtctcgcaatttacatgcaaactgtgcaattgattttttttatctacatttaatgctttatgcatgtgtctaaatatttgatgtgacagaatttttagaagtttgaagggatctaaacactgctatagtccttatatatgcttcctaattagcacctgtacgtgtatgaaaaatcaatgttgagactaacaagctagcacaataattactggagtatctacttgctaccttacccggcccacgtgttatcatgggaaaatttggagtaaaagaattaattaacagaattagaggaaaaactcaagttgcaaaatactatcacatatacatagaacctaagctgatgaatatataccatcagtccatcacaaagagaatttgagttgaaaaataccattaccgtgatcatttccacccagggaagaaaatgactaatttgccccctgcttttttttcttctttgtttcctgtgcttgctatacttatggctctcaatttcataatattttatacagactgcttgccttatacgtactcccttcggtaacaaataagtgacattttagaaagcaacaagattaccgaaatgatcaatattgattgctagtataaaacctataaaaatatagcaaggacgttctaatattttgaaactcctttttgttttcaaagacaaatatacctatatcaatttttaaaattaaatcgaaatattttaatagaaattgatagtaaaagtttaaacacaaaacacattgacttgatgtattcaagaacatcaattattgttgatagggatgcagtaaaaaaataatatatttatttaaaaattatgaactgtactatttccttgaaaatgtttttattgcttatttcttaaagactaaattttataaaactacagatattttggctaaactatcacaaaactataaatttaaaatgtgtatcataaaactacagatttaacatgaaatttatcacataactacatatttaaagcattgtatcacaaaactatgcatttagaaatgaaattatcaaataactacaaattttagagtttatatctatagcactgttgatgttacaaaagttgtagctttctgataaaactgatgttatactatatatatatttaaatctgatgttaaactgatgttatatatgctcatttataaaattgtagttttctaatgatactttcaatctatagttttgtaaaaaaatatggttttaaatctgtagtttaatttgtaatacactttcttaaatatatagtattgtgatatattgatcaaagtacattaattttgtaaaatttactctttcttaatttttgcattagctgattttctaaacatttccaccataaattaaatgcgagatttgttaaatgcatccaaacgcgacttggaatgttgagtattacaactgagtggaaaaaaaagggtagtgttggaattttcaaaactctctctcctaaaaaggtattaattgcagttttggatgaaacagtaatggtaccggcattttccaactcaaatttccctgtgatggtattttgtagctgatcttcttgtagtggtattttccaacccaacattctttgcaacggcagtgatcaaatttgcagaagatttaatgtggacaagtagaaaattttcagaaattagttaaagattggaaagtgcatttagtaagatgggtaatgagatcataaccttcaacacaaacagctagatcataacctcctcttgtgtttccaaaaaaaaaaaatgttgtggagaattttatctgactaatattttttttagaagatgtattaaaaactcggtctctacaagtacatagccaaacatacattgtcaagagtatttagtttttggggcaatcgtatatttgaccctattttgaaagcaaactaccaaccaatttgaccttatttttttaactttgcttttttttaacctacttttttgaccctgctttttaactatcgacatcagacatgaccccatttcgtgaaaccaacttgacagtgttaatttgaggtcgaaatacctttatatccttactcatttgaccctaatttttttatacgctttggtgtacatgatgcaatttctaataaatttcacttggaattgatatgtcttgtgcgaatttgaattagatttgaattttagccaaaaaaaaacaattgagaacgcaaattagatcaccacaacaaatggttccggaacaacatgccagcatcgattcaaatccatatcaacatgcaaacaaatccctgctaagaacatcatccaacaataacattcaaacaagatcacaaaaatcaaacaagcgctggcaccggcgcatccagccacagccgccgctccctccacatctcgccgccatcactccctccatgtgtcctcattgtcgtcgctccctccgtgcaccgtcgccgtcgccgtctgatctgcccatcgcctccctccgcacgccggcgccgtcgccgtcaccgcgcctcctccttgcgctgccgtctgatctgcccatcgcctccctccgcacgccggcgccgtcgccgtcaccgcgcctcctccttgcaccgccgctgcctcctgctcgctccccacgtcggcgccagcgccgtcgcctcctccttcctcgtgccgctgccgccgagatgtgaatgagagattggttgaagacttgaagtgaaatgtatgagggtattttggtcactttgaatagtaaaatgattctttttcttttcttttttgaaaccctaatggcatagtgtaaatagggtcaaacggcatgctcgattttaaaaagcggggtcaaattagcaaactaaaaaatgtagtatcagattagtagtttggctttaaaacaaggtcaaatgagcaattgtcccttagttttttctagaccaacatgcttattgcttgtgctttttctctctctttttttgtcggaggagacttagaatcgggcgcccgatccaggcgtccaaaaatcgggggctgacgtcagcatgatgttagcgccacgcatgtgtgaaaaaccattttaaactattttttatcttaaattatttatcgaaattatgatctgattatactattaaatttgttgcaattaaatcttcaaaacaagaccacacatggatatattccgacgaaattttttagcttattattgaattatattttaaatgttgcacgatgttacaccaagtatatcggaattatttcactaagtagatcgaaaatgttcaatcgtttaaatcgggcgttgtttcaccttatataaaaacaatgtttcagcaaatagcgaaagaatatttcagttcactgcaatgttagatctatacatagtaaaacattataagtacactggattatttttggtggaacaaaaaagtgaaacgaattctcataatagagggttttgaaaatatgttggtgatctgttacaaaataatgtttcagttcattgcaacattagatctatacatagtgaaacattgtgagtaaactaggtgaaacttttttttttcgaaaaaaaaataaaacgaattttcttaacagatagtttctaaaatatatgggtgatttgttgcatggagttgtgtgtggacaaatgattgggagcaggggacacgtgagtgaggcctagaggggcgtgcatcttggggcgagggagcgcctgatttcggctaccttcccccaagcgaccgattggaagaaatttcgtttttttccgtaattattgcggggcgtcacacaccaccaatccaccgtgcaccatgctcccctccggcctcgcagtcgctccgcctcccataagcctccacgccgccgcctcccgcacgggccgacagcggtatgcacccgtcgaccggcgtgcttcgatgggccggagcaatccgccgcggcccacccgcgccgcgtggtggcggacccgacgccgcgaaggcgtccctcccctcccctccccgccgactggtacgacaccgccgcagtcatcgtcgccggcggccggagcagctaggttcggtggtagagagaggaggaagggagagaagaggggaaagagcctgaggaggaggaggcctcggtaggcatccctaacgccaaagggggaggaggcgacgaggccttccgccaagtgaagtcatccgaggagccatccgccgcccggaaaagtccggtggcgaagaagccgagccggccgcatggggggagtggggggccccaaccggcgtgttccccgccgacatctccccgcccgcggccgcgaatcatgttgctctctccctgtcacttcacaacacgcggaggcagcagcggccggtggtgcggggctgcgggcttcgtctcggcgggacggacggcagcggctgggtagcgtcgcgagcttggaccccccggcggcggcggcgtggggagggcggtgagatcgagtcctgcgacgtcggggtcgggctgtggctgggaaagtgcgacgagaacgagcacgcccggtggcggttactggaggagcacgtcgaggtcgggcccttggcggcggcaaggtcaagccttggcttcctgtaatcaaaggtaaaattttccgaaattcagcgaagaaacggtagaaatttgcatttctaaaagtggcaaatagttaaatgcccctttgcaattgagcctaatgggatagatgaaaaaaattgagagtttgaagtacaattatttatttctacaccaacggcgtttcttctctatatgttacaatcatatttctactcagggagaacctgtcaatatcttctagttgaattcatataacataaacaccatgcgctacttggcaggtgcctcattgtacttgataatgtgtggactgtatcaacatggaatgttgttagacatgctttacaagaggattgctgtagtagaatagtagtaacaacagaaattaacgatgtggctcaggcatggagtttttacaagtctcaacataatgcatctcacgtgatcaagaagcatattttgaagatggaaccgcttaatgacgatttctcaagagatttacttgttagtagagtttttggtgataaagacaaatgtcctgaagaactcaatgaagtttcatatgagatagcacgaaaatgtggcggtttgccactagcaactatcgctgcagccagtcttttattgagtcggccagacaaaccagatgaatggatctatgtacagaagtcgttgattccagatttgaggatacaacctacttccgaaggaatggcacaactactgaacaatagcttcaacaatcttcctcatcatttgaaagcatgcatgctgtatctgagtatatataaagaggatcacataatcaatccggacgatctggttaagcaatgggtagctgaagattttgtaagtgcgacggaagggaaaagtttggatgaagctgcaaggaatcatttttatgagcttgtccataggggaatacttgaaactgaacatatcagctgtagtgatgaggttgtatcttgcacagtgcatgacatggttcttaactttatcaaacgcaaggcaatggaagagaattttgtcactgcaattgatcattctcagtctggtataagactagcagacaaagttcgacgactctctctccatttcggatattcaaaagatgcaaaggcaccagcatgtattagattgtcacaactacgatcacttgtgttttctggattttggaagtgcgggccttccatttcggagtttcatcttcttcgagttctattccttcatggtaaacatggcgaatttcttgacctcactagaattcgtgaactgtttctactgacttatttgcagattgaaggtaatgtttgcatagacttaccatcagagctccaaggactgaagtatctcaggactctgcatattggtgcaatggtgacctttttgagatcagaagttgttcatcttccgccgttgctgcacttcagacttccacccaatctagggtactttgttgacgcagggagtgtacagagtattgaagaactgaccaatttgcaggatcttcaactcgcatgtcctcagatagccacttctgaccatattaagcacaacatgaaactgttgggttcaattattgggatacttaagagcctcaaatctctaacagttgttcctgtctgcttctctgaagattctaatgataacgaaaattcaagcattgccattttcttggatttcttagataaagttccccccccttgtagccttctgcagaggcttgagttgtttccacgtgtttgcgtcttccatagacttcccagttggatcataactattgagaaactctgtattttgaaagtagcagtcatggaactcctgaggaaagacattgagactctctcaatgctgaatgccctcactgttttctcactgtatgtccggacaacccctgcagaacctatcatatttgacaagtcaggattccatgttttgaagtacttcaaattcaagtgtagtactgtatcaagtctgagatttgatgaaggagctatgcccaacctccaaaggttaaagatggaattcaatggtagcacagtggagcaatacaaccttgaaaatgtgggcttcaagcacttgtcaggtgtcaaggtcagcgcaaaaatttgcattgccggtactagtgaagctaacagaatggctatagcctctgtactgaacaatgccatcaggcaaaatacaagaatatcaagtgtaatcatacggttcatcaacagggttataaaaggtacgaatttacataccctactgtaacaataaacatgccctcttttctgtgtttatttgcgcaagatacactccttgccttaacattggaatttggacgagatgcacatggtcgattttttcgctattcaaaatattttatttgagaatttaactagggtaatcatttgaaccacatatctattttagtatgccatttggacatgcaaatttgacctgcaatcatccatttcatttttgttttaccaatcaaaacatcctactacctgctgtagtataatgtctttagttaggtcgatcaacagcagtggatatcccatatcctactacgtaattcttttgtacacatcatactgattttattatataaaagaggcccaatgatcagatcagtgacattgtagagatggtactgttgcaaagataatggaagcagcaaccagaaggtgtacacagccacattattacaagcgtgtgtgaaagttcattaaaatgataaaagaagtattcgacaggctagttaactaaaaaaaaaaaagatacataggctagctgttattaaaccaccatccaatatggttgaaaagttctgtgactacgctccaaggtgttgcctgcatcaaataccagatcatgcaactcctcacgctgaagagaccaaaccatagccagttggagcccataaagatgtaagattaggataattccttttatagaagaaaaataagtacattttactgtccgaactatttcattggaccatttaaccccctaattttgttttggctcattttacacctggaaatattaaaaatggttcactttactccctaacgatattaggagccatcgtttcgcttattcgcggaataagtgaaacggcatatttacaaacgaaaaattatttgtaaataaaacttttatatacgtgttctaagcgatctaaaagcaaaggctgaaaaataaactttgatgaaaaaacctcaaaattagctccaaatttaagattaaaaattcaaattttggctgataagtataagcataagcgaaaagttgaggcccattgttccttttcgtttctctctatataagtcatattttgcattgaaattttggtagaacgatagatgcattacaacatatgtcttgtgacattccggtccaatcaggattaggcctgtgtggtacatgagagctgtgtgcgcatgtttagtatcaactgcggtagtgtagcaaggttggaaccaacttataaacacggttttgtagggcgggctgttacacgtctcaacattttttagatttttccccactctttacataagtcggaaacagctaagactgatttaaatgtggagattttaaagttcaagccaacagtcaagaaaaaacttaattttttttttgaagtttgataatggtatcagggatggctctaaaaaaattcagcctaaaatacaacttatataaaaaggaaaaaaaaagagaaatgttataaaggagtaaggtgaaccatttttaatagtttaggtggtaaaatgagccgaaaaatagtttaggggtttagtggtccaatgaaatagtttgggggggggggagtaaaatggacttctttttctaaaaacaatatccttatgacgtaatccaatagataataaccggttggccgcaccaacgtacaccggcttattttaacttttagtccaaaccaactaatcaatttccgaataaattggacaatactagtggctggatccaaattaaaagctgcatgtacctcacgccacacagtgtgctgtatggcaatgaaaaaacaaatgttgaatagtctcattgtcattaaaaaacatttctagctgtgtcgttaatttctcttagcaaagctaatcctgtgctatatacaaacccacgttgtaagcaccagaaaataaggcttgatatttgaatgaacagaaaattcctttttctgatgtaagttcatctaaaagtgtcgatttcatgtgtcagtttaatattcatgagcttagaaactaattccttccaagcttatactttatcaccttctggctgtgggatatgatgttctaatatcgtgcttgcccatcatggttatggccttatggatattcagttctagaattatcctatacttacagatttgattgcctagttattcttctacctgattctaaatactaatcattttagacaagctcgaggattaagagtataggtgaaacggtttggttgcccttcattggtagcacattggatgacacataatgttcaatatattctgaatgatggagaaaataatattttattctggtactccctccgttccaggttataagatggtttgactttggtcaaagtcaaactagttcaagtttgactaagtttatacagaaatatagtaatatttataataccaaattagtttcattaaatcaataattgaatatatttttataataaatttgtcttgggttgaaaatgttgttatttttttctacaaacttagtcaaacttgaaacagtttgactttgtccaaagtcaaaatgtcttataacctgaaacaaagggagtagcatttatttagtaaaggcaagaatgggagaaaagcgaacataccatatgcaaatctgagctttaggtcacaagcatcgaaaaacttgaacattaagacaccttcattttcagactaagtgggagcttttgttagatattttgtgacctattaatatgagaaacctttcacctcttagtgttaactgtttatatgggattttaagaaaaaaccttcaattagccattataaagaaaagatactgtattagatctttatatggtcatctggtgtgctaattcttcgggctttggcacagatcttccgattgtccccacccctcacacggatcatatgcatgaaaatctgaggctggataagagtgtcaggtcctggcctacccagtgcgatggctgcaaggagcttggtgccggccacaggttcaagtgcgagcaatgcaactccaaggtgtactatgatatgtgctgcgcaacagcgcctcacaccctgaaacaccctctgttcccaggctccgtttttcggttcctccgaaagcctctggcctctgaatgcggtagggcctgtgatgcatgtggtgacctcatgcacggcttcgtctaccactgctttgagcgtggcctcgacctccacccacgctgtgcgaggctgcctgttcgcactgcaaacgtaaagggctatgtcatggagcttcgcagggtgtcggcttgcagcagatgttgcatttgcatgtgtggcaaggagggttatcgcaacaagttttggtcctaccgctccagtcaggaaggccaggacattaacgtgcatatggcgtgtttaaaagacttggcatcaaaatcacatgaaaccctaactaaactgtatgagatcctaatgggtgaatcacagtggacgccaacagaggttttaggcgaagatacatccgaccaattagttgtcagcaggtatcagttcataactagcgatcacaaaaaaccatccaaatttttgttctacttcgtccagttagtatacgactattattacacctgtttcagtgcggaggatggtgatcgtacgccactgagacaagatgaaattacagaggagtttcagcacaaggatgaagtatgtaatgttctagagcatggacgggaggaactccggaagaaagaaaccgataccaggtaatatatagttgatttcattactaaagaacggccaccatcaaatacaactgctattgcacagttggtcaattccagagctaatggtccacgctcatcgcagccactttccaccgctgcgggttgttcactttatttcttaaccctaatactctagtaattactttgcactcccacaggtttattttcaatttaccatgaaccaacattagttcaactcaagaacaattatcacttaaaatttgacattgaaacaacttaatctaaacaaaaatttcaccctcaccaaaaatttgaactcagccaaacatgcgttcatctattgactcataaacatttttcttttttagatgggattgttgtaatttgggtgacaccagctgacaagaaattcagaacacatagatccctggaattgacttaggccctgtttgattcagcttaggattattataatctggattattaggagtaagctgaaacaaacaagtagattattatgctagattgttataatctataagccagattagtataatccaataatctcctctagaggagtagaggagctttttctagattattgagtggctaaagacccactacccttagatgtctctaataattcagagaaacaaacaactcgcagcttattctatgttagcttattataatctaggttagaataatctaatttaataatctagattacaataatcttaagctgaagcaaacagggccttagaaatacttaaaagtcgataatgcaagagagcaggccattgttgatgagattcgatatttgttatgtctatgtccctcggagccaagtaaggtgactccggcctcttaagaatttatttgatgatatattgaggcctgagggttacatcggttggccatatagttatactccaataacaagaatccacatgctaagaattactattctactcaaactacaataccatagttttgcctgtaacagccattttgtaccttgatggggttctagtgtttgtatataactctaaaattggtcgacctacgattacccagctacccaacttatccatcagattacataacaaactgcctcggatcaccactccaatctgacttggaccacccatctgctcaagaatatttattctgacgtctgtttggataactttatctggctttagagtaaagatcgccaagacaaactcaatgtgggtttgcttagttgttctgttatgttgattgtggcctttgcagttctcttatcatacagttgacaatttgacatgtgcattttgaaagcagaataaagaaagatcataatacctagtatgtataaacaagtttgagtctagcatataattagattgaaactattatttcgtgtaggaaaaagcctagttattgtctctcaattatcttgttggtctagttttcgtcgctcaatttataaaccaggtaaaactattccctcaactatgcaaactagacaagttatgtcccttggctggttttgggtgtgacatgtcatcgactttgcgcgcccagccgtcctccacatcatagagctagccccacattagggcccttatcatcttttctcccttccctttcatatttgggtgttggtaaaaaggttcatgagtcatagccactattcgtcagagccggcatgaggtcctggaaaatgatgagttcagttgcaggtctgtagcctctccgctggtgtcagcaaagtggccaaccacagcatacacctacgtgcaatccatcctggtgcctgcaccagagctttttctttttatgaaggagcagccacgattaacatgaaagacaactgagcaggaatcggctgaatatctacttggtggcctcatcatccttattggccatgtatgccagcacgtactgctttcagtgagaattccagtattttgctaacgtgcatagaaaggtgatgcaaacttgtaaagtgaatgtcagacccagaagaagaataagatgaaaatagatatctagtgtagctgcaaagcaaacaaaatattgagtcaaaattgaactgaactgatcatagcagcgggaaaggtgggcagcagtctcaccaatgggacagttgaagacagattccgatggtgtatactagcaaattggcaggcagccatggtgccacttcagcagctgctggaagaagacagggcgcaggagtcgccacaccagtactactctcacatgcatgttggattgtgtgcccatcgctgctggtgagctcacaatggggaattttgggagtgagggaaaggaatagttagagaagagaggtaactgttagctgtttcatccatgtcatcattttttttggtaaaggaagcttttattaatctcagtcgattacatcaagctgatagaaccatactaaaaaaaactcccggcctctgcataactaggatgcacatagccaaaacacacacacacccacaaaagagtttgtaacaagtgaaggaaagtagtaaaatctagggagcaccaatcttcagcctagaccgccatccatgtccttgagtaaaacactccctgaccacctactccaagcgttgacatgccgctgcaaccaaatcttgtgaatcaggcttctgaaggatagcccatgtacgaaggaagtggatagtttaaaaaataacctataaaggagaagagatgtcatatcattcccgcaaaaccataatgaccaacaaatagtggttacccttaacaggataagcgacttaaggtctttcctaattccccgtagccaattaccagacatattggatacaccacgaggcgggaaaagccctgtagccacttgtatagtgcaccacacaaaacgggcaaatctgcattcataaaacaaatgtaatattgtctcatctgtgtgacaaaaggaacaattcttacttccttgccaattgcgcttggccaggttagcccttgtcaaaactatcccacgacgtaaataccttaggaagatcatgactttaagtggtatttttactttccaaattactttatttatgttgggcacatctgaatgtaccaaggcaagataatgtgacttaactgaaaactctccattctggattaaattctagtggaacttatctcggtcctgagtaagcgctagatttgccattcgtggaacatggttattccatgccactaattttggctcaataagatcccttcgccaagatacattcggagggtagttttgtagcacatttgctatagtatcctgtttattgtataggcaagggtattgttctcacagtggtgcttctctcataatgaatttgccaaaacgtagaaaatcacgcttgaccttcataaggctggcctagaagtatgagtccctagctttccactcgacttgtgacataggttttgagcccaagtacttgttacgaatcaattgttgccatacaccatccatcgtgagtagcttaaataaccacttgctaggaagggcaatgtttttcatatataaatcatgaattcctaaatcccctttgttctttgggtcggcacataatactccacttcatcaaatgacactttttcttttgatcatcacactgccaatagaatctagagcgaaaacaataaagtttcttgagtacacctctcgatattgcgaagaaaaacatcatatacaggggaagactactaagcactgagtttatcaatgttaaacgtcttcccgtggaaagtagtttccctttccagctaccaagtctcttctcatagcgttcttctacccatttccaatcattatttcttagtttcctataatgaataggaaagtagcataacgggaattcgccagaagaacaaccaaagagtttggtatattggtcttccatggttcgagcatcaccaaaatagaacaattcactcttatggaagttaatcttgagacctgagagatgctcaaaagcacaaagcaaaagcttcatgttacgagccttctcaaggtcatgcttcataaaacgaatggtatcgtcagcgtattgtagaatggaaatgccatcatccactagatgagggactactccacaaatttgtccatctactttggctcaattgattagagtgaccagcatattagctacaatattaaaaaacattggcgaaagaggatcaccttgtcgaaggcccttttttgtttggaggaaatgtctgatgtcatcattcacttctattgatacatttccacccaaaacaaaagactcgatccaagaaatccacttggttggatattgagatttcatacgaaatccaaatcaaaatttgatcctttcatacgaagtccttgtcatcaattgtatcaccttagttgccatgtggactcaaaataacctcaaaccagctcgagggattaaaggtgttcggttttgatagtttgaggacatagtttacctggtttcaaagatgagggatggcaactagactaaccgaatagtttaagagtttagggatggaaattatacgttgatgtagcacaattatcggaggaacttcttcggtgtgctgatatgtagatatagcacaaaatgttgtaggaacgactttaatgtggtactccctccgtttcatattgtaagacattctagcattgcccacattcatatagatgttaatgaatctagacatatttaatatctatgtgaatgtggtcaatgctagaaagtcttacattttgaaacggaggaagtagtagataatgccctaaggcagcccgaatccacggacaacaagagcttagtccaaagctccaaagaagatctaatccatgttctgtaataggaacatctagttctattgataaggtggtaagcaaaagtaagttccaaactagaggccattgcctctatttaaaggctacaaagccatctacaactcgatacaactatatgacaacctgatgacatcctaattgacaactaggatgctactcaaaacaactcatctattactcaatgacacttagaacacaactcattggacatacaagtattttctagtgatataatgacatatgcaatatcataattattcttgagttttcatgaagtatgtactatagattcaaaactcaaattttgacttcttgttcttagtagagaaaatccaattctacttgtaacacctatactttatgaattggtcaggtgatgttcctcatcacgttctcttgagtataccacttcactaaaaactatatatgtacaagtttgcaattaataagaaaaaaatcattttactccctcgaactatttagccggaggatttaaccccgtaaactatttttcagtcattttacatcataaaactattgaaaacatttcactatagatgataagagaatctactcagtaccactgagttcgatacacttcaacaatatgccactgactttgttgatatcaataatatgccatcgccttttccttaacctctacgatttaccatcgccatctacagcctgttagtttgcgttggagaaaagacaagtatgcccttagtgaagatcagcagcactgagaccataccgtgcaaggtaccgagagttataataactataaagagaacatacaacggtactaaacatatgaaaaatatctttatttaagcagcatgattataaataattatgagcacatattttaagtattttgattatgaacaaatatctccaaggctacaggagggggtagagctttgatttgccgtgactgttgaggagcggttgagggattgcactgacgacagtagtagctctccaacagggccagggccaccatgtccccttgcatgcaatgccggcactgacgacggcggcggcaccagcagtagctccagcaggggcgtcgacgtcgtgtccccttgtttgcgacggcaacgctgatgacgatggcagcaccaccagcagccctccaacaggggcgccgtctcccgtcggatgtgacgatggtggctagaccaccgctgacttgtgctacggatggtggcactgggtcccgaaggtcgggtcggcgctagggatggcgacgttggcgaggcgtggcgctgtggcggcactgggaagggtggtgatgcggcgctgggagatgcgatgctgggaaaaaaggggccctgggccatgctagggttagatgattcaaagggtattttggtcataactaagaaaattaacaatacaaacggcgcgacgatggcaaatcatagaggttaaggataatgcgatggcatattatggatatcaacaaattcggtggcttattgttgaagtgtgttgaactcagtggtactttgtagattctctcgacctatatatataaatggtattttgcattgaatttgataggactgatagatgcattacgtcttacctcagcattttctttagaactttcatcattgtttacaaggttggaagcacctaaaactaacttaaacatcaaaatttaaatgttcaagcaaacaatcatgaaaaaaattgaaaatattatggaacttagataatgatgccatctatggctttaaaaaattttagcttaaaataagacttgtaaaaaataaaaaaaagataaaaaatgtaccccccatctcaaaatatagtgacatagtactgtattagacacaacttagtactatgaatctggaaaaaagagtattaagcagtataatgaaccatagttaatagtttcagttgtaacatgagctaaaaattgtttaggggtttaagtgacccaatcaaattgttagagtgaatgaaatggacattttaaatgaatagtaaaataaaacgaaaattgaacccgcaaaatttatttaaaattctatactagaaaattttaagcataataagaaagggatgcttcacagtaaaaaaaaaaaattgatgtgttggccatatgcggatacacagcttgagaactggtgcactaatctgtcttatttgtacatctaagttgaattgttgctcttaataggtctcaaacggtgacggagcctttgttctcaccaggtcaaggtaatacacctcattgtcatttttatctattccaacccttactttgggcaaactttgtttggggtaaaaggtaatgctagtcatacacgcctaaattttgggaattacgtgtgtacagataattgtaagctttccaattgaaatcatgtgcagcacatctttttgaaatcgataaattaattgaccttttggaaagccaaaagttatatgagaagcctgctgatgagtggccatgtgaaataagctaggcagatatgtagtactccttccatccaaaagtctaaggcagttttttttcaccaagaccaaggggggaataactcatctaccatgtgataaaaccaaggaactatatgtatgcatgcaaccaatgagtattaagatgactgcttgggttctagtcaacaatttaatttagcgcatcaaaactacaaatatgtccatctcatttagaaaaccagaaagtgaaatatgtcttgactttttgatggagggggtagaactgaagtcacccctgtttggagaaaagagaaggtacgcaactttaacaaagagttttggataggcaagctgattgttgaaatgttatatctcaaagggtgtctcatgaggtaatggcattaatatatgaggatcacattacggtagagttagctttaaaagttttcatcccttttgggagagaagagaaggtatccaactttgacaatgggttttggctatgaaaacggatgggtgaaatatcaattattatctctcacgaggtaatggcattaatatattagtgatgaaattaggatagagttagatttaaacgcaaacaacttgctccgcataatccaaatagataaacaagctaggattaacgtaagataaatacttaactggattaattaactacgagatatatatgctttggttacgaatatatacactggcatatagtgctaactgcatcacacatgttttatagcaccggaggaggaacctgtggcagagccagagatgatcacccaccacgaccacccgcagcacaagcttcgcctggtgaccacgacttgtgacatgccgttccgctgtgacggctgcttggagccaggatacgctcccagataccgctgcgacgcctgcaactttgacatgcacacgttctgctccaacctctgccggccattctacagcaccctatgtacaaaggccgcatattcaggttttgtcccaagcctctgcctccctcgggccgcagggtctgtgacgcctgcggcgatcccgtgcgcgggttcatctaccactgcttcggcgccaacctcgacctccacccgtgctgcgccagcctgcacgggccgatcatcctcgacgggcttgccttcgacatcggggcaccaaggaagtgctgcctttgcatgcaggaaaagggcccagaacgcgatctgtggtgctatcactccaacatcaatggcgagggtgtgtatctccacgtagcttgcatcaagcacttcgccggaaggagatggcaggcaggccgtgaaaagaaatatggagggcagatcatgctggcaagcgaggagctcatgatggagggtcccctcaagagcatttcatcggaaaaagaccgcattattgttggtggcgtcatgcgcatcatcatctcagtgatatttggagacccgactgccaacaagggagacaacgctagggtcgctttatccctccaggggctggcagatttatttagcattcagagctaaactggtgtgtgatcactctccttgaaaagaacaaaagacctatcggtgtgcattggcttgttttgtttgtacttttgtttatttcctggaattggcaaggacttttatttccttcggtgtaaaataattcgtgtgtgtatatatattggcatgcagtttgctactgagtactgattaaataatttgataaagagtgataaatgtaataggtatatatgtatagggtttatttttcaacctatgtgcttgtaaacatgttgcattataaattgtatgaaatcatgaattttgattggtgatttgaacttaattgtaaaatctttggttcatgattatactttggtatatgcttgttatatattggatgggttcattttctttttattgcaacacatgatatgatgtgctatatatatatatatatatatatatatatataatgctaagctcttgaatattaataaacataattactatgcttgatgaaatcattatcaaaaggggagaagagatacaagtgcatgtttttcaggtaaaggaaaacgaaagaagttttcttctggatttttgagtactccgatgctttttaccacttttgtttttatttttccaaacactaaaacatttttgatgagtttgccaatgtgctcatcaagggggagattaaatcaaagtttgtttgattcttattctgtgatgaacaattgacatatgagattattggttttaatatttgaggattattggagtggttttggagatgattgaatttgcaggtgaacaagagatattgctgacaggtgataaccggtcagaccaggcaggtgctgccggtcagatcggagctatgtgtgcggtcagaccggccagcccgcggtctgatcggcttactctgtgtcagtttcggtttcgggttattttgttggatatcagtggataatttatgtgtcagttttggtttcgggttgttttgttggatatccgtggataatttatgtttatgacttctagatggatactatgcgtatgtaatactgttgtttactaacaatgagtcaagttggagatagcttgtgctcagaatatggtttcttggttgatgcatgtgtaggtgatcttaatgcctcgagagaatgttgccgatgatgaatcaggagtcaacttgggagaagatgacgtccgaatgatcaggatatcatacggcgtgcttaggctaaacatcaatgcatgtggttggtgaagattctatatggcatatgatggagatattgtgtgcgtataggatgcggagtcgaatttagaaggagtctaaatttggtacaattgaagtttgtaaagtttgtctatcactgctccgtgcgcggcttcgtctaccactgctccggcaccaacctgaacctccacccgtgctgcgcgagcctgcaggggcccatcacccttgacggccacgacttcgatgtccgggcacccaggaagtgcagcctgtgcaagaaggagaaagggccggaccgtgagctgtggtgctaccacaccaacatcaacggcgagggcgtgtacctgcacgtggcctgcgtcaagcacctcgccgggaagagatggcaggcgggccgcgagaagaaacacggaggccagatcatgctggcgagcaaggagctcatgatgaaggagggccccctcaagagcatttcgtcggaacaagaccgcattgttgtcgggggtgtcgtgcgcatcatcatatcggtgattttcggagacccgactgccaacaagggagacaacgctagggtggctttatccctccaggggcttgcagatttatttagcattcagagctaaactaaaacaagaacttaatcggtgtgcattggattgttttgttctagtttttttttttctagttaatttgtgcttttgttgatttcctccaattggcatggacttgtatatccttgggtgtaaaataatgcgtgtgcatgtgtatatgtgtgtgtgtatatatttgcatgcggttgctactgagaactggttaaatatatcgttgtttaacttattgtgttctgcccaaatatcttatgactcaagtatgaatcatagttgtgtagttgtgactgattggcacacactaatacatagtaccgaaaaggtgtcgggttgcaaacctgacaaaaaaatcggttttgcaactggcaccctttatctactagtaccaatgaccaatggttatttggtgctggtggtagaaccaacaccttttgtacttcccacaattaaaaaaaacagagacagactagaagcatcggctcaatgaaccgatgcatccaactaccttcttcaagccgcctttaatccccatacacaatatgtacagatcaagaactctatattgatttagcatcaataatctccattcacatcacagatagaaatattcaattattatttcccatcagtaacaaagcaacaccagcaagatgaagaactacacaacatcaaaaactacacaagtaggataaaaaactcatcttaaataaaataaaaaaaagatcaagaactcacaaccttcccgctgccgcatcattcaccaccagcaccgtcacatttgccatcttcccgtttatcacgatcgcctatgcgtcatccccggtgaccccacccccaatcacctcccaccggcgagagcagcgtgatctccatgcatgcgtgcgtcgtcaccatctccacactgaggtcatcgccgccgatccattggatgcggtgagagtggatgggagttgccacagctgcaggaaaggtggaggaagtgggaagagaggatgatgggcggtgctagtggtgaaggttgtgaggattgggacggcggcgacgatgcacgcagaagtgagctggagtggatgggcggcagcaacaggccgagagaggaggggatgggggcgatgggagagtgcgagagacgataaggttggtggggttaaaaggagtctcacccgtgacagctcagctcagtttcataaagttgtcaatcttttaaagaatcggcacctataatataaatactaggtgaaaccctgcgcattgctgcgggaatttagtatgaagatatacattgaaacattatgtgaattatgttggataataatttaacatgtctgtgtttgaaaagctcttaaattataaaaaactataaagatatagcatgtttgcatgatgtttaaatgtgatgattgttagtggatgatgatgtgacatcttgttaattagtggatgatgatgtggcatcttgttagtgaataatgatgtgacatctttgcatgttaagcttaagtagttagtagggggatgcggtgagagtggatgggagttgccacagttgcaggaaaggtggaggaagtgggaagagaggatgatgggcggtgcagtggtgaaggttgtgaggattgggacggcggcgacgatgcacgcagaagtgagctggagtggatgggaggtagcgacaggccgagagaggaggggatgggggcgatgggagagtgcgagagacgataaggttggtggggttaaaaggagtatcacccgtgacagctcagctcagtttcataaagttgtcaatcttttaaagaatcggcacctataatataaatactaggtgaaaccctgcgcattgctgtgggaatttagtatgaagatatacattgaaacattatgtgaattatgttggataataatttaacatgtctgtgtttgaaaagctcttaaattataaaaaactataaagatatagcatgtttgcatgatgtttaaatgtgatgattgttagtggatgatgatgtggcatcttgttaattagtggatgatgatgtggcatctttgcatgaagatacacattgaaacattatgtgaattatgttggatgataatttaacatgtttgtatttgaaaagctcttaaattataaaaactataaagatatagcatgtttgcatgatgtttaaatgtgatgattgttagtggatgatgatgtggtatcttgttagtgaataatgatgtgacatttttgcatgttaagcttaaggagttagtagggggatgcggtgagagtggatgggagttgccacagctgcaggaaaggtggaggaagtgggaagagaggatgatgggcggtgcagtggtgaaggttgtgaggattgggacggcggcgacgatgcacgcagaagtgagctggagtggatgggcggcagcgacaggccgagagaggaggggatgggggcgatgggagagtgcgagagacgataaggttggtggggttaaaaggagtctcacccgtgacagctcagcttagtttcataaagttgtcaatcttttaaagaatcggcacctataatataaatataggtaccggttttctaaaaagtgtcacctatattattaatgccatatcatataaatataggtaccggttttctaaaaagtgtcacctatattattaatgccatatcggcacctatagctgcttaaatgtgctggttttatatattttttatccaatgtggaaacggttaaatgagctagtacctactagtgttttgtagtagtgacacggaggattcacatttccttattgttagattaggcatcaatatgcatcatattcataccatgcacactttgttgtacggtaacacactttttggtggcaggaatacaccaaatatttaggataaatccaaggtaattaaataacatggaaccattctatttataccagattgcttttacataaatatatgtgtttttagtgtatttgggtgctcttttgtgtaacatgtcactgttgaatttttgctttcactgaccatacctattttcactagtggggaacccatctttagttctgattggtaacccctttagttttgggtatgcaacccagacatccaattcaggactaaagctgggtatccttagtctcggttgaaatatctttagtttcggttgataacactaaccgggattaaagatggtagcaccaaccacttggtactattatctttaatttcggttggtgttaacaatacttttttttctttttttattcttatttgctgcttgcatcccacgtcaagttgctcctgacattcctaaatcaaattaaatccccacatcaaattgacatatcacagatcaaatgaacataatcatcaacaaaatcatccacaaatttacaaatcgaacatcgtacatcgaatgatggcagcaacacccatgccatggcagcagtactcggacaagagagacaaggaatagaatgaagaaaaaaagaagaaaaatgataggaaggcttcacaccatcccgggatagtcaacagaagaggaagaaaatgttagagtgcgcagcctgttccaccaaccgtaggcgtctggtccacagacccaaccggaggcacaagtttaggtcctgggcctacacaatccaaaagacagtctgatggatgagaactgtaacaaccttttaattcgtgctcccccatcatcaattaacaatgtgggactaacccaacagaaaaccattaaaaaaagaacaaaaaaaaaggggggagcgtgcagccactgcatggccgtccacccccgccggccgtcggcctcgccgcgccgcgctccaccgcgccattacgtggccacctcaccaccgcacgggcgcgccgccgccgcccggctgagccacgccgccgccaggacgagctcctccgccgtctagcaaagcatagctgccacatgggcgcgagccgcacccccgccgtcgcatggcctcgccggggcgccactgcttcgccgggccgcatcagcacgactgcgtggccgccgtctgccgcctccccctcgtgcgccgctgcgtgccgccttccctcccagcggacgggagggcgccgccgcccgccgtcgttttcatcgcagctgtcatcggcttcgcagagagggaggggaggagggggatcaagaggagagggaggacgacggcgaagaagatatggagaggtagagaaaaagagatcgcgtcagagttaagtacgcaaaaatagcgatttttgtagacacttgggtgcatgcggttggcccacccatacgcaaaaatagcaatttttgtagacacttgggtgcgtgcagttggcccacccgcacgtgaaaaccatttttgatctcacggaaaattcctttttaagtagtgtcctttctatttttgggatcaaattgttgtgtaaatgttatgtcaatatcacgtgggacgaagaccaagtcataggagacacgtaattagctaaaactggagataatactgctaagcgatcttgtttacaccggtttgtaagttggaggacgggttatatctggttttttggttcaagcatgaaatggctggaagacaaattgaggacctaatgtgaacttagtccgacctgtcgaagtatatcgctcacagtcacagcccagtcttcactaggaaaacggaaagaaaacgaatgtgtgaaacaacggcccaaattaactaaggcaagtttccagtagaccggtctttctcttttttcttcctctttttttttttcttaaactcagtagtttgtcatagcagagaggctagttacattttgtgccgcgttaattattccagtgggtataacacatcaatatatttcatctgcttgagttatccatgtgctagaatacccaccggccggaacaattccattagcctataattcaattaatttgcatgcatggtaattatcatgtaattattccgtgtcaactgcaattgaactgacaatactcacaatagtatatgtacattgaacacttaacagttcttttagataattgaccacgtaaaaggttaataataaaaaccatacatcatagaaagaattattaaagctatatatagagggaatctacaagggttttgcctcgaagtgcacgcaatgacgatatcccgatagattcctgcatccaatgtccatttattcatgacgactgcaaaatcaatattattccattaacatttgcggacaaactttgagcataatatgggatatataactaattaaagggccaaaatagataaacgacctagagtcgttattatgtataacaacttacaaggtgtggaattttgaagtggtcagtaaatttgagttgacaaatgaaattacttcaaaaactaaagaaataatatgtgtagacagtgactttttttttctctttgccagggtacgatgatagtgatctactgtaggttgtagatattggttcttttttctggtcttatatacattgtatggttcgacaagtcaagaaagaatcagagttctcaaaaggaaaaagagaaaaatatcgtagaacgaggtttgcacttgtttttttttggtaaaaattaatggagatttattccactacatataatcttgcttacaatcattatcaaggaaaggtaaaataaagcctgcaggaacatataaacacaggttgtaaagcaacacgagaagaaatactctccttcgctacacaccttcgctaatggctagcatgtgtgctgtaccgtgttcgccgttcgacgtacccaacaaaacttcatctcttggaaattaaccaactaatttgaacttcaaatcttgattcaatgtagtatggattgacctatcaaattgtttgctaaccaccacaagggaatctgtttcaaatataattcttgtagcttcctaatcataagcaatcaattatgtgcttgcaaaagggtatgtagccaagtggttttaaagggctaagtttccaatttaaaaggctgcatatattcgattggcgatatagaggctgggtaaaaaaatacccttctctgatacaaaaagttcttatgtaagtttgctagtaggtaactgaagacatattaggcttggtattttagtttatctcaatataattacttttctctgttgttcgataattgtagagctaggaaacattattctacataaaaagtttctatataccagttgatgtttcttgatatttttataaaatttgtgtatagttgtgctgcgttaattattccactcggttacatctggcacatcaatagttacatatttttccagtgaaattatcattatgtgccagaatatgtaattctattactccatcaatgtaaagtgcatttcatcattatgtatgaatataataagagccagtgcaagtccattaacattcacggaatttattttttagtatacgatatttataagagccaaaattacaaataaacaaaaaccaatataattgacgggctgcacagtaatccattcatttctctaaaagttcaagtgaactgcatgagtttgtccatgcattgttatatatatcaaattaacaagagatgaaagttcaagctcagtaaatatgagatgacaataatattcatttacattaaaaaacatgtaaatatctgcaggatgaccacatatttatctaaaagcactggtggagaaaccatctttcgtcggtcggccgaattccacaatagtcccggatacaataaaaaccagggctaaagatgatctttagtcccggttgatcaaatatgccgggtctaaagatcaaatatgcccgttaccctttttaaccgggactaaaacttgatctttagtcccggttcaaatgctgtcagggcctgtcaggccccccgggatctttagtcccggttagtaacaccaaccgagactaaagatcgtaacttaccaaccgggactaaagagctcggggatctttagccccggttggtaacaccaaccgggactaaagtcccacccctatatatatgtcttctttctcctccagctgcccgagcaagtttcaaaatttcttcaaaaaagaggggaggtcacgccaaaatttctagtgaatttattttggtgattacatacaaatcggaggtgcctaaaaggtttgcaacttcatcctccagtgttttttttttgtcatattacatttgcagctatgttttgcacacttttttgtctccaaaatttagttgtaagttgatgagagagaaaatttgtgtggggaagaaagaatatatagaaatttagttgatttgctaaagaaggttttataaaatagttgagaaagaaaatatagtgaaagttaatcttaaataatagaaaacaaactaaaatgaaaattaaaagaagtaaaacacattaaaattagtttaaaactttagaaatagtaaataagaattatttggtgtaatattttatgatttttgtatgaataaagatatgtcattattgtatgactgtggaaagagtttgtaattatcttataattattgtatgactgtcattattgtaagaataattatttgtgtatgattttttttgactcatgtagatggatcggcaatggatgtacactcggcaatggatgtacgctgaccggcggtccaaagagttcattgacggcgtgcactattttttgagagtggccgaagctaacgggcaaaggggttttattcgttgtccatgcaataagtctaagaatcagaagaagtattctgcatccaggactattcatttccacttgtttgagtcggggttcatgccaagctataattgttggacatcccacagagagcaaggtgttgaaatggaagaagatgaagtggaagacgacaatattccggactttgctcagtacgttggatttgaaggaaatcaaacaggcgaggaggaaagggatgctgatggtaacgacgttgcggatgatctcggtcagatgttgcaggacgccaaggaggactgcgaaagtgaaaagggggcccataaattggacaagatgttagaggaccacagaacgtcgttgtacccaggttgcgagtaggggcacaaaaagttggataccactctggagttcttgcaatggaaggcaaaaaatggggttagt

SEQ ID NO: 9241 - DNA, 6129 bp, Oryza sativa
tacatgcaaacagcagaaaataccaagagagattaatctgacatttagagatcaatctaataaacaacaataagttgaaaaggaaaaaaacccggcgaagtcggagattaaaaggaaaaaactcgccgagattgatctcttcgactgactccgagacggagcggaggaggcggaggtcgcagtcgcgggcggcgttggtgtccatcagcatgacgcaggacggcaggaaggcatcggcgtggctgcagccgtctcctatgcatccgattagatcggttttggcatgcttcgtgtttgtagatccatcttgcaacaccatggcatcctcgttgggtagattggaccagtaggcttggtggtggacgaggacgaccatcaaatccgtcgaactgtcgttgccccgtcgttgccgtcgtgctgatgcgaacaagatcaggcagagaatagcagcgacgattcgtcttgttgaagtcgtcggcggcgaggaatcaaggagctcccaaagcgaagacgaagccggcgactcataaagttgattccatcgcactcgtcgtcaggaaactcggcgtttacctctacctggcgcgccaactgtcgaaacatgaattcggcaataataaaagggggtagcgcacgagacctaaaagtggatggatgcggatacaaaggatttagacaggttcaggccctctcaatgagaggtaataccctactcctgtttggggatttgaatccgccgggtgtagtatagatctgacgatcaggttgtctcatgccccctagagggcttcctgcccaccttatataggatggggggcaggattacaagatagaaaccttaaccaacacggtatcggtttcctaaatctactttacaatattatcaaaccaggactttaggccgttccataatatacaaggaaacgtaatacccaagtcatgatctgttacatattccatacatatatgttatcccctattactagtcggataaccatgccgtgtggatatggggtacccataatctccacagtagcccctgagaccttcacagtcgaaaatataatcttctctcgaactagattactccaaagccgagtgcttcaattatcttcgccatggtctcccgagtacttttaccaaatctgaagactgtggagggctgaaaaataaagtcaggtgcatcgaatagatgcacctaataggtgtagcccccgactatgtggttaattgaaccaaccaaacatatagtcaaggaataaataatctaaccaaccgagtggttttgataattgtaatcaaccaagtgacttgatatcaatatatagcatatgcggtgtgaatccccgaataatatgatccaagtgatataccgactgcttggcaaaatatgatgcgtacaacctaaagttgacaacatctttgaaagttcacatagcaaaacagctataaagaagcttgtatgttgtgaataaagaaatttccaaagtattgggcatacgccatgcgcacactgctttaacagatgtgcttaagtccctagaagacacatggttccaccacacctggaaatatatggcatatgtggtataaaatccgagtaaataaactcataaaggatttaccaaccgcctggaaaaatgaccataatatataatcagcctaagccataatattggtcaataaaaatgcacacttacgtggcaaaaagcaatgatattgtatccaatcaattgcttgataaacccaaacagcacattgactatataaaaaaagtcagcggggcagctatataaagctttactgtttgacaccttttaagatgcattgtaccaactcctaaaaagtcgagtaactgcggtataaaaggattttaaggtattgggcacttgatcacgcgcactttggcctaagcgaaaagtgcctaagtccctaaaagaacgtgacaggccacacctgaaaatatgggctgcagacatattaggcctaggccaaaaaatatgccttcgacaccctttaaaggatgacgcatgtaacatgctcccgagtaataaatcttccgggtaatatagaccaaatgtagctcatatgaagagcttctgatctgagtggttatcccttatgagatactccaaaatagatgtaacaattgaatcccgactggcgcaagtattcagttgataacccttacggggaataataaatagtccagtctttgagcatagaaaatagacccatgatcacgaattcatattgcatatatccagagcaagtccaaattgaaggtatgatacttgtgtttgagctaataagcccctgagcatatagcttgtccttctgtcgtagtcacaattgtccattgatggtagctgacgcagttggcatagagacaagacgaccaacatagagataatattgcccaccagaggtggcaaaaatattggtggtagtgaagataatgataccaatcaaaagtgatgaagttgcacagccgtggaggcgaagaaaccagtcggcaacagtcaggtcagccatcaatgaagatgaaggtgcccagcgataaagttatgtagccatggcagcgaaataatcaatcggtgacagacgaggcagatcaaaggcgatgacgaaatccaccaatcatgaagatgaggaagatagtcggcgacgacaaacgtaaccgacagtaatgatgataagcatcaacagagatgatcaaatatgatgacgaagttgcctatcaatagcagtagagtaagctatgataaagaggtttgacaggatgttgatgaagatgacgatgtcggtgatccagtcaatagcggtgtaatagccgatgataatgacgaagacgctcatctgcgtttgcatagtaggtcaaccgtgaaggcggaatagcaagttggcgaagtcttagtcatccattagcaacggcggaatgtcagagccgatgaagcagatgtgctggtgacgatgtcagtgacaataatccatcaaactgttgtagatgcttcacttggaggaaagtatatgctgttgttcaactcattgaatctgatatgagttgattggttgatgactccaaactcccagacatgtaaatttaatcttgacctactgctctgaagcgaagacaaaattgatgactcccagagttgacttgttggctgattaattgattgcttcatcttgacataaagcttgtcaaattttgagccatgtatttgtgtagcccccgactctttgattagttgggaaacaactgaacatagagtcgagaattatagcttcttgttgtcgagtagtcatcacttgattgaagatatgtgttgaagatgtccaagtagaaatcctgaatattggagagccacttgttgtagtaaaataacacggcatcgcatgccgagatgtcgaggttcacaaagacgtcgtggttggtgaagtagcaaaacttgcgaagcagcagcaatagagtttgccggtgccgaagataataaatatgaagtcgctctaccatgatgacaaagttgcatcgccgtgatgaagtgaacacgagtcggcggcaacagaagcaaactggtagtgaagacgcgcagttgtgaagatgaaagcaccagtcggcggcggcataaccagtcggcgacggaagacgatgatgtccatcagtagtggtagctgtataaaccagatgtagaggcgagggcactagtcagcagcagacgagacgaccggcgatgaagatggtaaggccaatcaacactggcagaatcatgcagccatggaagtgaagaaaccagtcggcagccatggcaaacgtaggcagcttgtgttgaagatactgatgcctattagtagtgacagcgatgtagccagccgtgaagaagatagcatcagttggcgttataacaggccagccgtgcaggcggtgacaccagtcagcggcggatgcggcggccggtcggtgaagacgtagacgcccaacaacggcagcataataggccagccgtgcaggcggaaacaccagtcggcggcggtcgaggcggccggtcggtgaagacgtagacgcccaacaacggcggcataataagtcagccgtgcaggcggaagcaccagtcggcggcggacgaggcggccggtcggtgaagacgtagacgcccaacaacggcggcataaaggtcagccgtgcaggcggaaacaccagtcggcagcggcgaaggcaagccggtcgatgaagacgtagacgcccaacaacggcggcataaaggccagccgtgcaggcggaaacaccagtcggcagtggcgaaggcaagccggtcggtgaagacgtagacgcccaacaacgacggcataataggccagccgtgcaggcggaaacaccagtcggcggcggcgaaggcaagccggtcggtgaagacgtagacgcccaacaacggcggcataaaggccagccgtgcaggcggaaacaccagtcggcggcggcgaaggcaagccggtcggtgaagacgtagacgcccaacaacggcggcataataggccagccgtgacggcggcataataggccagccgtgcaggcggaaacaccagtcggcggcggcgaaagcaagccggtcggtgaagacgtagacgcccaacaatggcggcataataggccagccgtgcaggcggaaacaccagtcggcggcggtcgaggcgagccggtggtgatgttctgactgatccattcctggagcgtaagagataagcttaaagccatgaatcccttttatgcatatctggatctggatcctgcagaacaaacatataggatgagtagtatctgatataaatataatactcgagaaaaaatcaagcagtttataaatacgtatttcttctcttgttaattttgatttccccgagcagatgactcattacgtttaaacactctgcccgactagtcatagccaccaagcactgggagtcggcctaagcacttcccaaacatgcatatgagtgacatgagttcgtcattaatggaacaaagtttcacggatcggagtttactactcgggtacttttgcaattattaagagcagaaaataaattatcttatctctatgcttttgatttattccgaataatacttagcaccttgcgttactcggtccatccaacgagcccccgggtgctaggaatcggcctaaaggcaactatccattggcaaaccaaacggaaagcataggaagatggaactccataactcgataggcacttttgtactcagaatatgtcgcaagcaatcaagataaatattatgaaaattgtttaaaaaatatgatataacatctgtagcccccgactcactactcaatggaagaccaattggtgtagtgaggcagaggaaaaggcaaaatatcatataaagaataaaacaaatgatgacttagctttgtaatattccctcggtgacagcaaaagtagccgatgtgggaacgaagcagtccatcaatggtgacaaaaacatcagtcggcgccagtggaaccaagccagtggtgtagatgatgaagcccattaacagcggcggagtgaccaatcaaccatataggcgaagacaccagtcggcggcgacggaggcaggccggcggtgaagtcgtagacgcccaacagcggcggcataataggccagccgtgtaggcagaaacaccagtcggcggcggcgaaggccagccggtcggcgaagacgtggacacccatgaacggtggtgtgaccaaccaactgtataggcgaggacaccagtcggcggcgacggaggcaagccggcggtgaagtcgtagacgcccaacagcggcggcataataggccagccgtgtaggcggaggcaccactcggcggcgacggaggcaggccggcggtgaagtcgtagacgcccaacagcggcggcataataggccagccgtgtaggcggaggcaccaatcggcggcgacggaggcaggccggcggtgaagtcgtagacgcccaacagcggcggcataataggccagccgtgtaggcggaggcaccaatcggcggcgacggaggcaggccggcggtgaagtcgtagacgcccaacagcggcggcataataggccagccgtgtaggcggaggca

SEQ ID NO: 9242 - DNA, 25581 bp, Oryza sativa
acaaggtattcagaaatgaagatctcagcatcacctcacaactattcgtcgtctgactaataatcatgtctgattaaacattttttaatactatgattatctctgattaaccaatgcttgaccagcaattccgccaacgtttcagcacttaatagaaaactgactcaaacatgcagaattgcagattaaccagagtatgtactgacaacaactccaacagacataataagacaactaggcactaggcactagaaataattgacataatagacataattgacttaatagagtaggcactaggcagcgacaactgacatagtaagactgtaatctgcacatggagactgtaaatcatgcaagcaatattccattcacaacagcaaaacataattcaggagttcacagaatgcgtcctgttagaagaagagccactcaactcaagacgtcaagaaactcagattctttctggtatttcagaaaagtgagagcttgagaatacagtttcgacttctgtgattgtaccctcaggcccgttctttctccaacaaaagttagatgaaaatttggatatttatgtcacatttttcaaactgctaaacaatatgcttcatgcaaaaaatttctttataaaagcagttgaatatcataaatatatttttcaagtttataataattacaacttaattaatcatacgttaatatcatctcgttttgcgtaaaacacttaacttaatcttcatcttcatctacggcataaaagaaagcctctccaatctcggcatcatgttcatttgactcgtccaattcaacctgcaaacggagaagaaaatggttgcaaatttcgaatttcactagtagcagcttgtatttcacattcactagtaccagagttgctttcagatctgaaagtggagttccaagtcgattatatggcagtccgggatcatcatccttgactctgctaaaaaacattctcctgcagatgcaaaaccgcgttaagagacagttctgtgattacctatggttatgtttagttcagcgtaaagtttagattttggttgaaattaaagatgatgtgactgaaaagttatgtgtgtatgacaggttgatgtgatgaaaaaagaccaaagtttagatccaaaatccaaactttggatctaaacatagccatagtaaaactagtatctatgaagaattcaaactccaaattcctattctgtctgtgattctgcatataactatgtccattgagatgctttattgcctagattacataagctatacatacgagaaatgcaaaattgtttccaaaggggaaattttttctgggtgagtagaaatagcttgtgtcacattaaggctgtgtttgatacttggggttgggaacccaactccaccgcacggaaaacggagcggtccattagcgtgtgattaattaagtattagttaattttttttgtcaaaaatggattaatttgtttttttaaagcaactttcgtatagaaactttttacaaaaaaacataccatttagcagtttgaaaagcgtgcacgtgaaaaacgagggaaaggggttgggaaacttgtggaaagaacagaggcctaagtcactcacattgatagaactaaaagatgggtactacagccaaccaccaccgcaccgcgttcagcgagtcatgatagatgctggaaactctgaagccaatccttcagagttcagaataggctgggtttagatcctaagtttggatccaaacttcattccttttccatcacatcaacatatcatacacacacaacttttcagtcacatcatctccaatttcaaccaaaatctaaattttacgctgaactaaacacagccataattatcagaatttggatggaacaccagcagagcctaacctggcttcaaactgtaaacaaccatacagtttggtggcatataatgattccaacagtaaacaaatgcacagatttatcacaccccagttgtggatcacgtatgcaatacgaacaaacgccaaaaacattactggcactactcaagccaactaacctgcagctaatcatcacagcttcaaaatgattaggttaacttgtactatgctttactcattccaatggtacactcgtacactatcataactaaacataaataggcaattctacaagcaaccattcttgaggagagaaacaaacaagcaccctaattttacaaaatttaagatatgccacccgtatcttaatgacatgtagcactcacatgagtcaatgacatatgggtcagggtggcatatcataaattttgcaaaatttgtatggcatggttcaaattttcccaacaaagacaaagccgaggtccacaagtatcgaattatacagatacgatccattaccaccaaagttctgcacttgctatcacgagagtactaggcagccaagatcaaccatgacggcccgtttagttcgcgaaaagaaaatttttggacatcggacgtttgaccggatgtcggaaggagttttcggacacaaatgaaaaaattaattttataactcgcatggaaaccgcgagacgaatcttttgagcctaattaatccgtcattagcaaatgtgggttactgtagcacttatggctaattatggactaattagactcgaaagattcgtctcgcgatttcccctctaattgtgcaattagttttttaatttatctatatttaatactctatgcatacgttcaaagattcaatgtgatgtttttgggaaaacgttcaaagattcaatgtgatgtttttgggaaaaagtttttggaaactaaacagggcaaaaaaaaaatggaggggaaaagaggctggtttttttttttttggtgagcggaaggctttcacctgctgcttgaggtcgtgacgcgcgcgcgtcagatagcaagcaaaaaaaaaataaaaaaaaatcctcccatttctctccctcctcctcagcctcaggtggtcgagaggactccacctctccgctgccgctatccccgcctcgcgccgcgccaccatgccgctcctcgccgccgccgcggcggtggcgccgccgttgtcttccttccactcgctctccctctcctcacgcggactccgggtcccctccccctgcgaggcccgcccgcgcgcgccgctccggcgcggggacctcgccatccgcatgggcggcggcccgcgcacgttccccggcggcgtctccaagtggcagtggaagcggatgcaggcgaggaaggccaagcagctgctcaaggcgcgcctcgcccgggagcgccagctctacgagatgcgcaagcgcgccgagctccgcgacgccgccgcgcacctcgagcgcccctgggaccccgacgcctccgactccgccgccgccgcggcggcggcgcccaacctgctctccgtcgcggcggacgaccagatgaaggcgctcgccgaccgcttccaccgccccggcggcgtcgacctctggaacgaccgcgacgggccgcgggtcttcgcggccccggacaccggcagggcctccgcgcgcttcttccccaagggatccgtccatagcgttcagccctacggtcttgtcaatggtggccttgagagcacactggctgctcgcggtaacccttccgatgcgacggaccggagtcaccgccaccgcctgcaaggtgttcgtgagaatgcggccaagaaggaaatgcgtggtgttggtggtgatcgtagcctgcggttgagtacatcgaaaggggtggagtgtgggagccagtgagtaacttggatggtggcgacgacgacgattctagcgacggtggatggaacgatgacattgttacctcggacttggaggacatgggggatgtcgatttgcgacccgagcaaagagcaatggttgggagagatagaaggaaagataatgtggcaaggtgggaagctacaacatctgtagccatcggtagcgatggtgttagggatcagcgtggcaatggcttctctttggaaccagaaggcacaagtgaatatcatcttggtcaaagctggcaagagagaaatagtgggagtagagggaaacgtcccgcagggagaaggaaggccttgaacaccgatggcggtagcgccattgggaaggatcgagtggtgggtggcagttcattctccgactctgaggtaacacgcaatggttttgaaccaaaatggagatccacgactagagggcgcacaacgaatgatgttaggaggtggaatccccccaacgaaggcggtaggaatgttcctagaaagggttggacggatgatgagtttggttcaaattcagacagtggaatggatcacaagttgatgccaaaatggaaaactcagaacaggttgaaccgaagcgaaaatggcagagatagaccggagctgaaatatatggctaataccaacaatggggagaggactaggaggtacatgaggggcagcgatggtgagggaagaagagatcggtttgttaatcgcttcgcctcagatttggaggagccagaatggaagccaagaagaaagagtggagcaggcaacgatggtgatggaagaagagatcggtttgttaatcgcttcgcctcagacttggaggagccaaaatggaagccaggaagaaagagtggagctaggatgaacattggcaacagagagtacatcgatgacatgaatgggagattcaggaggggtagcgatggagatggcatgaatgggagattcaggaggggtagcaatggagccgcgagattgttggatgctatggacagcaacagagaaatcggcagtgaggatgatagctacaggatgagcagaaatggaggacagcgcaggggagacgggtactcgctacgcccaacgtcagaattgcacaactctcggaggctgagggaatcaaatgaaatgtagttctttttttcttcttctgatagaaagatgaaatgtagtactagtattttacaatgatgataaacaaataacacacgccctgtgcagactaacttctaggagtacaacccattcatctgttcaatagcagtgtacagcacacgccacttgcttttgttcagattatgcgacgcaacgcagaaatcatcgccttgctgacttccatataaaaaaggccaaaccaacaaggctgatcaatcaagcgcatcgcggatttggtagtttttatctgaaagttatcttggttgcactgatcaggtagtgcaggtcataattcaaacaagggcatggaagaattcacataacttcagaattataagtgtcacttccaatttccaaatgctggattataagcacagaacattgatataaaagtacatgattcatgtctccctggttgcaaattacatgatggtcatgggcctcatggcagaccttatgaactcaaactggaaaagatcaacaacattggtgcttggtaaagattgctccaaccacttcacctgcagcacataatacacctgttaggcaattaatcacggaaataccagggagtgcaatagacataggacaacaaacagcgcagaactttgctttagctcctccgccgatgtgcttgagcaatgttggagggaactaatcatgcatgcaaaacatataaaaaaaaatacataaaaagcttaatcacaaaagaatacatcttcagaaaaccagattttgaagtgacttccttaattgatataaactatagattccacgatttccattaaggagaggtataaaaaactgctctaaacaaacccaaaacccaactctttgtgaaaaacgggtatagagagactgaatcatatttctatctttcgatcccgttgcaacatgggcatctaactacttatcataaaatgtaactatgcctttgttagaagttgcccctttcaaattaaaacactaatccgtatgaaatgatcaaatgaatctgccagaggataatcgacttatggaagtctgggaagacagtggcgtgtgacagcaaacaatgctaaagttagagtaacttcggcaaggatgttggctctcatttcaccacaatgcacagaaaaaggacacctcctaactatgtaactcaagtatctaacacaatgcaacaaaaatagtggtgcactgacaagttcttaagttcacattagaaggtgaaaaacataagattctgacaatgatcatgcagaaaagggaagaaaaaaaaggtgatactaaattatgtgaaacaagcttatttgcatcttaaagtgaattcaaccaggactgagaaaagaataatgtttgctccaacatagatggcaacatgtcatatagtacagaaacatgcttcacatgatagtctagttagggttatagtaaaacatatctacctagattaaagatgcaattttcaagtatcacagcttaagatgcagctaaaggggaaaggcatccagccatccagtcagttatcttaccaagtgctatccacatgtgttgacttgatgaccaaatcaatatacatttcgttggcacaacatgcctcttcttagggcaggtatatacttatacggcagaacgaatgctaagactagaaccaatgatgttcagacttcattggcacctagtatatacatttctcaagaattttgttctccaccgatcgtacgtgctaaatacattcttagtattcctatggatgaaatatttcaccatgtaattagacacctaatcttttgaaaaaaaaaaaagcaaacatgaattgtcatgggaagcaaacgaacaactagccagtccaaccccgcgccacagtttcaatatgcaaattactaatctgtttcacatgaaaaagctctacataatctccaatagatagatcaaggtgagcacttccgaacaaccctaacgcctccaaatcgatcccaaatctaacgaaacgaacccatttcagccggaggaagagaacaaggggagcttttacaccgggggggcgctcacctcggggaggcggcgcgggtctccgcgcgtggccgccgacgcgatctagtggtggtggtggtcgccggaggggcggtagaggcggttgtaggcggcctcgccgacgaggtagatcccgaaggcgacgatggcgatgccgagccccggcgtggcgtggcgcagctggttccccaccatcgggtgcctcctccagtcgtcccgccgccggaagaactcccccgtcgcgttcaaccccttccccgccatcgccgccgccgctctcctcctcctcctcctctctctctctctctcctcaacgcgcacagccacacacacacaccaacacgaaagcccaagtggtagtagtatgcgatgcgtggttccagcccgttttgaatcgggccttacaaagcccaaggaaataacacacgcagagtcagagaggaacagagagggggaatttttagtattttttgaacctttttttatttttaaattttacaaacataaatattttcaaaacttattttcaaaatatgaatcttttggccacacgtgacaaaataaaattgtcatgccacccacagcgggtgcgatagttttgtcgtcacgtcattcagatgagtgtgactattgttttaccacagttcggctggtgtgatcaacaggttcaattttctaaaaagaatagggttgaaaatgtttgttttaaaaattagaaatataaaagttcataaaataaaaaaaatcaagagatagatagagagagagagctcaagccgcaatggagccaattacatcgcatgtatcgatcaaaacaccgtgccaattacaccctagtatgcaggatcaaatgcatgaatggtatagaatttcaattccttcaattcaaagggggcctaaagcactgatagaaagtaatggtttgtattgtatagtgtatttctttgttgttctgctcacacatataatctatctacaaatatacaatgtttctgcctctctgttttttcttttcctttcgaacctgcttgaagaaagacatgcacttgacgatgggttcctgaacttgtccaagaagctggtgttgtcaagtcttgaactgtcgaacatcagcaaccaaaagtcccacaaaaaaaaaaaacaaataaaggagccaagacagggtagaaacctcatgaaaggggaggcagttatcatagaatcatacacactaacccataacttaatcactactgaacaccgagagtatccaactctctcatagaggttcacatcacactacgaccacagcagttagcctgcctgcctgctaaatacaatagctacttaccatgtcgggtacaacacaatgactgaaactaatacaacaaccggcctgcacgccgggtctgctgctgcacggcagcaggttgcgggtgaagcggttctccgcctcttcaccaattcctaacgattctaaaacatgtcaaccgggagcctcccgtggtcattctcggctcctcttgctgctgcagccagggcacttgtactgcttgatgtgctctgccttcgcaggggtgatccgaacgcacttgccatggaaccacttctcgcagacgtcgcagcagatccagaactcaccgttcgcgtaagtctctccgcaagcgccacacatgtaagcctggtcctcatcctctgtgccttccgggccgctgtcttcctcatcttttggctgaggtggctttgcaggcttgctgttagaattggattgcttcgatggctggaaaagaagggaaacgaaaaggttaaacgttgtgttgatatgggcgctagataatgcatgttagacatgcatatgatcacatgtacatactttagggttggacttgttgcttttgctgctgccgttggagacttttgtttgcttcttggcaattcccgtcacaacttcatatacagtgggaagaccattaatcatggtgaagagccgtctcctgaaattcaaatgccagttatggactattgtcattttctaccaaacaatataatgttgattgttgagtgacaatgcactggataatattactcagataattacacaaaagatgaaaaatcctcttgtaaactttgacaaatggaatcagaatgcctcatcacagttgatttctgtaaataagaaatgcatcgacagctgcaacgaaaactatgcaaacctggcttccttatcaaatccaaagcgagccccaaagtaaaatgctacagacagtagccatgcatcgctatgaactgcaaccagcgacaaccaatctttttcgatcattccatcacgagcaaagtttatgcccagtgctggttctggaagttcaggaggtacttcctcagctggaagggtcacgtcccaggtctcattgggcaatccataaaggcacaggttctctttctctgaaaaaataggagatcactatgtcattactatgacataaacaagggaagataacttcattcaacagactacttgtgatgtaatgtaccattcatcattatttcaatggacagtacagcacaaaatggctacatacagttgaagattaacccacacacgcttgaagcacatactggggctatgcctagggagtcgacaaaccaatttactcaaaacaaattattctcacgtaacccctaaaacattaaacccgtcttcaaacatcaacaggacagtaagttttggagctactgttgtttttcacctttaattgtagtaatgatgcaattacagtatactagcatattgacttacattttgggaataattaattatttgccactcttacggatggtgataaatgatttgccactggacccatatgtcatagacacatgagggctcacatgtcatagacagcgagcggcaaataattaattaccacatcttaaaagtggccaaaagttaaatgtcccaggatcatatgattacagtatacaattacaattaacttatattttggatcatgctagcagaagctgcttcaatggttccctagcaatgtaagtatgctgttgggcctgtagaatagggtgctttagtgttttaatgggccttgaaaattgtaatgattaatcagtcctgtatgatgtgggccaagcccatgaatacatgcctctacatgctaacataagttacagataggaccaggcgaccagcagtaactgaatttggatatacctttttgtccacttctgtcttcaattcatgaaatttctttactaaaaatatttacttcgaggaaatttcagaaaaccctgagttttgggtcatgggtctcacaaaacacagtttttaccatggaaaacaacttttgtttgctaataaaatgcagtgaggattacacaaggctggagaaagagtatggccaactagaataactcccatgaagccttttcctaaaaatgtgttaaaatttttcaaccagattcccaatcctacggtccaataaccagatcatagatttacatgatgatcgatctggaaaagagaatagttattagcacgatgtgatcaggatttgatttgcagcctctacactgagctgatacactagcttcaatcaaatgaaaatttaattatttaaagaccacatctgattgattgtggttcatatagagtattttgaatgcaatcatcatttaagcatgctctctgaggtcccagatgctgatagtgcaaaccgcaacaacaattgtactttaatttgctgaaacctgaaactaccccctaacaaactgacttaaatggacccaattacaccggcaagcgactgcaagataccagctaagaagaaaaagctttcaccgataaacactaaaaccgccataactaagacagattagttagggctacaactaaccaattattcgagcttttattcttttccccgaggaatcaattattccagctttaaggaactttaagaaacactggagcaaaccctaaaatcgcaaccatactaagctccgtccatccagaaaaagcaaaagcgactccagagcagccgcaaaaaagaccaaagcctcacatccccaaacacaaaaaatttagctcaaacacatgaacatcggggagctagcctcaccggggtcgcactgccggtagaacttctccacatctgcacaaccacacaaaaaaaagaacagcaaatccatcaaatcaatcaatcaatcaatcagcaaagagcatcccaaacaacaccgaagagagctacccaccggtggtgagcgccttgacgatgcccgcgcggcgcgcgcggaagtcgcggaagacgtcctccgcggaccgcgcgttgtggtgcaccgccgcccccgccgcgttcccggcggcggcagccgcagcaccagcgccgcctccctcgtccatccgccgggagctccttgctagggtttcaggcgagtgggagtggggggagcgagcgagagtggtggtggtggtggcctcgtagtggagagcgagagaggattagagaggaggggcaaaatcgcagccaggtccagacgaggacctaaacgcaaataaacaaaattacagggggctagcacgaaaacgaaatcccagtttccaccctgggtggggtggggcccacctgtcggggcggttgatgggctcttctagagttttgtctcgtggcccacggagaagagtcagagaccactcgtcttcttccttccgctcgctcgctcgctcgctgacgtgtacgcttcgcggcggaggcggcggcggcggcttccgatggcggaggcggcgggggcggcggtggcgccggcgaagctgggtctgtactcgtactggcggagctcgtgctcgcaccgcgtccgcatcgccctcaacctcaaaggtacgttgtgcccgcgccgcgcgattgccttcctctcgtcgtcatcttctatgcgtggttggctcatggccgggcagagtgagtgaacctggtgcgtgcgtgcgtgcgggtgattttgatgtctgtctcctgcaggattggagtacgagtacaaggcggtgaacctgctcaagggggagcactctgatccaggttaggtgctacgccacctgtctgtcaaactgctttcctccccctatctatacttgtgtacggttttgtgctgcgtctagagactgttcgtgcaattaccgccgcaaatttgtgcttggatgttgagaggtaagattctagcaggcgatcggcccgaaatccacaaggctaggctctgtgggggaagatgaataggaaggtgttcgatgaaatgcacaactgagaaaattgagatgaacatgagaggtttcggtgcagcatgtggaagcgcctcttttcgggattttcttgatgcaatataaagcaaagtgatatatgcagatcatggccttagtacccttgtaactggacgcatgatacgcacacgatgcgccatgatgtccacccattcgtggcacgcacccatgcacaactagctcagaatcgtaggggaggaaccaaaaaacaggaaactcaaaccgaaagatagaacacatgtgtggtagcctcaactattttcttttttgtttgtgggtggaagaattcatgaaggttaatcctatgaagttcgtcccggcattggtcgatggagatgctgtaattggtgattcttacgcgatagcattagtaagcattcagaattttgagatgcagtagtttatagcatcaaaattggccgcttcttgacttgtttctatgtgattgcagtatttggaggacaagtaccctgagcaccctcttttacctcaagaccttaaaatgaaggccttgaatctccaggtaatgatagattctgcactgctatgcgcaggatgatgacctcaattaaacattccatttgatatacaagtgctatttgtaatttgttgaggttgagcagcgttgatgttcagttagtgcctatttgagaaggtaagatcacatcagaacaataacaaaaagaggaaaggatcagcccacacatgtttcaggataataggaatactgagcacaaggatataagataggcttaggcataatccagaaaatatagcttactgtatgcactagattttttttcctcttaccgattgatcatgcctagtgtgacctttcatgacataatctaattttatggcagatagcaagcattgtatgctctggaattcaacctcttcacaatcttaccgtactggtaagaactgatttgcattcaatttcttactgccatgtaaggttctctgcctggtatttgattactcagtgcacctgtgttccatgtctatctggctgcattgtgcaaagatgcatttttgtgcctcagattaactctatattaaacagtttgtgcttctgtagtaaaattaatatagtacagctcaattagggaaaaaaatattgtataacagaataatttgcgggccacttgtttctttgcagaggttcattgagaagaaggttggtacaggggagagcatcccatggactcaacaacagatcgacagaggtttcgcaggttctcctcactgacgtatcctttattttattaatcaaatgactatattttgcagctttacttccaccatcaaatctgcttcaaaaaaaatgtgttatgcataactcagttgttttgcatgttgtgagaagctcactcatattcctccccttttcacattcctgcctatttagatttgcttttatgtcacaccatgctcacttcgttccccaatggtgtagctgctgagaacctagtaaaaggctgtgctgggaagtatgcaacaggagatgaagtccgattggtgtgtatgctgccctaacaattttatcctttcttgtatggagatcttctctaaggtttttttttttttcgtgtatcttgcttgcaaattgtgtcactttttccctaaaacagagtgaagttctcccatgtgaaaaaagaaaaaactgaagtgataaaataaaaatgcatcctcatattcactgtactcctcatgagaaccatagattgccatttactaactttccctttgtttatgtaatcatgtttgtgaacactccaaatattaacaagcactgttttggcttcagtaactgttgcatttccgttacacatgcaggcagacgtattcctcgcacctcagatttatgcagcagtgactcgttttcaaattaacatggtactgttcttgtgcttcttactctatccatgcatatgcctttatctattttgttaaatctaatgaaatatgttttcttggcagttaaattatcccactctcgcgaggctccatgaggagtatatgaaacatccagcatttcaagcagcactcccagacagacaaccagatgccccttcctctacctagaaaatacagtgtatgttcatctgaaaaatagattaaaagttgtacccaacttatcattggaagctgtaacaataagcacagaacttgttgcgaaaattgaaaataggtgtatatgtttttcaaagcttctgtccaaataaatgacccttaaaattgctagcctatggacaacttcatgttggcatcaatggtgccaacaacatgatacaacttgagagtgggaatacaagatgcacttgaaacgcattggtttgataatcttacagattatgtgtgatgcagcacgaagagaaagaatctcaataagggctcaacctgatgattatccttaaaaacaagtgtatttgattttttgcatacctgagttaaattatcacaagacactgcccattttagtttctgttgtacaagttaaaattttgaatagttttattgtgatcatagccttttctgacttttgcaacaaatttgagcaatgtccgatgggcaaatggcataaacaacaatgtccaaggtttgagaactaagaaccaattaggaaagacaggagggcttcctctcatgaaaccgccaaacttaatagagctacccaacgataaatagaaaaacaagagtcatcaagaatgttacttttcgagcaattgatagcttgaccacctatttatctttttgagcaccccatcctcgatgacatccaaacaagatgcctaacatatctaaaacctaaaccttttatatctcggctcgaaacataatcgagccaaaataaatatgaaactattgagttaagattgatagatggagtctcgaggtgtgtatttggctatgcttcatggattttcgggcaatgtgtgacgacattcaagaacttaaggctggtattagcaattgatgaaactttcttagtagagcaaggatgctcacttcctactattagccaatcttaatagagcaaagataataatagagctcacttcctactattagcccatcttaaagctaacacatataatagattagctacaaggttggctacaattttcttctcctctctctatctctcacttatacattaattgtatttgtattggagcttgtgttaagctagctcttgcatgagagccaacacccttaactttttattacatctctcctccatataagcttatagtaggcttatagcactattatacttgctcataggcaaattcaaagggtaccttgctcacaacaatagggaatagggattgatgccggattacaacttactcccttggcatttgttctggtagagaaggacaatacatccaagtaggagtagttcatcaatatgattacgttatgtttgattggccctaatagagaaatatcataatatctgtttacacccaaatttggcacctaggaataaaataggaaaattgccaaagtttggaaatctgccgattttccgctgagaaagctggtctgaccgtcgtatgttggccggtcagaccgccgacagtgggccggtcaaaccggcggtgtgtggccggtctgaccgccaaagtctgaagccgagtctgtttcgtcgggtctcgaggtttccttgctcgggaaggcatgtttcgggtttcctttggattctatcccgagtcgaacgtggaggagggcctgtagagggcaagaccaacccctatataagggacaaggccggtttaattgtaatctatcaatcaactatcaatcaatcgaatcgttcttttacttttgcttctagttttagtttagtttgtccatctttgtcgatttgcgttgtaaatcgtccgccgccgttgcgagaatgcgacacctctttgtaggtttgttctgaaaaccttccgttttgcccacaagacgggtagttatctatcgttctatctatatctgctccgctagccggtttagtttattaaaacccatcttggtttagcttttgcttgattgaggtggttggcgactctagaatcaccgcaaagctttaggtgctgcgatcgtgcttgtcaacttgtcacaaaaagttgccaacacgatttttggcggctccgctggggaaatcagctcaacgtcgtctcaacttcgacgccgccatgacgaaaatgaccaagccagaggtggaaccatccaatatcatgccaatctcattggaggatcttgatggggaagcacacaagatcatggaggagcacatcaaggcggtcacgcaggagatgctgatgagatcgtgcaccaagacctgtggttctcaagcctagaccgttgcctaaatctacttttgattcggtaggtgctgaagaggtaccaattcctatccaaaatctcgtggcaatacaatagattcatccattgttgcttcaaataataaattagatgcatcttttgaatctcgttttgatgcgcgaattgaagattttatgaggaataaattcggttcttttttagccgattttcagactaaagcctctaccagtactagcaaagcccttgttgatcaaatatacaacaaaaccgatgggggcgaatatgcaaacaaccggtgagggataagctgtgcattcagccggtccgaccgggccagatggccggtccgaccgcgcgtttaccgccggtcagaccggccagatggccggttagaccgggttctttcccggtctgaccgcgcctctggatgctggtcagaccgggccttggaccggtcagaccggcgcaattatcccgatacaggggattgatccaatgacaaataatgggcttttataccatattccagcacatgattcccctatatctactgttagtcctcaagttcccccacatatccctaatatttataatgatcttactagaagatatcctcccaatactaggtatggccaatataattatattgtgccgcaaccacaacctcttatgccaccaaacccaccaccaaatcagcataggcctgagaatatagaggaattgattagtggtattattagggataaattcgggattgaagctaggaatcatgctaaggtttaccaaaagccgtaacctgattactatgataacatcccatatcctcatggctatagagttcccgaatttaccaaatttagtggtgatgatagtaggaccacataagagcatgtaggtcaattcttagcgcaatgggatgaggctagtgattctaatgataatggtaatcatgatatgtatgttgctgagtggttatggactaacaaaaataagccttttgtttgttctaatttaatgccgactcctcgtaaagatcggcaaggtgaggttaagtatagttttaatgtagccaaatgtgataagatttttgattatcttttgcaagaaaagcaaataaggttacctaaaggccatgtcatacaatctcaataggaattaaaacgttgagcttattgtaaatgtcatgattctcattctcattctactaatgattgcaatgtgtttcgacgacaagtttaatcggccatagatgaaggacgattgaaatttacgatggttttaagatgaagcttgatcatgatccttttccggtgaatacaattaattttaatgataagaatgtgttgattcggctggagcaagctgaatctactaaggggaaagaagtggtcattggagagcctaggccaaagatgatggtgccaaagaatccggaggttggtgtttggaaggagaataggagtgaagtttcaagttctaaagctccaaagaagactaaggtgaccttcgatatgcttttgaataagtatgagaagcaaggaggtgaggaagttcacaatgaagggaaaagaccaaaatcacctcctagggagcgatttggtcattcaccaagagacggtcagaatcacctacatatcatcgttcacaaatcatgtcatgggggccttatattatgggacagaaggagtaataagtagtcagggcgttaacaattgtccttctgattagaggagtcctataatgccacataggctaaattaagtgactctagcgccgtgtttagttccaaaatttttcttcaaacttctaactttttcatcacatcaaaactttcctacatacacaaactttcaactttttcgtcacattattccaatttcaactaaacttccaattttggtgtgaactaaacacaaccctagggaggtgactacggatcggacgtccgatgttttagctaaaaatcggacgctcacctccacctccgccaacacatgcagacacaccagcaccaggtgcagcccactgcaagcgtaggaagccatgcatctatactagaaaacaaaagttaggttggtttaagttttttttagcaaactttaaactattttttctcttaaattacttctccaattcatgattcgattgcaccactaaattcgttgcaattaaatctttaaaataagaccaaacatgactataatccgatgaaaaaaatatttagctttattcatgaatttttcaaatgttgcacctattatatttaaatgtttcagtcagtattcatatggtgtttcactatttaatttgcaaatgttgcacgtggtgttcctagaatgttttagcaagtattttataatgtttcaataattatagtttagtgttcatatgtgatataaaaatatttcaacaatatcgggtttttacaaatatattgtatctgtgatatgttttatttgtttcactcattaggactcagtgtttcatataagtggttgctagtgttgcagcctgtatttttaaatgttgcatttctctaaaacattttatagagtgaactgaaacaaacttttattatgggtgaaacatcgtttgattttttatcaaaatataatcgtgtgatatcttgttgttaagatttaattgtaaggaatacaatgatgtaatcatattatagattggataattattttaggagaaaaaacatttaaaggcggagaaaagggtggagatgagtaaaaaaaattacgtgtggacatgtatgaatagacatgacatgacatgtgcagcataactgtgaatgagaaaagaaaagatgtatagagaagctattgactggtacactctgtagttcgtataggctgaaatatacaagcaggtgtccgacgcgtccgattgtttatccgttgatcggacgtctgactttaagtattttctcaaccctaggtgtagctttaattttatatttcagtccctgacactttttatttcagttcttttttttttcaatttaggtggaggtccaaagtttccacttaacaccctgtaatccaaaacaaaaaataaaaatcacttttccggccttcctccccccgagttcacatcgtctgcctttggagcaaacggcaaacattgccgttgcactcatccatgccacacatttttgtatcaacggctgtatggagtgaccccaccacagtgattaattaattaggggcatctaatcaatagaattagttgtttctctcctggaaaaaatcaacgatagaattagttatttctctcctggaaaaattcaacgaatacgccgtggctttggaaataactaattaggcattttttgcatggtcaagtacattgttcattgagttattcactttcatgcaatttcgcaggctaattcatgagtttaaccataccattaagcattctctctctatccaatctgttccatttatgttaaccataggaaatccatttcattatttgacattttgactaaatgttttataaaatataacatgtaacaagatgctacacacaccaacagtaaaaattaacccttattgggtggcaggaccagcagctaccttgaataactctattgatacatgcaagaatgtacggtatatttaattaaaagcatgtcatgtccatgacttttgacaaactagagaatgttgtaggaagaatgtatttgttgtgcagtgttacatgaagttaatttgacctttgctattcatctggcataagctgaaagttctcttccgcaagaaataaagcatctaaattgccaatatactccaacgttccatattatgcttcctttggctaccatttagatgacctatcaattttctattgacttataagcgcgtaggttgttctgatggcattgtgcgagtttgctctggtcatgtctgaatacttttatatgattctttattttttttttcaattctcacggggaaaaccatttgttataagagaatttatagaaattgtgttgtttgctgcttggaacaactcccccttagactttgctgcaaagcaaagtgcttttttccactgagattatgtcacaccctaaaaattcaaaatttataaattgttgtttaaatggaatttttagaatttattttacaagtcttgaaaagaagatctaattttaataaataaattccaatataaaaaggggccagataaaatttcattaaatactttgcttaattctataattcctagatttttctgggatttatttgagctaaggaagtatttttaataaatggaattgcatttaagaaataatttaaattgaaaaaggttttaaaagtttcttttggctttgggctgaaagtcggcccaaaaccgctctctctctctcctcggcccaagtcggcccagtccgcagccgcagccgcccgcgcgcgagcgcgttgtcgctgacaggtgggtctcgcctgtcaggcccgtcgtcttcctcggccgaaaccctagcgcgccgccgccgccgttcccttccaaatccggccgttcctttccttctccggccgaatcaatagaggggaaacgatctccgggatctcctccaccttttctcctttggaatcttcggctaaatcggtttggaaaccgatgggttcgaggtcgactcggatcggctttgagcccgatctttccttctcgtcgccggtcgccgtgggccttcgccgccgcctccgagcccctttaaaaggacccccgagctctcctctacccgtcgctcccttcgccttcgcctctcgtcgtcggaagagtcctagcgccgtgcgccctagctcagccgtcgccgccgtcgctccagccgtgcgccgccgtcgttccagccgtcgccgtcgctcgggaaggccaccgtcgggatcgccaagtcgccgccgtccttgtccgctgcttcgccgtcgtcggagactactggagcatcgtcgccgccgtcaacccgaagagctccgccgcttcttcttcgtcgccgtcaccgtccgttgggtttccgccgtcgttttggtcgccggtgagttcgccgtgtcgtccgcttcgtcctggtgccctccgtttgcgtcctcgtgccgccgttcgctggtgagcttgcgccgcccgagccgtccgagccgccgagccgccgccgccatagatgacgtcatcgctgacgttattggggccgtccgccgtgagccgccgtggacccgattgatctcggccgtccgttttagatggatcgatctcggccgtccgttcgcgtgaaccgccgcccgtgcgcccggtccaccgcaaaccctagccgctgacgcaataaatcctcttttccttttcaaaaacaattcattattgcgtcataattcaattaaaatcagtttaagtgttttaatccgatataatctttaaaaattcataactaattcatcttagctccgatttagttggttcaagtctctaatttttttctaaaattgagatctacatgttaaaaatatccacatgtactgttcatgcttgtttatgtgctgttttggtgattttgctcttttctgcttagattccgtcgtttccggagagtccgttttcgccggagaagagtttgaagagttccaaggccagcaaggcaagtcacacagatcccaaacaaccctttgagcatgttgatcctatttaaagctattgtttctattcaactattgcatttattttcgaatgtcattgggtggaatcaacctattctttgttatggccctattgttcttgtttaccttattccttgataccttgggttaatataatttgactggttgaaccttatatattggattggttcaactagatgttagatgtaattgcttagccctgcttagaaacactagttcacttttgggataacttatgaatcattataatttaataatggcttaatgatagttcacgatggttaatcgtgattggttaattaattacttgccaactaaaatttgataatggtgggttgtgagcacatggttttgagagtcgtgctcatgacaattaaggaccggttcacgagtttcggttgtgaaacattaatcgtgccaaccacaagccagcgtgggcaacggctttaccttttgtatagcatggttcattgcggagcaccagactgagaagtggcggagataagcccacgggggtcgctggggagtccattacctctggttttgagggggagattatgatccaggaacggtgcactgtagtggattgtgttgtgcgagaggtaatgtcacagctcctttccgaggtaccgtggtggtactaaggcacatggtgacatgatgtggggctgtgtcttgtgggtacagtggtacacctctgatcagagtaaaactattcgaatagccgtacccgcggttatgggcgggtcgagcaatgtctttcgtgattagtcccacacttctcaccatagtaaatgatgctttaattggtaataatttgtttaattcctggtttggagaatagatctgttcagccgggtgtggttgtcagaatggttgggcctatacaacagggtatgttgtatagtgttggtttaatattgtttaatacttaactgttttattaaattctccaatgtttgctaaatgctgcttttgcaaatgagcctatattatgccatcctttggtatccttgtgcacttgcatatttgctgcgtgacttgctgagtatgtcatatactcaccttgcaatcattcatcagaggaagagttcttcaatgaagctgatggtgtggaggattaggtgtagtcttggtcaagctgcctgtggagtggagccgtctgcgccgtttattttactttccgctgcttagatctttattgattgagaggaactatctacctctgtaataatattttattcgctattagagtaataattgtactctattatcaatttgttattgtgtgcctcggttgattcctggacgagggttcacacacatgtaagcgtttggaattttggatagaaattccgggcgtgacaagttggtatcagagcctccttgaccctaggttatgccaaatggttacctatagaagccctctaaaaatattggaaaagtagaactgttctcctccctttctcttttaattaaaccaaactaatggcacatgcacttcttaatctcttttaatggttctcattaaaaatttattccagtgttattagtactgtacatctattactgtactaatggctcattttaccagcaaaagttttacaatattgttttatttaatcttgctgcaataaaataaatttagcatgatgattttataactttcttttatttcttttaaaacctgttgttcaaaagtacaaaacttgtggccttgtttccaactgtttcaacttatcttgcaagtttggtttactttatttaattaccttttaccttgatcttctaaactttattcaaattaatcccaaaacttgtgctattaattggataaatgtcttaactccctcctttcacttgtctttagatgccgcgctacaagcctgagtacttgtttggtgttgagggttttgtccaggagttgcgtacaatgtcctttgtcattggattcgggactgcccctttttatgcccagattcctcatgatcgtcatgaagagaagtgccgagtcaaagtcaccttgaacagtaatagtgaagatatcccctcagtgatgttcgaagctggaggaagaaactacatccatgcaagtcaggaggtggcaaggatcgccataggagagctccgcgatcgttatagtgatcagttggccgatactgagtatcgctatcatcctcgtcaaccccagggaagtgaccgtggcagttaccttgagactgaaggaattgagaatgatgctaccacaaggcatttggttgagatgctgtgggctatggatgaaagtcgtgcggagattgtgttggcagctcaagatcgtgaagaccggaatcgtggtaagatttgcaagctagaagacaaagtggatcgtttggagaaggaactagccgcattgaagggagaagcgccaccgcagaaggccagaattcgtcttaccgcaaggaagagagctctatttgtccctcgctatcaattggcgccaaaggttcgtgtggtggagaaagaagttgccctaactcaagcagatcctccggtcatcatcataagtgatgatgaagaagaagaatccaaacgcaaccattccaagattgagtgggtagcaactcaagatgatgaagacgagccgaaagaaccttcaatcgacctccgatgctcggaagaattagagtgacttgttaagtcgttgttttagatcgttgtgttagtttgcttactttaagttgcttgtgtgtgtctcgcatgtgatttacatcagtggtgggatgtaagtgcatgattagatgctatagatagagttgagcttagtgtatatcaaagctgtgacaacattgtacatttcatatcgttctctgctttgcattttttttatataaaaagtgtctacaaaagagttattaagatattgcaatttacactacaatatatgtaattcttgaacttagtttgtttgcatgttcagtgtaatatataatgtggaaagatgctataatctttgggtgattgaacatgattagtgtgatatgatgtgggaaacgtgcgttgcacgtgcatgtttactagtgatttattaaagcttttgctaatgttttcacatgcttaaccacggcgtattcgttgaatttttccaggagagaaataactaattctatcggtgatttttttccaggagagaaacaactaattctattgattagatgcccctaattaatcactgtggtggggtcactccatacagccgttgttaaaaaatgtgtggcatggatgagtgcaacggcaggaaccccctcct

SEQ ID NO: 9243 - DNA, 34873 bp, Oryza sativa
aagtcggcgccggaggagcagtccttcttcgacgacgtcacccgcaagtgcgccctcaccaccacgcaggcaagctccatccccaccccacccacccagcccggatcgatccgggttcctcgctcagatctggtcgacgcgagtagtgattgttctagcaaatgcggttgactgatcgtgctgaaatcctggtgcttgttttttggaatctcggtgcagaggctgtacggcttcgcgatatgcttggctgccggattgacgtgcaccttcttggtaagtttcacagtttgatgctgtacatatctgtttgtttccacttcagggtgattttttttttggtacaaagtaatgtagggagcaatgagattccatgctttctgacgattgacgatacttcatccttgcagtatgttaatgcagccgtagtttgattcatgttgttcgaattgtcgtaatgccgcgtttttggtcttggactctcagttcaatatatctgattgccgtagacatgcttcacacagttagcagtaaccatcctttttcaatagtaggacagggtgcataattgttccccatgctttttttaacataaagttctcaaaccattttctatggtactgtttttgcctttgggagcgcaaataaatacctcaaatgttggaagctgtgtaatttccgtgcagcgtacaacagttagtagtactaatacttgtatcacatgatatttctgatgatctagctgtggcagaacaagaaaaacacacaataatatatttttagataatgggaaacacacaataatatatacatgattgtacttcacattttacttgggtttcatctctagtctagttcctgcagcctactctagcttgtttgggactaaagggtatccttttttttgggcaactttactaagggctgttcttattatattgttggttattcttcagattttctctgtctaccaatttttgttgtgtttgattttcatttccctccagccactgtgggttatttgatatttttgatctccattgcagtcaatgcttgttttcttcaatcctgtgaaattcggggtaacattcacccttggcaatttgatggcacttggaaggtctgtttcaaagttccatttaatataccatcttactctattttcaagttattttattacttgcctttggacaccagtaaaatcagaatgatgtaaacttcaagaaatatgggtgttgttcacattcgcatatcaatgcaaacatacaaactctattgctcttcatataatcatattctcatcttggatgctcttttttttcttttcttatagatggggtttcaacttgttgaattatgtctacataaatgttaacctgtactttaactttgccatggtatgatattttccgttacaaaaatactatgtgtacatgcttacaagactgtaatattctgccatttctccgctaggtatttatctttgaagccaccaagtctttttttactcatgtcaactaatgatgggatcatttgtttggcagtacagcgtttcttataggtcccaaaaggcaatttgacatgatgcttgattctgtgcggatatatgcaactgctgtatacattgcaagcatcataattgctctgttctgtgctctctttgtaagacaattttaaatttaacaggtgtaaattagttttgtatcatgcttcaatttaattgtataatatgctaaatggctctattttttatttacaggtgcacagcaagctgctgactctacttgccattatcttggaatttggtgctcttgtttggtaagttgaatagcttccactggatggtttttagtcatctgtttaactaggataatggcataacttttgactccagctagccagccgctcaaacatgtttcgtactgtatttctaattttctgtacatgaataggtgatgctgtaaatcgccaaagtaatattgcctcattctttaacatgggctgaaacactttacgggctataaatgggatagcagcatataaacccaatatagggttaattataagtgtcgcacgatcacagggatagaactattctcaagctataaatgttggtatttgcaggtacagtctaagctatataccctttgcacgctcggttgtttcgaaggtgatgacgtcttgcttcgacactgaattctagaatgaccatcctgatctacatgttgttgctggacgcatagatgatatatctgtaatatactgtgtattttgatggagaagtggagtgggggtcatcttctccgattagcctgtgtagtcattctgatgttgtgaagacacacggatttgtgcgtcttatgctcagagatcatgtcatcttttcctcacttcccccccttcttccccacatttgtacatggtaaccacttacactccgcattcgaacgtttactgtgcagtttgtttggattgtcctaggttgctcctggattttcctgcttctcaagttcttccagagtgcaactttggaatttatctcgtttggcttagctctaccaggcagaccttaagcgttggtgataactgataactcttcaatttcttgtgttacgatcttaatgataacttgttagctacggagtatatatgtatgaccatatgcgtcatattgtttagagcaggtacaatagcagactattagccagctataaacatattttaatgagataaaagatgagagagaagagcagcgaactacagatctgtagtcagctgcagcacggactccaagacgcagtgtgtatatggtaagtgggaccatgtattaattgtatagtaagcaaccattgtatgaattagctattaaattagctatagataaattggagctagtagtgagctgtactgttaaacttgctcatagactagtctgtctggatcgagaaattgcagtataaagaactcagtaacatggatcgagaaacatgcaaaatataaaagtcatttccacaagatttgtatttcagtcctgtaaaattccagattttcctctgcctttccaaaatgggctccactatcacgtaaacactgaacaacaccaacattttgacaacagcattattggcatttccttccccctttcaatgcgtttcattgtttctaagttttttttttacatccatcagcagtcatcacaattcttggacattacattttcatgacaaccagggttgtctgtacgacacccataaatatcccctgagctatatactctttccaaaccctgctgcaaattaagtaaagagcgtgggggtgctgaacattgcgctggagcctttttaactagcaatagacactacacacaatattcctttacaaggctaatacttacattattacatctgggattagattttacagggttatacaggagatgtgagaaccaataaatcacatccccatggctcttgaagaggaaagctcggcttctccatccgcttcgcttcccgctgcatcccctgctacctgcagtattttccccaaggaatattatagttgcagattatatgcatatgcatccatcagtttgtagaattaagaatccttacctttatctgggagagataacgttcaaaagcaccatcgccataaaggatcttagctccgcagccaggttggtccactgctccgactgcgtcttcatctacaaccaccgcatcgattcgcttctcaccagattttgcatctggaatctgcaaggcacagcaaaacataaaaagaacggtgtcagcctcattgagtttatgtctacactgtaaagtcaatataaaggaagaaaatttgtcacataacaaacctcgtacatagcatccatgagaatattctcaaggatagtccttaaaccacgtgcacccgtatttttggacattgccttcttggcaattattctaagtgcagcatctgtaaaatgaagcttgacctgaaagccacagttggggttgagatgagataccaaggggacattaatttgcatggttctattacagatatactcacattattcatgctgaataatttcttgaattgtttacccagagcattttttggctccatgagaacctaacagaacatgattgtatcagtgctccatggtaaaatctataaatatcttacagcattctataagctttatcatggtaagatatcataaataaatcacaagatgatgctaggtagaaaaacagtacatgattggattacctgaacaagctggtcctcgtttagagctgccaagctaacaaggataggaaaccgtccaataaattccggaataagtccatatgctattaggtcgccactctcaacctaagaaatgaacagtttaaacacctagatttaaggttttacacagtaatttcactgaattcacacatgcattctccttaaacaaaggagatttccaaaaaatgttaaactcggaattttggtgcttactgattccaacaaggatgatgtcacttgagcacttgagatgccacctgccctcatgttagcacggacaggtgccccaaagccaatagaagaatcttgccgcctgatttttaaaaattaaagcaggtgcaaatacattagatgacgatttgagaaaacattggagacaattgttccaataggtaagtctcaaagatcaatatgcaatacctctctgatatagttttctccaagtcaataaaagcaccaccacaaataaaaagaatgtcctttgtatctatctgtatggcatgaagaccattatacaattgaagttaatccatgtgtgcataccacaagcactgaacgagtagaaaaacaaactcaaggttttactgggcagttggtaatctgaaattgcactagtttagaccaggcatttatggtataaaggaacaatagtatgttcatataaagcagcatttgggatgagacctatccaggggatggatatttcagacaaaggaattgttctctattactattgtcagtcatggaacacccaaaactcttatcttgccgtatttttcttggggctatcattcagcagaagataaaaatgatatggtgtaattattccggcacaaaaaggctaaatattttatttttgaagattgtaatatataaactgtgacagtacctgtatattatcaccgcgaggatgcttccttgctcctttctcagggacattgacaatctaaatatatcaacatttcacaaaagtatcaaaagacgtccatgtaagttctgatttgcttagaagtaaaatatcccagaaagatcatatgatatatatttcagccaaataagcaaaatgatttccctttaaataggtcactagatggattaccataatttttttttaacttgatgacttgtaccatatgtgttcaatatcacaagaaaaagctcaaactgaaatatttccagcataaagcaaaggatcatgcatcagtactactgaacaggcgcgcacactactaatactatgttgtttcatttgccgggggatgctacctatgatgtactaatctgtatccaaagcacagagatcctagaggagtagagggtaagcaatatctgcttattaaggtttcactttatatattgtgattcagtatgccaaaagacacataagctaaccaggccataaggagatcaatgcaaatcacttactgtgccttccagcattttcaacaaagcctgctggacaccttcaccggagacatctctactaatgttaaggctctcagcctgcatgttgaacacgtcagctgattaatgtcaccaaggaagacatactgattcagctaacaaagacaaaccttctttgtgatcttatcaacttcatcgatgtacaccatcccttgttgtgctgcttgcacgttaaaatctgccacctgattgaaaatagagtatccaaaatcactttcaaaggcatggtgtaaagagaataagcaggtccaatttgtaagctaagaaccataccgccagtaacttgtatagtatagattctacatcttctcctacataccctgcctgcaggaaagcgcaggagttaagctttacttttggaactaagatgatattaaaaaaaggggaaaacaaactgatgaagattgcaaatgctagcaaatagaaatgaatgatcattcacaatatcactctgaacttaatccaaatgggctggtggctgtatatgatacttcttgttgctgtttaatgtaagggaaattccattagttttcactgaataactgaatttaatgaactgccattgaataattgtgtgttccttccatggcatcaggattcaatttcttccttctatgaaatctctgtcctctcagtctgattgctctctgttaaggttgcaaggccatttagcacctatgagcatgagactaacagacatgccctgcatgctgttctctcattttctctattgctgccaagccagacctacattagtctggtccaactcccatcatcatgtttcaaagcggcagctcatacttataaaagtgatgtacccaatgcaaaggtaatggaggtggttttattgcagctgtatgcaactaaatgaagtttgggtataaactttgagccaatagttggtcggctgtggaatttgttcactcatgttcttcaccccagtcaagaggtgttcatggaaggaatatgcagtcatccagtgggcaaatgttgaactcacagttacgtggtggcatataatggatctttccatagtttaatggcttcaccattttaacttttgcaagtaatgagctcaaatcataaagatgtgtgcttggacattatgcatttaaaagttagtaaagacttgcctgtgtcaatgttgttgcatcagcaattacaaatggcacattcacaaagcgagctaatgtcttagcaagtagagttttacctgtgaaacaaacaaagtatccaaaaaaacagtgctgagtgccctctctgttatagttgatctagtgttgtagaagaaataattgacagttcccattacatcaacattcaactttgaatttgggggcaaatgcttacctgagccagtaggccccattaatagaacattgcttttctctagttcaacaccatcgtcatcatcagcttctccatcaaaaccacccaaatctgctccagacctaattgttttagcttatataccacataattagtcactgaaagatattcatcgatcctaattgttcttgtgcaagaatagacgagcttcatcattccaagaacaagaagaacaactaaggtggtagaaagaaactgaccctttttgtaatgatttatggtatattcgtttataatgattgtacactgcaacagatagcacctgtagatttaacaggctgtgagagatcagcatatcaaaagtatagaggcgttactgttgattaatgcaacactaagcaaaagacttgaagttgacttatcatctgagtttgatgaacaagaacatatatcgaggtgaagcttttcgcaactcatgacaaatatatattaaattgagaaagaaagtgatatttagaaaataccaacacttgatttatcactctcattaacactatatgtactaaaattatgtacggaatctgaagtgtattaggttggacaatgaagaccaaggataagtgtgtggaaataagggtttatttgaatgcgaacaccatcagcagtccaaatcaatgttctatatacattttgtacaaaactacgtgtttgttatcagctatcaagtagacatgtagaagtgattcatccattgcaaattagaacaaatttgactaaagaaataaatcaagttctgaatcattccttgatagtgtcaaaacagtagaagctcacttgagcccctgatttaaaaaccagtttgcaaagatatcaattttatgagatagcttaacaggccaataagtaaatattgttccttactgaaagcaaagccccaaagcatcatcacaatcaacacagctagctcaataactttgttgctaaatctcgccgccatcgcgactcgtaaacaaccaaatgcggcgtaggagtgtctcaagcgaagaactagatacgatgtaattcaacaaagacctcacgtttttaattacacgaactaaccgattttaatcaggatgtgtaataataaccgagataagtgcactggaacaaattcaacaaaattggaagaaaatttcctcaccttcttggctctgtcctgcccaatcacatacttatcgagcccctgacatatctccttgggcgtaggcaaatccttcccgaggttcgacccgccccacccgtccttccccgcaccctcctcaccaccaccgccaccacctgctcctcctcctcctccgccgccgccaccgccaccgcctccggcgacgcggacgacgttgaggttggggtggaacggcgggccgggcggcacgtgcacggccacgccgccgccgtccccgtcgtcccgcgacgacgagctcccacggatggcctcccagaaggaagcgcccctggccctgacggcgtcgtgggggagcaggtcggcgcggacgcggccgatctcgacgaaggtgccctggagcggcgcgaggaggtgggggcggaagaagtaggcgctgcggcagttggggcagaggttgagcgcctggtacccaccgccgcccgcgcccgcgcccgcggcggcggaggaggacggcggcgcgcggtgggagaagaggatgtccatgtgcttggagcagcgcgggcagtgcgcctccgcgcggatgcgccgcggctcgtgctcgtcggacgacgacgacgaggaggaggtggggccctcccacttgcgccgttcctgcacgcgccggtgcggcggcgccaccaccgccggggagcagcactccggcgcggtcagggtggacgccgcccgcgtggccacggcggcgaggcgcctccaccggaggaggccggacatggcggaggaggaggttgagctcgcgcggattgggggaagtggagtctagagagagagagagagaggagagagagagtgtgtgtgtgagagagtttttcgtggggatctttgtggggtgtggatagtgattttttcgagctgattttttctttttctttttatttttttgctctgtttggttggtttttttgggtgggattttttttttccgtggtgggaagggatacgtgggattccaggacggcgggggcagaggaatctcgggatcagataaggaggggttccgcgcggttggatcatggctccgtgctgcatcgggattcgtgaccttgtcttctcccacaggatttttcgttttcagaatcttgtaaattccatccggattccacaaggtattcagaaatgaagatctcagcatcacctcacaactattcgtcgtctgactaataatcatgtctgattaaacattttttaatactatgattatctctgattaaccaatgcttgaccagcaattccgccaacgtttcagcacttaatagaaaactgactcaaacatgcagaattgcagattaaccagagtatgtactgacaacaactccaacagacataataagacaactaggcactaggcactagaaataattgacataatagacataattgacttaatagagtaggcactaggcagcgacaactgacatagtaagactgtaatctgcacatggagactgtaaatcatgcaagcaatattccattcacaacagcaaaacataattcaggagttcacagaatgcgtcctgttagaagaagagccactcaactcaagacgtcaagaaactcagattctttctggtatttcagaaaagtgagagcttgagaatacagtttcgacttctgtgattgtaccctcaggcccgttctttctccaacaaaagttagatgaaaatttggatatttatgtcacatttttcaaactgctaaacaatatgcttcatgcaaaaaatttctttataaaagcagttgaatatcataaatatatttttcaagtttataataattacaacttaattaatcatacgttaatatcatctcgttttgcgtaaaacacttaacttaatcttcatcttcatctacggcataaaagaaagcctctccaatctcggcatcatgttcatttgactcgtccaattcaacctgcaaacggagaagaaaatggttgcaaatttcgaatttcactagtagcagcttgtatttcacattcactagtaccagagttgctttcagatctgaaagtggagttccaagtcgattatatggcagtccgggatcatcatccttgactctgctaaaaaacattctcctgcagatgcaaaaccgcgttaagagacagttctgtgattacctatggttatgtttagttcagcgtaaagtttagattttggttgaaattaaagatgatgtgactgaaaagttatgtgtgtatgacaggttgatgtgatgaaaaaagaccaaagtttagatccaaaatccaaactttggatctaaacatagccatagtaaaactagtatctatgaagaattcaaactccaaattcctattctgtctgtgattctgcatataactatgtccattgagatgctttattgcctagattacataagctatacatacgagaaatgcaaaattgtttccaaaggggaaattttttctgggtgagtagaaatagcttgtgtcacattaaggctgtgtttgatacttggggttgggaacccaactccaccgcacggaaaacggagcggtccattagcgtgtgattaattaagtattagttaattttttttgtcaaaaatggattaatttgtttttttaaagcaactttcgtatagaaactttttacaaaaaaacataccatttagcagtttgaaaagcgtgcacgtgaaaaacgagggaaaggggttgggaaacttgtggaaagaacagaggcctaagtcactcacattgatagaactaaaagatgggtactacagccaaccaccaccgcaccgcgttcagcgagtcatgatagatgctggaaactctgaagccaatccttcagagttcagaataggctgggtttagatcctaagtttggatccaaacttcattccttttccatcacatcaacatatcatacacacacaacttttcagtcacatcatctccaatttcaaccaaaatctaaattttacgctgaactaaacacagccataattatcagaatttggatggaacaccagcagagcctaacctggcttcaaactgtaaacaaccatacagtttggtggcatataatgattccaacagtaaacaaatgcacagatttatcacaccccagttgtggatcacgtatgcaatacgaacaaacgccaaaaacattactggcactactcaagccaactaacctgcagctaatcatcacagcttcaaaatgattaggttaacttgtactatgctttactcattccaatggtacactcgtacactatcataactaaacataaataggcaattctacaagcaaccattcttgaggagagaaacaaacaagcaccctaattttacaaaatttaagatatgccacccgtatcttaatgacatgtagcactcacatgagtcaatgacatatgggtcagggtggcatatcataaattttgcaaaatttgtatggcatggttcaaattttcccaacaaagacaaagccgaggtccacaagtatcgaattatacagatacgatccattaccaccaaagttctgcacttgctatcacgagagtactaggcagccaagatcaaccatgacggcccgtttagttcgcgaaaagaaaatttttggacatcggacgtttgaccggatgtcggaaggagttttcggacacaaatgaaaaaattaattttataactcgcatggaaaccgcgagacgaatcttttgagcctaattaatccgtcattagcaaatgtgggttactgtagcacttatggctaattatggactaattagactcgaaagattcgtctcgcgatttcccctctaattgtgcaattagttttttaatttatctatatttaatactctatgcatacgttcaaagattcaatgtgatgtttttgggaaaacgttcaaagattcaatgtgatgtttttgggaaaaagtttttggaaactaaacagggcaaaaaaaaaatggaggggaaaagaggctggtttttttttttttggtgagcggaaggctttcacctgctgcttgaggtcgtgacgcgcgcgcgtcagatagcaagcaaaaaaaaaataaaaaaaaatcctcccatttctctccctcctcctcagcctcaggtggtcgagaggactccacctctccgctgccgctatccccgcctcgcgccgcgccaccatgccgctcctcgccgccgccgcggcggtggcgccgccgttgtcttccttccactcgctctccctctcctcacgcggactccgggtcccctccccctgcgaggcccgcccgcgcgcgccgctccggcgcggggacctcgccatccgcatgggcggcggcccgcgcacgttccccggcggcgtctccaagtggcagtggaagcggatgcaggcgaggaaggccaagcagctgctcaaggcgcgcctcgcccgggagcgccagctctacgagatgcgcaagcgcgccgagctccgcgacgccgccgcgcacctcgagcgcccctgggaccccgacgcctccgactccgccgccgccgcggcggcggcgcccaacctgctctccgtcgcggcggacgaccagatgaaggcgctcgccgaccgcttccaccgccccggcggcgtcgacctctggaacgaccgcgacgggccgcgggtcttcgcggccccggacaccggcagggcctccgcgcgcttcttccccaagggatccgtccatagcgttcagccctacggtcttgtcaatggtggccttgagagcacactggctgctcgcggtaacccttccgatgcgacggaccggagtcaccgccaccgcctgcaaggtgttcgtgagaatgcggccaagaaggaaatgcgtggtgttggtggtgatcgtgagcctgcggttgagtacatcgaaaggggtggagtgtgggagccagtgagtaacttggatggtggcgacgacgacgattctagcgacggtggatggaacgatgacattgttacctcggacttggaggacatgggggatgtcgatttgcgacccgagcaaagagcaatggttgggagagatagaaggaaagataatgtggcaaggtgggaagctacaacatctgtagccatcggtagcgatggtgttagggatcagcgtggcaatggcttctctttggaaccagaaggcacaagtgaatatcatcttggtcaaagctggcaagagagaaatagtgggagtagagggaaacgtcccgcagggagaaggaaggccttgaacaccgatggcggtagcgccattgggaaggatcgagtggtgggtggcagttcattctccgactctgaggtaacacgcaatggttttgaaccaaaatggagatccacgactagagggcgcacaacgaatgatgttaggaggtggaatccccccaacgaaggcggtaggaatgttcctagaaagggttggacggatgatgagtttggttcaaattcagacagtggaatggatcacaagttgatgccaaaatggaaaactcagaacaggttgaaccgaagcgaaaatggcagagatagaccggagctgaaatatatggctaataccaacaatggggagaggactaggaggtacatgaggggcagcgatggtgagggaagaagagatcggtttgttaatcgcttcgcctcagatttggaggagccagaatggaagccaagaagaaagagtggagcaggcaacgatggtgatggaagaagagatcggtttgttaatcgcttcgcctcagacttggaggagccaaaatggaagccaggaagaaagagtggagctaggatgaacattggcaacagagagtacatcgatgacatgaatgggagattcaggaggggtagcgatggagatggcatgaatgggagattcaggaggggtagcaatggagccgcgagattgttggatgctatggacagcaacagagaaatcggcagtgaggatgatagctacaggatgagcagaaatggaggacagcgcaggggagacgggtactcgctacgcccaacgtcagaattgcacaactctcggaggctgagggaatcaaatgaaatgtagttctttttttcttcttctgatagaaagatgaaatgtagtactagtattttacaatgatgataaacaaataacacacgccctgtgcagactaacttctaggagtacaacccattcatctgttcaatagcagtgtacagcacacgccacttgcttttgttcagattatgcgacgcaacgcagaaatcatcgccttgctgacttccatataaaaaaggccaaaccaacaaggctgatcaatcaagcgcatcgcggatttggtagtttttatctgaaagttatcttggttgcactgatcaggtagtgcaggtcataattcaaacaagggcatggaagaattcacataacttcagaattataagtgtcacttccaatttccaaatgctggattataagcacagaacattgatataaaagtacatgattcatgtctccctggttgcaaattacatgatggtcatgggcctcatggcagaccttatgaactcaaactggaaaagatcaacaacattggtgcttggtaaagattgctccaaccacttcacctgcagcacataatacacctgttaggcaattaatcacggaaataccagggagtgcaatagacataggacaacaaacagcgcagaactttgctttagctcctccgccgatgtgcttgagcaatgttggagggaactaatcatgcatgcaaaacatataaaaaaaaatacataaaaagcttaatcacaaaagaatacatcttcagaaaaccagattttgaagtgacttccttaattgatataaactatagattccacgatttccattaaggagaggtataaaaaactgctctaaacaaacccaaaacccaactctttgtgaaaaacgggtatagagagactgaatcatatttctatctttcgatcccgttgcaacatgggcatctaactacttatcataaaatgtaactatgcctttgttagaagttgcccctttcaaattaaaacactaatccgtatgaaatgatcaaatgaatctgccagaggataatcgacttatggaagtctgggaagacagtggcgtgtgacagcaaacaatgctaaagttagagtaacttcggcaaggatgttggctctcatttcaccacaatgcacagaaaaaggacacctcctaactatgtaactcaagtatctaacacaatgcaacaaaaatagtggtgcactgacaagttcttaagttcacattagaaggtgaaaaacataagattctgacaatgatcatgcagaaaagggaagaaaaaaaaggtgatactaaattatgtgaaacaagcttatttgcatcttaaagtgaattcaaccaggactgagaaaagaataatgtttgctccaacatagatggcaacatgtcatatagtacagaaacatgcttcacatgatagtctagttagggttatagtaaaacatatctacctagattaaagatgcaattttcaagtatcacagcttaagatgcagctaaaggggaaaggcatccagccatccagtcagttatcttaccaagtgctatccacatgtgttgacttgatgaccaaatcaatatacatttcgttggcacaacatgcctcttcttagggcaggtatatacttatacggcagaacgaatgctaagactagaaccaatgatgttcagacttcattggcacctagtatatacatttctcaagaattttgttctccaccgatcgtacgtgctaaatacattcttagtattcctatggatgaaatatttcaccatgtaattagacacctaatcttttgaaaaaaaaaaaagcaaacatgaattgtcatgggaagcaaacgaacaactagccagtccaaccccgcgccacagtttcaatatgcaaattactaatctgtttcacatgaaaaagctctacataatctccaatagatagatcaaggtgagcacttccgaacaaccctaacgcctccaaatcgatcccaaatctaacgaaacgaacccatttcagccggaggaagagaacaaggggagcttttacaccgggggggcgctcacctcggggaggcggcgcgggtctccgcgcgtggccgccgacgcgatctagtggtggtggtggtcgccggaggggcggtagaggcggttgtaggcggcctcgccgacgaggtagatcccgaaggcgacgatggcgatgccgagccccggcgtggcgtggcgcagctggttccccaccatcgggtgcctcctccagtcgtcccgccgccggaagaactcccccgtcgcgttcaaccccttccccgccatcgccgccgccgctctcctcctcctcctcctctctctctctctctcctcgacgcgcacagccacacacacacaccaacacgaaagcccaagtggtagtagtatgcgatgcgtggttccagcccgttttgaatcgggccttacaaagcccaaggaaataacacacgcagagtcagagaggaacagagagggggaatttttagtattttttgaacctttttttatttttaaattttacaaacataaatattttcaaaacttattttcaaaatatgaatcttttggccacacgtgacaaaataaaattgtcatgccacccacagcgggtgcgatagttttgtcgtcacgtcattcagatgagtgtgactattgttttaccacagttcggctggtgtgatcaacaggttcaattttctaaaaagaatagggttgaaaatgtttgttttaaaaattagaaatataaaagttcataaaataaaaaaaatcaagagatagatagagagagagagctcaagccgcaatggagccaattacatcgcatgtatcgatcaaaacaccgtgccaattacaccctagtatgcaggatcaaatgcatgaatggtatagaatttcaattccttcaattcaaagggggcctaaagcactgatagaaagtaatggtttgtattgtatagtgtatttctttgttgttctgctcacacatataatctatctacaaatatacaatgtttctgcctctctgttttttcttttcctttcgaacctgcttgaagaaagacatgcacttgacgatgggttcctgaacttgtccaagaagctggtgttgtcaagtcttgaactgtcgaacatcagcaaccaaaagtcccacaaaaaaaaaaaacaaataaaggagccaagacagggtagaaacctcatgaaaggggaggcagttatcatagaatcatacacactaacccataacttaatcactactgaacaccgagagtatccaactctctcatagaggttcacatcacactacgaccacagcagttagcctgcctgcctgctaaatacaatagctacttaccatgtcgggtacaacacaatgactgaaactaatacaacaaccggcctgcacgccgggtctgctgctgcacggcagcaggttgcgggtgaagcggttctccgcctcttcaccaattcctaacgattctaaaacatgtcaaccgggagcctcccgtggtcattctcggctcctcttgctgctgcagccagggcacttgtactgcttgatgtgctctgccttcgcaggggtgatccgaacgcacttgccatggaaccacttctcgcagacgtcgcagcagatccagaactcaccgttcgcgtaagtctctccgcaagcgccacacatgtaagcctggtcctcatcctctgtgccttccgggccgctgtcttcctcatcttttggctgaggtggctttgcaggcttgctgttagaattggattgcttcgatggctggaaaagaagggaaacgaaaaggttaaacgttgtgttgatatgggcgctagataatgcatgttagacatgcatatgatcacatgtacatactttagggttggacttgttgcttttgctgctgccgttggagacttttgtttgcttcttggcaattcccgtcacaacttcatatacagtgggaagaccattaatcatggtgaagagccgtctcctgaaattcaaatgccagttatggactattgtcattttctaccaaacaatataatgttgattgttgagtgacaatgcactggataatattactcagataattacacaaaagatgaaaaatcctcttgtaaactttgacaaatggaatcagaatgcctcatcacagttgatttctgtaaataagaaatgcatcgacagctgcaacgaaaactatgcaaacctggcttccttatcaaatccaaagcgagccccaaagtaaaatgctacagacagtagccatgcatcgctatgaactgcaaccagcgacaaccaatctttttcgatcattccatcacgagcaaagtttatgcccagtgctggttctggaagttcaggaggtacttcctcagctggaagggtcacgtcccaggtctcattgggcaatccataaaggcacaggttctctttctctgaaaaaataggagatcactatgtcattactatgacataaacaagggaagataacttcattcaacagactacttgtgatgtaatgtaccattcatcattatttcaatggacagtacagcacaaaatggctacatacagttgaagattaacccacacacgcttgaagcacatactggggctatgcctagggagtcgacaaaccaatttactcaaaacaaattattctcacgtaacccctaaaacattaaacccgtcttcaaacatcaacaggacagtaagttttggagctactgttgtttttcacctttaattgtagtaatgatgcaattacagtatactagcatattgacttacattttgggaataattaattaccacatcttaaaagtggccaaaagttaaatgtcccaggatcatatgattacagtatacaattacaattaacttatattttggatcatgctagcagaagctgcttcaatggttccctagcaatgtaagtatgctgttgggcctgtagaatagggtgctttagtgttttaatgggccttgaaaattgtaatgattaatcagtcctgtatgatgtgggccaagcccatgaatacatgcctctacatgctaacataagttacagataggaccaggcgaccagcagtaactgaatttggatatacctttttgtccacttctgtcttcaattcatgaaatttctttactaaaaatatttacttcgaggaaatttcagaaaaccctgagttttgggtcatgggtctcacaaaacacagtttttaccatggaaaacaacttttgtttgctaataaaatgcagtgaggattacacaaggctggagaaagagtatggccaactagaataactcccatgaagccttttcctaaaaatgtgttaaaatttttcaaccagattcccaatcctacggtccaataaccagatcatagatttacatgatgatcgatctggaaaagagaatagttattagcacgatgtgatcaggatttgatttgcagcctctacactgagctgatacactagcttcaatcaaatgaaaatttaattatttaaagaccacatctgattgattgtggttcatatagagtattttgaatgcaatcatcatttaagcatgctctctgaggtcccagatgctgatagtgcaaaccgcaacaacaattgtactttaatttgctgaaacctgaaactaccccctaacaaactgacttaaatggacccaattacaccggcaagcgactgcaagataccagctaagaagaaaaagctttcaccgataaacactaaaaccgccataactaagacagattagttagggctacaactaaccaattattcgagcttttattcttttccccgaggaatcaattattccagctttaaggaactttaagaaacactggagcaaaccctaaaatcgcaaccatactaagctccgtccatccagaaaaagcaaaagcgactccagagcagccgcaaaaaagaccaaagcctcacatccccaaacacaaaaaatttagctcaaacacatgaacatcggggagctagcctcaccggggtcgcactgccggtagaacttctccacatctgcacaaccacacaaaaaaaagaacagcaaatccatcaaatcaatcaatcaatcaatcagcaaagagcatcccaaacaacaccgaagagagctacccaccggtggtgagcgccttgacgatgcccgcgcggcgcgcgcggaagtcgcggaagacgtcctccgcggaccgcgcgttgtggtgcaccgccgcccccgccgcgttcccggcggcggcagccgcagcaccagcgccgcctccctcgtccatccgccgggagctccttgctagggtttcaggcgagtgggagtggggggagcgagcgagagtggtggtggtggtggcctcgtagtggagagcgagagaggattagagaggaggggcaaaatcgcagccaggtccagacgaggacctaaacgcaaataaacaaaattacagggggctagcacgaaaacgaaatcccagtttccaccctgggtggggtggggcccacctgtcggggcggttgatgggctcttctagagttttgtctcgtggcccacggagaagagtcagagaccactcgtcttcttccttccgctcgctcgctcgctcgctgacgtgtacgcttcgcggcggaggcggcggcggcggcttccgatggcggaggcggcgggggcggcggtggcgccggcgaagctgggtctgtactcgtactggcggagctcgtgctcgcaccgcgtccgcatcgccctcaacctcaaaggtacgttgtgcccgcgccgcgcgattgccttcctctcgtcgtcatcttctatgcgtggttggctcatggccgggcagagtgagtgaacctggtgcgtgcgtgcgtgcgggtgattttgatgtctgtctcctgcaggattggagtacgagtacaaggcggtgaacctgctcaagggggagcactctgatccaggttaggtgctacgccacctgtctgtcaaactgctttcctccccctatctatacttgtgtacggttttgtgctgcgtctagagactgttcgtgcaattaccgccgcaaatttgtgcttggatgttgagaggtaagattctagcaggcgatcggcccgaaatccacaaggctaggctctgtgggggaagatgaataggaaggtgttcgatgaaatgcacaactgagaaaattgagatgaacatgagaggtttcggtgcagcatgtggaagcgcctcttttcgggattttcttgatgcaatataaagcaaagtgatatatgcagatcatggccttagtacccttgtaactggacgcatgatacgcacacgatgcgccatgatgtccacccattcgtggcacgcacccatgcacaactagctcagaatcgtaggggaggaaccaaaaaacaggaaactcaaaccgaaagatagaacacatgtgtggtagcctcaactattttcttttttgtttgtgggtggaagaattcatgaaggttaatcctatgaagttcgtcccggcattggtcgatggagatgctgtaattggtgattcttacgcgatagcattagtaagcattcagaattttgagatgcagtagtttatagcatcaaaattggccgcttcttgacttgtttctatgtgattgcagtatttggaggacaagtaccctgagcaccctcttttacctcaagaccttaaaatgaaggccttgaatctccaggtaatgatagattctgcactgctatgcgcaggatgatgacctcaattaaacattccatttgatatacaagtgctatttgtaatttgttgaggttgagcagcgttgatgttcagttagtgcctatttgagaaggtaagatcacatcagaacaataacaaaaagaggaaaggatcagcccacacatgtttcaggataataggaatactgagcacaaggatataagataggcttaggcataatccagaaaatatagcttactgtatgcactagattttttttcctcttaccgattgatcatgcctagtgtgacctttcatgacataatctaattttatggcagatagcaagcattgtatgctctggaattcaacctcttcacaatcttaccgtactggtaagaactgatttgcattcaatttcttactgccatgtaaggttctctgcctggtatttgattactcagtgcacctgtgttccatgtctatctggctgcattgtgcaaagatgcatttttgtgcctcagattaactctatattaaacagtttgtgcttctgtagtaaaattaatatagtacagctcaattagggaaaaaaatattgtataacagaataatttgcgggccacttgtttctttgcagaggttcattgagaagaaggttggtacaggggagagcatcccatggactcaacaacagatcgacagaggtttcgcaggttctcctcactgacgtatcctttattttattaatcaaatgactatattttgcagctttacttccaccatcaaatctgcttcaaaaaaaatgtgttatgcataactcagttgttttgcatgttgtgagaagctcactcatattcctccccttttcacattcctgcctatttagatttgcttttatgtcacaccatgctcacttcgttccccaatggtgtagctgctgagaacctagtaaaaggctgtgctgggaagtatgcaacaggagatgaagtccgattggtgtgtatgctgccctaacaattttatcctttcttgtatggagatcttctctaaggtttttttttttttcgtgtatcttgcttgcaaattgtgtcactttttccctaaaacagagtgaagttctcccatgtgaaaaaagaaaaaactgaagtgataaaataaaaatgcatcctcatattcactgtactcctcatgagaaccatagattgccatttactaactttccctttgtttatgtaatcatgtttgtgaacactccaaatattaacaagcactgttttggcttcagtaactgttgcatttccgttacacatgcaggcagacgtattcctcgcacctcagatttatgcagcagtgactcgttttcaaattaacatggtactgttcttgtgcttcttactctatccatgcatatgcctttatctattttgttaaatctaatgaaatatgttttcttggcagttaaattatcccactctcgcgaggctccatgaggagtatatgaaacatccagcatttcaagcagcactcccagacagacaaccagatgccccttcctctacctagaaaatacagtgtatgttcatctgaaaaatagattaaaagttgtacccaacttatcattggaagctgtaacaataagcacagaacttgttgcgaaaattgaaaataggtgtatatgtttttcaaagcttctgtccaaataaatgacccttaaaattgctagcctatggacaacttcatgttggcatcaatggtgccaacaacatgatacaacttgagagtgggaatacaagatgcacttgaaacgcattggtttgataatcttacagattatgtgtgatgcagcacgaagagaaagaatctcaataagggctcaacctgatgattatccttaaaaacaagtgtatttgattttttgcatacctgagttaaattatcacaagacactgcccattttagtttctgttgtacaagttaaaattttgaatagttttattgtgatcatagccttttctgacttttgcaacaaatttgagcaatgtccgatgggcaaatggcataaacaacaatgtccaaggtttgagaactaagaaccaattaggaaagacaggagggcttcctctcatgaaaccgccaaacttaatagagctacccaacgataaatagaaaaacaagagtcatcaagaatgttacttttcgagcaattgatagcttgaccacctatttatctttttgagcaccccatcctcgatgacatccaaacaagatgcctaacatatctaaaacctaaaccttttatatctcggctcgaaacataatcgagccaaaataaatatgaaactattgagttaagattgatagatggagtctcgaggtgtgtatttggctatgcttcatggattttcgggcaatgtgtgacgacattcaagaacttaaggctggtattagcaattgatgaaactttcttagtagagcaaggatgctcacttcctactattagccaatcttaatagagcaaagataataatagagctcacttcctactattagcccatcttaaagctaacacatataatagattagctacaaggttggctacaattttcttctcctctctctatctctcacttatacattaattgtatttgtattggagcttgtgttaagctagctcttgcatgagagccaacacccttaactttttattacatctctcctccatataagcttatagtaggcttatagcactattatacttgctcataggcaaattcaaagggtaccttgctcacaacaatagggaatagggattgatgccggattacaacttactcccttggcatttgttctggtagagaaggacaatacatccaagtaggagtagttcatcaatatgattacgttatgtttgattggccctaatagagaaatatgcataatatctgtttacacccaaatttggcacctaggaataaaataggaaaattgccaaagtttggaaatctgccgattttccgctgagaaggctggtctgaccgtcgtatgttggccggtcagaccgccgacagtgggccggtcaaaccggcggtgtgtggccggtctgaccgccaaagtctgaagccgagtctgtttcgtcgggtctcgaggtttccttgctcgggaaggcatgtttcgggtttcctttggattctatcccgagtcgaacgtggaggagggcctgtagagggcaagaccaacccctatataagggacaaggccggtttaattgtaatctatcaatcaactatcaatcaatcgaatcgttcttttacttttgcttctagttttagtttagtttgtccatctttgtcgatttgcgttgtaaatcgtccgccgccgttgcgagaatgcgacacctctttgtaggtttgttctgaaaaccttccgttttgcccacaagacgggtagttatctatcgttctatctatatctgctccgctagccggtttagtttattaaaacccatcttggtttagcttttgcttgattgaggtggttggcgactctagaatcaccgcaaagctttaggtgctgcgatcgtgcttgtcaacttgtcacaaaaagttgccaacacgatttttggcggctccgctggggaaatcagctcaacgtcgtctcaacttcgacgccgccatgacgaaaatgaccaagccagaggtggaaccatccaatatcatgccaatctcattggaggatcttgatggggaagcacacaagatcatggaggagcacatcaaggcggtcacgcaggagatgctgatgagatcgtgcaccaagacctgtggttctcaagcctagaccgttgcctaaatctacttttgattcggtaggtgctgaagaggtaccaattcctatccaaaatctcgtggcaatacaatagattcatccattgttgcttcaaataataaattagatgcatcttttgaatctcgttttgatgcgcgaattgaagattttatgaggaataaattcggttcttttttagccgattttcagactaaagcctctaccagtactagcaaagcccttgttgatcaaatatacaacaaaaccgatgggggcgaatatgcaaacaaccggtgagggataagctgtgcattcagccggtccgaccgggccagatggccggtccgaccgcgcgtttaccgccggtcagaccggccagatggccggttagaccgggttctttcccggtctgaccgcgcctctggatgctggtcagaccgggccttggaccggtcagaccggcgcaattatcccgatacaggggattgatccaatgacaaataatgggcttttataccatattccagcacatgattcccctatatctactgttagtcctcaagttcccccacatatccctaatatttataatgatcttactagaagatatcctcccaatactaggtatggccaatataattatattgtgccgcaaccacaacctcttatgccaccaaacccaccaccaaatcagcataggcctgagaatatagaggaattgattagtggtattattagggataaattcgggattgaagctaggaatcatgctaaggtttaccaaaagccgtaacctgattactatgataacatcccatatcctcatggctatagagttcccgaatttaccaaatttagtggtgatgatagtaggaccacataagagcatgtaggtcaattcttagcgcaatgggatgaggctagtgattctaatgataatggtaatcatgatatgtatgttgctgagtggttatggactaacaaaaataagccttttgtttgttctaatttaatgccgactcctcgtaaagatcggcaaggtgaggttaagtatagttttaatgtagccaaatgtgataagatttttgattatcttttgcaagaaaagcaaataaggttacctaaaggccatgtcatacaatctcaataggaattaaaacgttgagcttattgtaaatgtcatgattctcattctcattctactaatgattgcaatgtgtttcgacgacaagtttaatcggccatagatgaaggacgattgaaatttacgatggttttaagatgaagcttgatcatgatccttttccggtgaatacaattaattttaatgataagaatgtgttgattcggctggagcaagctgaatctactaaggggaaagaagtggtcattggagagcctaggccaaagatgatggtgccaaagaatccggaggttggtgtttggaaggagaataggagtgaagtttcaagttctaaagctccaaagaagactaaggtgaccttcgatatgcttttgaataagtatgagaagcaaggaggtgaggaagttcacaatgaagggaaaagaccaaaatcacctcctagggagcgatttggtcattcaccaagagacggtcagaatcacctacatatcatcgttcacaaatcatgtcatgggggccttatattatgggacagaaggagtaataagtagtcagggcgttaacaattgtccttctgattagaggagtcctataatgccacataggctaaattaagtgactctagcgccgtgtttagttccaaaatttttcttcaaacttctaactttttcatcacatcaaaactttcctacatacacaaactttcaactttttcgtcacattattccaatttcaactaaacttccaattttggtgtgaactaaacacaaccctagggaggtgactacggatcggacgtccgatgttttagctaaaaatcggacgctcacctccacctccgccaacacatgcagacacaccagcaccaggtgcagcccactgcaagcgtaggaagccatgcatctatactagaaaacaaaagttaggttggtttaagttttttttagcaaactttaaactattttttctcttaaattacttctccaattcatgattcgattgcaccactaaattcgttgcaattaaatctttaaaataagaccaaacatgactataatccgatgaaaaaaatatttagctttattcatgaatttttcaaatgttgcacctattatatttaaatgtttcagtcagtattcatatggtgtttcactatttaatttgcaaatgttgcacgtggtgttcctagaatgttttagcaagtattttataatgtttcaataattatagtttagtgttcatatgtgatataaaaatatttcaacaatatcgggtttttacaaatatattgtatctgtgatatgttttatttgtttcactcattaggactcagtgtttcatataagtggttgctagtgttgcagcctgtatttttaaatgttgcatttctctaaaacattttatagagtgaactgaaacaaacttttattatgggtgaaacatcgtttgattttttatcaaaatataatcgtgtgatatcttgttgttaagatttaattgtaaggaatacaatgatgtaatcatattatagattggataattattttaggagaaaaaacatttaaaggcggagaaaagggtggagatgagtaaaaaaaattacgtgtggacatgtatgaatagacatgacatgacatgtgcagcataactgtgaatgagaaaagaaaagatgtatagagaagctattgactggtacactctgtagttcgtataggctgaaatatacaagcaggtgtccgacgcgtccgattgtttatccgttgatcggacgtctgactttaagtattttctcaaccctaggtgtagctttaattttatatttcagtccctgacactttttatttcagttcttttttttttcaatttaggtggaggtccaaagtttccacttaacaccctgtaatccaaaacaaaaaataaaaatcacttttccggccttcctccccccgagttcacatcgtctgcctttggagcaaacggcaaacattgccgttgcactcatccatgccacacatttttgtatcaacggctgtatggagtgaccccaccacagtgattaattaattaggggcatctaatcaatagaattagttgtttctctcctggaaaaaatcaacgatagaattagttatttctctcctggaaaaattcaacgaatacgccgtggctttggaaataactaattaggcattttttgcatggtcaagtacattgttcattgagttattcactttcatgcaatttcgcaggctaattcatgagtttaaccataccattaagcattctctctctatccaatctgttccatttatgttaaccataggaaatccatttcattatttgacattttgactaaatgttttataaaatataacatgtaacaagatgctacacacaccaacagtaaaaattaacccttattgggtggcaggaccagcagctaccttgaataactctattgatacatgcaagaatgtacggtatatttaattaaaagcatgtcatgtccatgacttttgacaaactagagaatgttgtaggaagaatgtatttgttgtgcagtgttacatgaagttaatttgacctttgctattcatctggcataagctgaaagttctcttccgcaagaaataaagcatctaaattgccaatatactccaacgttccatattatgcttcctttggctaccatttagatgacctatcaattttctattgacttataagcgcgtaggttgttctgatggcattgtgcgagtttgctctggtcatgtctgaatacttttatatgattctttattttttttttcaattctcacggggaaaaccatttgttataagagaatttatagaaattgtgttgtttgctgcttggaacaactcccccttagactttgctgcaaagcaaagtgcttttttccactgagattatgtcacaccctaaaaattcaaaatttataaattgttgtttaaatggaatttttagaatttattttacaagtcttgaaaagaagatctaattttaataaataaattccaatataaaaaggggccagataaaatttcattaaatactttgcttaattctataattcctagatttttctgggatttatttgagctaaggaagtatttttaataaatggaattgcatttaagaaataatttaaattgaaaaaggttttaaaagtttcttttggctttgggctgaaagtcggcccaaaaccgctctctctctctcctcggcccaagtcggcccagtccgcagccgcagccgcccgcgcgcgagcgcgttgtcgctgacaggtgggtctcgcctgtcaggcccgtcgtcttcctcgggccgaaaccctagcgcgccgccgccgccgttcccttccaaatccggccgttcctttccttctccggccgaatcaatagaggggaaacgatctccgggatctcctccaccttttctcctttggaatcttcggctaaatcggtttggaaaccgatgggttcgaggtcgactcggatcggctttgagcccgatctttccttctcgtcgccggtcgccgtgggccttcgccgccgcctccgagcccctttaaaaggacccccgagctctcctctacccgtcgctcccttcgccttcgcctttcgtcgtcggaagagtcctagcgccgtgcgccctagctcagccgtcgccgccgtcgctccagccgtgcgccgccgtcgttccagccgtcgccgtcgctcgggaaggccaccgtcgggatcgccaagtcgccgccgtccttgtccgctgcttcgccgtcgtcggagactactggagcatcgtcgccgccgtcaacccgaagagctccgccgtttcttcttcgtcgccgtcaccgtccgttgggtttccgccgtcgttttggtcgccggtgagttcgccgtgtcgtccgcttcgtcctggtgccctccgtttgcgtcctcgtgccgccgttcgctggtgagcttgcgccgcccgagccgtccgagccgccgagccgccgccgccatagatgacgtcatcgctgacgttattggggccgtccgccgtgagccgccgtggacccgattgatctcggccgtccgttttagatggatcgatctcggccgtccgttcgcgtgaaccgccgcccgtgcgcccggtccaccgcaaaccctagccgctgacgcaataaatcctcttttccttttcaaaaacaattcattattgcgtcataattcaattaaaatcagtttaagtgttttaatccgatataatctttaaaaattcataactaattcatcttagctccgatttagttggttcaagtctctaatttttttctaaaattgagatctacatgttaaaaatatccacatgtactgttcatgcttgtttatgtgctgttttggtgattttgctcttttctgcttagattccgtcgtttccggagagtccgttttcgccggagaagagtttgaagagttccaaggccagcaaggcaagtcacacagatcccaaacaaccctttgagcatgttgatcctatttaaagctattgtttctattcaactattgcatttattttcgaatgtcattgggtggaatcaacctattctttgttatggccctattgttcttgtttaccttattccttgataccttgggttaatataatttgactggttgaaccttatatattggattggttcaactagatgttagatgtaattgcttagccctgcttagaaacactagttcacttttgggataacttatgaatcattataatttaataatggcttaatgatagttcacgatggttaatcgtgattggttaattaattacttgccaactaaaatttgataatggtgggttgtgagcacatggttttgagagtcgtgctcatgacaattaaggaccggttcacgagtttcggttgtgaaacattaatcgtgccaaccacaagccagcgtgggcaacggctttaccttttgtatagcatggttcattgcggagcaccagactgagaagtggcggagataagcccacgggggtcgctggggagtccattacctctggttttgagggggagattatgatccaggaacggtgcactgtagtggattgtgttgtgcgagaggtaatgtcacagctcctttccgaggtaccgtggtggtactaaggcacatggtgacatgatgtggggctgtgtcttgtgggtacagtggtacacctctgatcagagtaaaactattcgaatagccgtacccgcggttatgggcgggtcgagcaatgtctttcgtgattagtcccacacttctcaccatagtaaatgatgctttaattggtaataatttgtttaattcctggtttggagaatagatctgttcagccgggtgtggttgtcagaatggttgggcctatacaacagggtatgttgtatagtgttggtttaatattgtttaatacttaactgttttattaaattctccaatgtttgctaaatgctgcttttgcaaatgagcctatattatgccatcctttggtatccttgtgcacttgcatatttgctgcgtgacttgctgagtatgtcatatactcaccttgcaatcattcatcagaggaagagttcttcaatgaagctgatggtgtggaggattaggtgtagtcttggtcaagctgcctgtggagtggagccgtctgcgccgtttattttactttccgctgcttagatctttattgattgagaggaactatctacctctgtaataatattttattcgctattagagtaataattgtactctattatcaatttgttattgtgtgcctcggttgattcctggacgagggttcacacacatgtaagcgtttgaaattttggatagaaattccgggcgtgacaagttggtatcagagcctccttgaccctaggttatgccaaatggttacctatagaagccctctaaaaatattggaaaagtagaactgttctcctccctttctcttttaattaaaccaaactaatggcacatgcacttcttaatctcttttaatggttctcattaaaaatttattccagtgttattagtactgtacatctattactgtactaatggctcattttaccagcaaaagttttacaatattgttttatttaatcttgctgcaataaaataaatttagcatgatgattttataactttcttttatttcttttaaaacctgttgttcaaaagtacaaaacttgtggccttgtttccaactgtttcaacttatcttgcaagtttggtttactttatttaattaccttttaccttgatcttctaaactttattcaaattaatcccaaaacttgtgctattaattggataaatgtcttaactccctcctttcacttgtctttagatgccgcgctacaagcctgagtacttgtttggtgttgagggttttgtccaggagttgcgtacaatgtcctttgtcattggattcgggactgcccctttttatgcccagattcctcatgatcgtcatgaagagaagtgccgagtcaaagtcaccttgaacagtaatagtgaagatatcccctcagtgatgttcgaagctggaggaagaaactacatccatgcaagtcaggaggtggcaaggatcgccataggagagctccgcgatcgttatagtgatcagttggccgatactgagtatcgctatcatcctcgtcaaccccagggaagtgaccgtggcagttaccttgagactgaaggaattgagaatgatgctaccacaaggcatttggttgagatgctgtgggctatggatgaaagtcgtgcggagattgtgttggcagctcaagatcgtgaagaccggaatcgtggtaagatttgcaagctagaagacaaagtggatcgtttggagaaggaactagccgcattgaagggagaagcgccaccgcagaaggccagaattcgtcttaccgcaaggaagagagctctatttgtccctcgctatcaattggcgccaaaggttcgtgtggtggagaaagaagttgccctaactcaagcagatcctccggtcatcatcataagtgatgatgaagaagaagaatccaaacgcaaccattccaagattgagtgggtagcaactcaagatgatgaagacgagccgaaagaaccttcaatcgacctccgatgctcggaagaattagagtgacttgttaagtcgttgttttagatcgttgtgttagtttgcttactttaagttgcttgtgtgtgtctcgcatgtgatttacatcagtggtgggatgtaagtgcatgattagatgctatagatagagttgagcttagtgtatatcaaagctgtgacaacattgtacatttcatatcgttctctgctttgcattttttttatataaaaagtgtctacaaaagagttattaagatattgcaatttacactacaatatatgtaattcttgaacttagtttgtttgcatgttcagtgtaatatataatgtggaaagatgctataatctttgggtgattgaacatgattagtgtgatatgatgtgggaaacgtgcgttgcacgtgcatgtttactagtgatttattaaagcttttgctaatgttttcacatgcttaaccacggcgtattcgttgaatttttccaggagagaaataactaattctatcggtgatttttttccaggagagaaacaactaattctattgattagatgcccctaattaatcactgtggtggggtcactccatacagccgttgttaaaaaatgtgtggcatggatgagtgcaacggcaggaaccccctc

SEQ ID NO: 9244 - DNA, 6832 bp, Oryza sativa
tctccctcatccctctccttgagtggttctgcctcgccgtggggccacgcggttttgaagtcgctgccgcggcctgcttctcccgcccgccgtcgttcctctcgtcctcccgcagccacgagccgccgccgccctcgcccgcttgccctcccgccgccgccgccgcttgctccccgcggacagccgtaggggagagggagaaagaaagagagaagggaggggaggaagaagaaagggagaagatggcatgtggggcccacatgtcagtgggcctcataattgtgtgtgtgaatgacaaacgggtcccacgtatagctttttaattgaaatgccacgtcagcccacagactaggtcaatacctccacgtcagcgaaaccaccctccaaaacggccgagggagtcaaattgcaccggttttcttagtttgggggtcaagatatccggttttgtggtttagggtcacggattagatttcaatcacttttgagggtcaccaagtgaacttattcctattagtttacatggatgagaattacacggtccattgaggcccatgatactgtggattaggttcgatgggccttgaggatcggcgtccctccagtaatccagcgaatggttcaaaattatgtaatgaaatttccgaaatttcgatcatatcggaccccttgatatgatattatttcggccgaagttttaaatttatattatttttgttgtgaatttggtaatattttgttcaaatgtaactaaaatttatttaaaattttggaaattttgaaccaaaattcggtatattgccaccgtccggtagaaactttcaaaccgaaagagtagggcctgtttggttgttgtccccgtgttcctgcagtggcctgacctgatagctagccgctttgattagcctgactcagagcatctccaacagcctctctaaattagactctccaaacacccatatagccaactctctaattgatttgtcaagccaaactcattcctcactccaacagcctctccatctaccctctctattatgagtctatgacattggaacccacacgtcagcctctactacaccttccacctctttctctcccttttcctctttctccccctcttcctcttctattgccattcttgagtgacgccgatgatggaagggctacgggcggccacatcggatgcggccaggcgcggggacggccgcggtggatacggccgggggcgcaggcggcggcgccggatgaggccgggcgcgggggcggccgtggcggatgcggctgggcggcgggggcagaggtggcggcgccagatgtggatgggaggttttcggagcccctcctcccaggcgccgacgagctcctcgtggtggccgacgtcgtccttgcgtcccagcgcctgctcgtggtgtccgataagctcctcgtagaaggagaggagaagcgcgagtagatggagcactgggaaggaggatagccagcctggtaggctagccaaatttggctagtggatgagctcggatggagagacagttcgcttggagagttgaatggagagtctgttggagtagtgtttttagttcatttgctaaatttttagcttggagagctgagtagagaggctgttggagttgctctcaagcgacgaaaatccaacgcccgtctctcatgcaagtgataagctactagtagcaagattaaggtgatgtgaaatctatgggtcccactattaattacattctttttcttgcttttcttttctttcttcccaccgattgatcatgtttgttgagttaatactatctgttaatattgtctattaaaagtaattattacagtatgacattgcattattcttctcaggcacatggttcaaaccaaacaactcatctcacaggctgcttggtcaggcaaatgtcttcaaactttcagcatagcttcatgtatgagttttcatcatgtcaccaaccaaacaggccaaacctggacacctggtccaccgtcttcctctggttccttggcgctgttgtcgggacgagagctacagcctacgccctacagcgccctcctccggttcagccagtacttccaccgcaacagcttcttcttcttcctatggatcatccttgtcaggtggtgacgacctgacagcacactgatcacggctaaacccgcacagcagcgcccgagtaaacgaacccgccaaaccccggcggcacggccacgccgcgccaccgcgccgcgccgccggcgtcctccatcacccacgccgcgtactgcttgccgtcctccaccttgccgaacacgaacacgaacatggcggcgccgtcgccgtcgcccgcgccgaccgccttcacgcacgccttcatgcctggcggcccgtccgccacgtccctccacgcgcccccgtcccactcccgcacgccgcccttcccggcgccgacggcccacaccttgccgccgaccgcggcaaggcacgtctccgcggtgttcggcgccatgtctccctcgctggaccaggcggttgcgtcgccggttgtggtggtggtgtagcgctcggcggtcttcttgaacgcgccctgggcgtcggtcgggtagccgctggcggcgagcacgcggcccgggtttgcgacgagctgcggctcgtcgcgctcctcggacatgtccgggagcgcgcgccatgcgtcggaggcgacgtcgtacgcgtaggcggagcggagcgcgttcttggactcgtcgtggccgccggcgacgtagacgacgccgccgctcccggtgcagccgaagaagccccgggagtccggcatcgccgcgccgcgccgccacacaccggcggggacgtccagcacgcggacgtcgcgtgtcaggcatagcgcggccggctcccacccgccgacgacggcgacgtgccgtccgtccccggccgccgcgcaccgcgcgaagaacggcacgcccccgccccacgcctcctcctccccctcccccgcgccctccacgcgccgccactcgcccgtggtgaggttcgccgcggccagcgcgcactccgtcgccgccgacggccccttcccgtcgtcaccgccgcgcgctggcgtggcctggacgaggaacacgacgtcctcggccgccccggccgccctccggcggcggcggaacgcctccgacgcggccgcgcggcgccacccgcggcacacgcggcgcaccgcccggtgcgaccggctcggcacgcgcgccaggcactccatggccacgtcgtccggcaaccccgggatgagctccgccgcctccggctccaccaacgccgccccgaggagcgcgccgtcgcgctcgatggcgccgcccatggcgagcagagcaagcagcagtgtggcgtgtctttgctttgtgacgtggaaagtggaagagagggtgtttgtgtgtgtggctcagtgaaggaaggagggcttaggagggtttaagtagagggagagtgagtgtgaggacaaatttgagctatgatttctctctctctttttttaaagtgtgctgaaaattagataatatgacgtccgtaaaaagaaattcacttttatatatgaatctggacataaatatggacctcacttttttttaactactttgtctagatttttgtattgaagtgaagtctttttttaagatggaggtagtggtattttagaaggatatagtgaaagcgaaaaaaaatacagttgtacacgtagtggaggaagatattcttgtatatggtggactataaaggtataagtttggtaaatttgatcagtgatattttcatataggagtggggtaatagagaagattattgaagcacagtaagtgaaaaataataatattgcttatcataagtctctccttacatataactgatcttaaactagggaagccaaattatgataatggactccgttccatttatcatcgaatttgatggattctccctcaaggagtgtaatggccgcacctacattatggtcactaacatcttaaccatctgaagttaacctctcttcggtttgtacattaggcatggataaattgtgtgccttatgatagaagctgaaaataaaaaccatttatattatttaaagttgtacattaggggtattgttaatggtttattagtatggcgtatacattagatcatgtttagccaaaaacaaaaattaattttctttgtggagcgtacacatccataaattttctctcgccctacttatagatcaattctatatattgagtgcaaacaaattttagcctttgtatgaacttggtaagcatacaaccgataggaaatataattcaaccactgaattactaaaaaaaaaatcttgaagcctaaatccgacgacacaggtagacttgacaagaatcataaaatatatttacaagagcaatttccagcgatagtgatgatttatcactacatatcgtacatatatatggtaagatttttgacaaataatgcatggagctagcataaagagctgttaattaaagatgtggtatcgatcatgcatgtgcacatagacatgtgtatcgatgtttcatttcgtgtttgaagaaaattaaagccactatagaagtaaatctatttttcacaacaaaaaaaattgttgcattaaaccaaaattcattgcaacggacactaattgcaaacaaaataaaaatgtgttgccaaccgttataacaagtgccatggtaatagtatattgcaacgaattttaaactattacattggtttgtgctattgcaacaatttttttttcatttattgccatagtatgtggctttgatatgtgtaaatattaccacaaaatatctgaataatgtatgaaccgaaagatgcatgtaaaaaaagaaagaaaatgacttgaaatctaccctctaacctttgtaatgccatatgcaaagttggatgctcttctgatccttgatgtgaaaaggatattacatcttgccgatcataatccaatgtatactttgcctgcaaccagtcaagaggttacccacttactctttttctcaatgacgaaaacatgttttaaaatatatagcatggtcttacacagattttgatcgctgctctctatttctgaaatactttcaaatctcaacaaaattacagtattataaaaaaaacatttgagacaaatctacgtgcgtagtacatacttttcatgcatccaatctaaatataacatatattgttgttttgaagcttaaaaagattgacttggaacatatctaatatttctgaacgctagaagttattgtattttaggaatactatatatatcaccttttaattattgccatcaaccctcaatcatagaatcttttggggaaatgaaaagtgattctcctataaacttgaggtcacaccagaaaaactaaagattagactctattattctacaaatgcatatgtaccattgtcccactcccaccactacatagcatgttggtgtgtatgtgattttgtatgtgattacgaaagggaatgtagcctagtggttacagtgacctgagtagtgctccaaggtcctgagttcaaatctcctatggagcgaatttcagattgggttgtttgcggggctaagttccctatcttaatggccgtatatatccggttggatatagaggccgggtagaaaatacccttctctaaaaaaaatgtgattttgtgggcgcgccaatatatatatgccacagagctaagcatgcatgcagcgtgaactgaagagatgcgtttccccgaccaaaaaaggaaaaacagagaggaggagatgattctctagagaggaaaaaaaaaagaatgaccttctagaaggtggtgagttgcaccgagggcccaccagcagaaaggtgcatgcagcttagtgttttcccttttcttttcagttttcactctgctgtgtccctgtgtcttttcgttcttttccccccgaaaggctatcaatgtgtgcttttttttttttttgccttggtcattccaaaaaagtaaaaggaaaaaaaatgatttgccttgataaggactagctaattgggagtatggaaaaatacatactactcatcaagattgctatgatattttcatactctctgtgttctgtgttttgcatacacggttatagtatggcaatgtggcatttggttgaggagaaaagctgtggtagataattaggccctgaaaattacagctgacatcatctaaacggttcaatcttctcaggctcagcagcagctaagcaacacaccgtcatcttgcagatatttctcattctacgtgcctattcactttgataccattttcaaccataccaaattttttttgggtaaagtttcaaaaaaaacatctacgtttagtttgttgtcaatatataaaaagtcccacaaaaatttagcaatattgtcatcctgctaaacttttggtaagatggtaaaacttggtaagatttattttagctataatttgaacaggctttatatatacttgcagatattttcagtgtttaataacgtctacagttataagcacatatattttcttaggcttaaaatttttttgatccgtcactatacttaagtgcaatcttagctagcatcctctctctcaaagctagagagaggtcggcagcagcaacagatctagtacaaaaatatcagcagagcagaggagtacaaaaccaatgtgttgctcgaaagttgttcactttttgatcgcatattatggagtatcgatcaccttttgtgtttgcgcctttttgaaaatacaaaaccgatcgatcgagtattactagtaaggaatcaa

SEQ ID NO: 9245 - DNA, 10138 bp, Oryza sativa
agcatcctctctctcaaagctagagagaggtcggcagcagcaacagatctagtacaaaaatatcagcagagcagaggagtacaaaaccaatgtgttgctcgaaagttgttcactttttgatcgcatattatggagtatcgatcaccttttgtgtttgcgcctttttgaaaatacaaaaccgatcgatcgagtattactagtaaggaatcaattcatgcaatcaatccgatatttccgatcgagatcgaggagggccggatttggttttggcggctgcgaatttcgagatgatgcggagggggcaaaaggcgtgtctccggtgtctggcacttgaacgtgtctaaccttctagaagctaacccattcatcatttagaaacgggtgcgctcggatttcggaaggagtggtaacttctccttcacatacagaaaacaatattaacatataattaattaagtattagttaaaaaatataaattttaaaaataaattattaaaaatataccagtttgaaaaaatacacgcgaaaaacgtcgagtagaagttagaaaaggataaatattgaacacaccctagcctaacatgagcatgaatcccatccctcttttcgtgtttgcttctcgtagaaaaaaagagtcgcgtcatatatttatcatatatttggttagatggacatcgaaggcccatttcaaattgcataattcatctatttcttgctggcagacccctctaaactttgggtcaagctagatctgacattatctattatcttacacgtgttaaatttaaaggaaaaacaaagatgacatatgtaaactagcatactccatccattaagatataaccccaacggtcagaattacacgtaaggcactaaatatcttacgtctccgctgacatttgctagttgaaaaaaagtggtcaccaccaagaaacgtccttagtcacctagcttgatgatgcccgctggctccgtcactgttatatatgcatggtgtcatttaaaatagacaaattaggtggtcatgcattacatatatatcccaaaagccacgaggtgtcatatgcaattccaatgttaatttgttctagctcgcagggatgagaatactagcgtgtacatgctcagagggctggtcctgatgtttcggtggtcagggcgaactaaacaaatggaggtccttaatattatatcttctactagataataactaaacatttgaaatgcatccaaaagcaaaagcaatatttattatgtaaaacattataaatgttgtcttaagattttcttcagatattcctacaggcaaagtaattgattatagtatcaatattaatctcatctagcaattttattttacaaaaatatctagcaatttcttctcaatacatgaagttgtcctaccgtttatccatttaatttttcgatgaagttgccagtggcagcagaaagtgtagtgtgccggcctcgtcatgatagacgtgtagcatatgagttataacatggttaattatagacaaaattttttttgttagaccttttaatggatggaacaatattttgtacatgtaagaagtttttgtaaacagatcgaattctattggcatagaaaactcacatggaattataaattgcaattctaaagattttctagtcaaataataggtaatgtgatttgacactattttgaataggaaacatggcactgcgaaaaacacactgacagaaagagagcggtcgtcattatattgatttttgtcatatgcagctagtctagaatcaatggagatcgccctcaattttaaacaccctcttatacgatctattttaaacaccctcttacacgtggtgaagacgaaacctatctaaagaaatcacgacttgacaagggtatatatgcattatgcgtacaagtgtatgattttacccactagaattcaaccccaattaatcttcaccggttccaccttttacacataatcttgcaagtagtgtctcagtgactactactccctccttcccaaactgatcatcatataagtttatacaccaagaccaagaataatttaaatcacatcaattaagacatcatatacacattctcccataacgcatatatcgattaaaacaccatgccaattacaccttagcatgcacacattttctcatactgcattaattgtattataaagaaatccgtgtccatacggttatatgatgatcaatttgagaaattttaaattccgttatatgatgattaatttggaaaggatgaagtagcaaaaactacacgcatttaattcttccaaagacaccccacaaaaaaaattcccctaaaaaaaattcttcttgtcgaaacatgaattcggcaataataaaagggggtagcgcacgagacctaaaagtggatggatgcggagacaaaggatttagacaggttcaggccctctcaatgagaggtaataccctactcctgtttggggatttgaatccgccgggtgtagtatagatctgacgatcaggttgtctcatgccccctagagggcttcctgcccaccttatataggatggggggcaggattacaagatagaaaccttaaccaacacggtatcggtttcctaaatctactttacaatattatcaaaccaggactttaggccgttccataatatacaaggaaacgtaatacccaagtcatgatctgttacatattccatacatatatgttatcccctattactagtcggataaccatgccgtgtggatatggggtacccataatctccacagtagcccctgagaccttcacagtcgaaaatataatcttctctcgaactagattactccaaagccgagtgcttcaattatcttcgccatggtctcccgagtacttttaccaaatctgaagactgtggagggctgaaaaataaagtcaggtgcatcgaatagatgcacctaataggtgtagcccccgactatgtggttaattgaaccaaccaaacatatagtcaaggaataaataatctaaccaaccgagtggttttgataattgtaatcaaccaagtgacttgatatcaatatatagcatatgcggtgtgaatccccgaataatatgatccaagtgatataccgactgcttggcaaaatatgatgcgtacaacctaaagttgacaacatctttgaaagttcacatagcaaaacagctataaagaagcttgtatgttgtgaataaagaaatttccaaagtattgggcatacgccatgcgcacactgctttaacagatgtgcttaagtccctagaagacacatggttccaccacacctggaaatatatggcatatgtggtataaaatccgagtaaataaactcataaaggatttaccaaccgcctggaaaaatgaccataatatataatcagcctaagccataatattggtcaataaaaatgcacacttacgtggcaaaaagcaatgatattgtatccaatcaattgcttgataaacccaaacagcacattgactatataaaaaaagtcagcggggcagctatataaagctttactgtttgacaccttttaagatgcattgtaccaactcctaaaaagtcgagtaactgcggtataaaaggattttaaggtattgggcacttgatcacgcgcactttggcctaagcgaaaagtgcctaagtccctaaaagaacgtgacaggccacacctgaaaatatgggctgcagacatattaggcctaggccaaaaaatatgccttcgacaccctttaaaggatgacgcatgtaacatgctcccgagtaataaatcttccgggtaatatagaccaaatgtagctcatatgaagagcttctgatctgagtggttatcccttatgagatactccaaaatagatgtaacaattgaatcccgactggcgcaagtattcagttgataacccttacggggaataataaatagtccagtctttgagcatagaaaatagacccatgatcacgaattcatattgcatatatccagagcaagtccaaattgaaggtatgatacttgtgtttgagctaataagcccctgagcatatagcttgtccttctgtcgtagtcacaattgtccattgatggtagctgacgcagttggcatagagacaagacgaccaacatagagataatattgcccaccagaggtggcaaaaatattggtggtagtgaagataatgataccaatcaaaagtgatgaagttgcacagccgtggaggcgaagaaaccagtcggcaacagtcaggtcagccatcaatgaagatgaaggtgcccagcgataaagttatgtagccatggcagcgaaataatcaatcggtgacagacgaggcagatcaaaggcgatgacgaaatccaccaatcatgaagatgaggaagatagtcggcgacgacaaacgtaaccgacagtaatgatgataagcatcaacagagatgatcaaatatgatgacgaagttgcctatcaatagcagtagagtaagctatgataaagaggtttgacaggatgttgatgaagatgacgatgtcggtgatccagtcaatagcggtgtaatagccgatgataatgacgaagacgctcatctgcgtttgcatagtaggtcaaccgtgaaggcggaatagcaagttggcgaagtcttagtcatccattagcaacggcggaatgtcagagccgatgaagcagatgtgctggtgacgatgtcagtgacaataatccatcaaactgttgtagatgcttcacttggaggaaagtatatgctgttgttcaactcattgaatctgatatgagttgattggttgatgactccaaactcccagacatgtaaatttaatcttgacctactgctctgaagcgaagacaaaattgatgactcccagagttgacttgttggctgattaattgattgcttcatcttgacataaagcttgtcaaattttgagccatgtatttgtgtagcccccgactctttgattagttgggaaacaactgaacatagagtcgagaattatagcttcttgttgtcgagtagtcatcacttgattgaagatatgtgttgaagatgtccaagtagaaatcctgaatattggagagccacttgttgtagtaaaataacacggcatcgcatgccgagatgtcgaggttcacaaagacgtcgtggttggtgaagtagcaaaacttgcgaagcagcagcaatagagtttgccggtgccgaagataataaatatgaagtcgctctaccatgatgacaaagttgcatcgccgtgatgaagtgaacacgagtcggcggcaacagaagcaaactggtagtgaagacgcgcagttgtgaagatgaaagcaccagtcggcggcggcataaccagtcggcgacggaagacgatgatgtccatcagtagtggtagctgtataaaccagatgtagaggcgagggcactagtcagcagcagacgagacgaccggcgatgaagatggtaaggccaatcaacactggcagaatcatgcagccatggaagtgaagaaaccagtcggcagccatggcaaacgtaggcagcttgtgttgaagatactgatgcctattagtagtgacagcgatgtagccagccgtgaagaagatagcatcagttggcgttataacaggccagccgtgcaggcggtgacaccagtcagcggcggatgcggcggccggtcggtgaagacgtagacgcccaacaacggcagcataataggccagccgtgcaggcggaaacaccagtcggcggcggtcgaggcggccggtcggtgaagacgtagacgcccaacaacggcggcataataagtcagccgtgcaggcggaagcaccagtcggcggcggacgaggcggccggtcggtgaagacgtagacgcccaacaacggcggcataaaggtcagccgtgcaggcggaaacaccagtcggcagcggcgaaggcaagccggtcgatgaagacgtagacgcccaacaacggcggcataaaggccagccgtgcaggcggaaacaccagtcggcagtggcgaaggcaagccggtcggtgaagacgtagacgcccaacaacgacggcataataggccagccgtgcaggcggaaacaccagtcggcggcggcgaaggcaagccggtcggtgaagacgtagacgcccaacaacggcggcataaaggccagccgtgcaggcggaaacaccagtcggcggcggcgaaggcaagccggtcggtgaagacgtagacgcccaacaacggcggcataataggccagccgtgacggcggcataataggccagccgtgcaggcggaaacaccagtcggcggcggcgaaagcaagccggtcggtgaagacgtagacgcccaacaatggcggcataataggccagccgtgcaggcggaaacaccagtcggcggcggtcgaggcgagccggtggtgatgttctgactgatccattcctggagcgtaagagataagcttaaagccatgaatcccttttatgcatatctggatctggatcctgcagaacaaacatataggatgagtagtatctgatataaatataatactcgagaaaaaatcaagcagtttataaatacgtatttcttctcttgttaattttgatttccccgagcagatgactcattacgtttaaacactctgcccgactagtcatagccaccaagcactgggagtcggcctaagcacttcccaaacatgcatatgagtgacatgagttcgtcattaatggaacaaagtttcacggatcggagtttactactcgggtacttttgcaattattaagagcagaaaataaattatcttatctctatgcttttgatttattccgaataatacttagcaccttgcgttactcggtccatccaacgagcccccgggtgctaggaatcggcctaaaggcaactatccattggcaaaccaaacggaaagcataggaagatggaactccataactcgataggcacttttgtactcagaatatgtcgcaagcaatcaagataaatattatgaaaattgtttaaaaaatatgatataacatctgtagcccccgactcactactcaatggaagaccaattggtgtagtgaggcagaggaaaaggcaaaatatcatataaagaataaaacaaatgatgacttagctttgtaatattccctcggtgacagcaaaagtagccgatgtgggaacgaagcagtccatcaatggtgacaaaaacatcagtcggcgccagtggaaccaagccagtggtgtagatgatgaagcccattaacagcggcggagtgaccaatcaaccatataggcgaagacaccagtcggcggcgacggaggcaggccggcggtgaagtcgtagacgcccaacagcggcggcataataggccagccgtgtaggcagaaacaccagtcggcggcggcgaaggccagccggtcggcgaagacgtggacacccatgaacggtggtgtgaccaaccaactgtataggcgaggacaccagtcggcggcgacggaggcaagccggcggtgaagtcgtagacgcccaacagcggcggcataataggccagccgtgtaggcggaggcaccactcggcggcgacggaggcaggccggcggtgaagtcgtagacgcccaacagcggcggcataataggccagccgtgtaggcggaggcaccaatcggcggcgacggaggcaggccggcggtgaagtcgtagacgcccaacagcggcggcataataggccagccgtgtaggcggaggcaccaatcggcggcgacggaggcaggccggcggtgaagtcgtagacgcccaacagcggcggcataataggccagccgtgtaggcggaggcaccactcggcggcgacggaggcaggccggcggtgaagatgacgatgcccatcaacggtggtgtgaccaaccgaccgtataggcgggggcaccaataggccagccatgcagacggaaacaccagtcggcaagagtagtgccgcggcgttacatgcaaacagcagaaaataccaagagagattaatctgacatttagagatcaatctaataaacaacaataagttgaaaaggaaaaaaacccggcgaagtcggagattaaaaggaaaaaactcgccgagattgatctcttcgactgactccgagacggagcggaggaggcggaggtcgcagtcgcgggcggcgttggtgtccatcagcatgacgcaggacggcaggaaggcatcggcgtggctgcagccgtctcctatgcatccgattagatcggttttggcatgcttcgtgtttgtagatccatcttgcaacaccatggcatcctcgttgggtagattggaccagtaggcttggtggtggacgaggacgaccatcaaatccgtcgaactgtcgttgccccgtcgttgccgtcgtgctgatgcgaacaagatcaggcagagaatagcagcgacgattcgtcttgttgaagtcgtcggcggcgaggaatcaaggagctcccaaagcgaagacgaagccggcgactcataaagttgattccatcgcactcgtcgtcaggaaactcggcgtttacctctacctggcgcgccaactgtcgaaacatgaattcggcaataataaaagggggtagcgcacgagacctaaaagtggatggatgcggatacaaaggatttagacaggttcaggccctctcaatgagaggtaataccctactcctgtttggggatttgaatccgccgggtgtagtatagatctgacgatcaggttgtctcatgccccctagagggcttcctgcccaccttatataggatggggggcaggattacaagatagaaaccttaaccaacacggtatcggtttcctaaatctactttacaatattatcaaaccaggactttaggccgttccataatatacaaggaaacgtaatacccaagtcatgatctgttacatattccatacatatatgttatcccctattactagtcggataaccatgccgtgtggatatggggtacccataatctccacacttctaaagaccacatttgaatctgagtgcatatagaaccatagacaatcggttgtgctagctactccctccgtttcaaaatgtttgacaccgttgactttttagcacatgtttaaccgttcgtcttattcaaaaacttttgtgaaatatgtaaagttatatgcctacataaaaatatatttaacaatgaattaaatgataggaaaagaattaataattacttaaattttttgaataagacgaacggtcaaacgtatgctaaaaagtcaacggcgtcaaacatttcgaaacgaagggagtattatctttgtcacaagataaaaactgaatctttttatttcttgcgggcataaaaataaatataaatctgagccttgaaggacgaagagaaacaaatgcatgccttcacgtatggaggcaaagatgcccaattgccccatcattcacggaaacaggtcaatgacagcgaaacggagagtcaagatcctcgagacttcaaagagatgtcttctagtactaatatatcaccatggacttgactcgaagagcatcattgccagcacgcactactgcgttatacatgtatcctgcattctctaacaggtaataagtactacatatatatcgtgcaagggtataatccgtttcaaaatattaaataaattctaaaactgaaaatggacattactaaaaaaaaagaagggagaatagctaatgtggtccctgaagtttcgcttcgggctcagtttagtccttgaggtttcaaaacgtccaaataggtcctccaaattaatcatttgggttaacatagtacttgaaaaaaaaaatgccacataaacatgccaagtcattcttgcatacaacaatgaccattctacccttaccatataaaaaagaaagaaaagaaaaaaaggaaacaacagatagagtaatggtccggcctttttgttcgttcctccctgttgtttccttttttttcctttatttttttcttttcttttttttatatggtaagggtagaatggtcatttcatttgtattgttgcatgcaagaatgagggctgcaggaatt

SEQ ID NO: 9246 - DNA, 14675 bp, Oryza sativa
cagatagagtaatggtccggcctttttgttcgttcctccctgttgtttccttttttttcctttatttgtttcttttcttttttttatatggtaagggtagaatggtcatttcatttgtattgttgcatgcaagaatgacttggcatgcttatgtggtattttttgtgggtccaaggactatgttaatccaaataattaatttagaggacttgtttggacgttttgaaacctcaaggactaaacttagcccaaaacgaaacttcaaggacgcattataaaatatgaagaagagattgtaattggttgagaaaaataaaactgatagaaaaattaaatggagaatagatatatgaatggtttgagacgtgggagtaggtgaagaaataattgtattgtaaaataatatttaaataattagaaatagtttatttttagacgaaggggatcgtagatgcctatggtgttggtgccgaggacatggagacacacataaagaaaacgttcagaaaagataggagtagctactaggccgagatggatggcatagcccatcgtacaggacgccccggtagatgggacagtaagacgctttgaaagaaaacctcagctcaggcttgctctttttttaagttactcttttttttttcacagaacaacgcaacagaatgtcatccctataaacgcatgcacgcacgtaaatcgtacccctatgagcatctttaaagactgggctggtaaatccttgagattgacgaagtcaccacaggcgtctcgctgtcgacggttacgtcaactaccactgaaagcataacgccttgctgtcgacagatacgccacctaccactgaaagtataacgcccgaacccaggaccttatatgctacactaggttacaggccctttcgagtaagatatattttttaaaattgctaaatgatatgttctgtataaattaaatttgtgttataaaaactcggacaaccatgtctgagatacccaaccatcttttcagtcgtggaagtctcttttttgaatgaagttcttctgcatctttgcagaataaatgatcactcaagcagtttgtagatgattggttacaaactttatatcttttcttataaccttttataaatatttttcttaataaataaaaattacactgctgggcaaactggcagtaattccaggaaaaaaaaactcggacaattatgtattgattgctattttattttacgtgattttacttaatcgttgtcttcggcctaaattaagctagttgtacgtagtagcagttcgatactccagtttgatacattattcattgacttgactaagaaacatttttttatatatggcgtggcgttaaccgagagagacgcggtcgcgcacgcggtcgccgctgccgtgagcaccggtgccggcggtgcgtcgcatagccatataataagcgtacgtgtcttatgatagtatgacgtagagtaggtctagtttttgcttgactcttttggaagaacggccggagaccgccttgaccaccttgagccttgtggtcgtactattggaccagccactaccacgtcggaccgtcggtacgaccacatcatgtatccaagatttaaatgaagatattatctcttttttttatagcaagattaaattgtcgaccgatatccgagtatccattttaatactctgctttagagcaagattaaattaatacagtttgaattaacttttctttgtcttggtgataaaaaataatacgcgtaagggtgtgtaagagggtgaacttctcgagcaggggactgtgaggcccccctttgttagttcggccggaggccgcgagtgaaagttgaggagttggaaggatggaagtatacggcgatgtcgagggggtcagggccctcgatgaagatgagacaaaaagggtttatacagattcgggccactaaggagcgtaataccctactcctgtgtatgatgatttttctgagcttataaagtctctgaatctctggtgtacaagctagagctaagccttcgactctagatccccccttctcgctagacatgtacctccttttatacctcaaggggttattagatgggcccaaaggtctatttagggaagagggaaaatattctctacattaaatatgtgtcttgtgccttaacccggaagtcatctgcacgtcggctgctgtgcggggcttatcaaatcataccggctgacacgggggatgcccctgccactcaccatttaatggaggaggacttggggggcatgcatgcaccaggaacacaatctcgggcatgtctggagcagtcaagccgactccagactggtcgagaggtccaaagcctctcatcattatgatgggacgggcaataccttccacacgccgcctgacacacgatcagggtgtgagtgcattgccgccgtctcatctgtcatttggccggtcatagaccgatcgcaggcacacagcacgccgcatttaatgtgacgtggtgcgctcgctccgtccgcattaaatgctaacctcatacgcgtggcggccacgtgatgactgtcgctgggggcggcctcttccctctaagctatgtacccccgggcccatatcaccgatagggcacacgatgaaagattttagctaattagctggacggaaaagagaaatatcaagaaatatgattaacatattattagttgagtattaaatatttaaaaaattaaaaaatatttatttgaatttttaaagtaccttatatatatatatatatatatatatatatatatatatatatatatatatatatatatatatatatatatatatatatatatatatatataacaaatcgtttagtagcctgaaaaacatgttaacgaaaaatgagaagtagctaagcttaaatagcacttttggatggaaggaataccatacaatctgcatcggagtgcactagcaattaattaatggcaatcgtcaagctctttttctcttagaccctgtttatatgggactaaaacttttaagtacttgtcacatcggatgtttggacattaattataaatattaaacgtagactattaataaaacccatccataatcttggactaattcatgagacgaatctattgagcctaattaatccatgattagtctatatgatgttacataaacattctctaattatggattaaataagcttaaaaaatttgtctcgcaaattagctttcatttatgtaattagttttgtaagtagtctatatttaatactctaaattagtgtctaaatatagagactaaagttaaatccctagatacaaacaccaccttactatgatggctcgtcacaaacacgcctctcaagctcttaaacgatgcatttttttttataaaagttttctactacctcggttttgaaatatatattcattaatttcacctaattcattaattaatggcaatcgtcaatctacaaattaatttttgtgtgtgttttacaattctgtgatcatatatattcataccaaatatttgtatttttttctgttaatgagtttttgtcaatcctgcgttacgggtggacgtaaacattttactgtgtccgtccttttacttccagcataaaaaaaaacatcaaccttactgcggagcactaaaaaacgtacttaacctgggtgactacacagttgcatcgcataacagagctatatatatctttattattgggatgaagttcacgcaagctgtagtacttaacctgcaactacatcgttcacactggttacccagtagtatcaatacgatgacatatgctgcgtggttcgatgccgatcactgtagcaaacctgcacggcaatgggcagattctgaagaatggattctagcgttcagagtttcacgccttgcctgagccacctgcgcccttcagtacctcgtaaaccgctgagaaatccaggtcccctagtcccaagcttcttgctttcttgaacgcctgcgattcagcaaaccacagtgatgagttcaagcaatcagttgctgtgttttcagctttcacaggttgcggtgaaaagggggaagaaaggcgtcgcacctcgttggaagcagctgccactggcatggagacagcgttctcgtctcctagggcaagtgccaacctcatatccttctgctggtgtttcaggggaaatgcagggttgtagctgccttgcagcatcgagggccctttcagcttgaacattggattcgcgatggcgccaaggtcctgaaagacaatgatttactcggtgttatttgatgctcaattgtgaaggaggtggctccggtagaatgaaattaaccatgtgccataccaggacatcaagaagtgtctgggggctcaaaccactgttatcagccagagagagtccctcagacaaagcattcatcatactgcagtaagaaacaacattacttgtattttatgagaggaaaaaacggcagtaaatgaatgacagtccagaaagatacaggagatatgtgcatgtgctaacaatagggagcttgcattcatcatactgcagcagatgtttataaataattaatagatagtcaccttcccatgatcatgttgaccaccagtttcatctttgctccatttccaatctctcccaaaaagaacgactttttcccaagtacatcaaatgcagggaccatatcatcatacaatacctgtagcagcagtataattacatcaaatgcggaacagatctatgacatagcactaaagcagtagtgatttgtatcttgctggttaaaattgttgaaaactggcatagtcgacacttgacaggtttaagtatcagattcggatcatcaatccatgtcgtgacttattagatgctaacatctaaaccaaatccagcctatataagctgagtatttctttggacttcaggcaaatgctgcaaaacaataataatatacaccgacacattttgtcgtttgcagaaaaaagataaaattgccacagtggtagacccatatataaactaaaagccattatgggcactataaattttgtaaatataatcacaaaaggtttatgatcattaggccataatcatcaaaagaactcaaccggatgcatcacttataccaaaaactaacaagcagaggaccaaaatatggtacaatcatttatacctagaaaaagaaagactgtttttgcgaagtgtcaccgataccactagtttacagtagtaattgcaaacaatcatcatagcatatggaattaccttgtcccctgcagcaagaatgaccaattggccatcttcagctggctttttgcttcctgaaactggagcttcaacaaaagccccacctttttgttttatagcctgcaaacatgtatttaagggaaatcgattataaacataccttggtagttatagagcacactcaattcggtcatgctgatgaaaacaaatataaataaaagacaccaccacagcaatccagtggaattaaaaatgtgctgaacttccatgctatgatgctaatgctttcttttggctgtttgcttgatgttgaaaactcagaaatatgcaaatatgttgacttgatcagttgatactgtcaacagtactgaattagtctcaaacttactgcacaagcacatactagttcaatggtcacatatgtgcggtatgctggagtccttatgtcataatcatgtgaggttctgattgaatggaaatctatgatgaagtggcatatctataaatgtgccgtgttatactcatactaccatgcatgtagtcatcagacaaaacataaaaggcacaatacatgagcggttgaccaccattcagaatgttatgccactattactggtggatttttatacatcggtgaataagattggatcatactgtgaccacaagtgcattaatgcagaaaaaaaaaagcaaatagcatgcataaacaaaatggaattgtgttcataaacaaaatcacctcttatgatatgcggtgatgcattaacgatttccaatatttaaagtagggctttccttactatttaaacaaataaaaaaaatcaaagcgccgaatgtttagcaaattaaattagctgttgagtatgtaaagtttgaactttaatattaacctgacaatctacaatactccttgatagatgttgacccttgttaggttattaattgtgaactacaagtatgcagtctagtactgggttccatgttatcttagtgaggtcaccggtagtattttaaaaatattgccgacagttttgtatgggaatggcttctttgctctaccaagatgagaaggctgaatgttaaaaatggcctcatttgcacatactcaggagcccattattcaccaagtggccatgctgtgttatgattcatgcaatactgttttctggggagcaagaaagtggctcaatttgttcatatttggtgacataaatcaaaccctggtagccaattgcatacagacggccaaagagatagatatgatatttggcttgtcattattcttccttctttctaactgcaaacgattaaaaatatgttctcttcctccatcgtccacttctgttaagtattcacatgttttcatggaatattccctcggattacgatataattcattctgtgcttggcagtgtaactaggatgaggtatacaaaataacttgttgccattcaatcaaggggacaaaatggctctcattaatgagaatggcagcattaaattagtaaggacataagaaaacacgaaaatgcctacaaggctagaagctctgcgcttttgcaatgatttatagtagagaataattgtctgttttagaacaacttacaaaagcaaaacgagtgagcactacagaaggtattgtcgtacatgatgtggcaagatagtgaaaaaaaagggaaatgccaacctcttaggtccatatctacacacaggaatacatggatgcaagacaaattgtcatggtggtgttcagttgaatatctttgcaaaccaggatggaaactgtacactaacagggtcatcgatatcaaggaatatgcttgcgagcaacatatattgcaggatctaataatgtgaaattaggtaaggtactcagacagtcaaacttgcaggattgtgaagatgtaactggccaatcgcactcaagaaattgcacggaggcaacaagaaccaccaaactaattactaatacacgattaataactcatcactcatacatacatgaattgaaataaaaataatgggggcagggcaaggcaaagccatcagggaggagaaatgtgtacctcgcttatcttgcaagaagtggcggcatcaacagtggacatgtccacataacccttcccttccccaatctgctcgagcacgccgtccttgtcgaatacaacctagatgaatttagcccccaaaaaaaaacaaaaaaaaatcagggaggacgccatcttgcaaacactaaggaagcaggggctagggcttaacagatagcgcggcgctggggtcggagagcatggcgatggtgtatctgcacttggcgacgacggccgccggcgtctcccccacggcggcgcccagcgcgacgagctcctggcactgcgcactcaaacacgcgtcagggacatcggattactcgaataaactcatcaccaatctgcggaggaggaaggatggatggaaagaaaaccttggagagagtccggttccagacggtgacgcggaagccgtggcggaggaggttggccgccattgccttccccatgatgcccagccccaggaaccccacctccatcgcccgcgcgcagctacctcctccctcctcgccttcgtcttcctcctctcgcctccacacacgcacgctgcacacttgtgttcttctcccccagtgttcttcctctctccaccaatctctcgattttctttatattttctccatggttttatttattttattgcgttttatttccacctttttgtcgcttctcttttgggtggaccggatgcatggaccaggagatctgggagccgtcggtggaggtgatggatggacaggatgcgtccacgcgtcggcgtcagatgatgggccgacgtgggccggcgcatcgcatccaaattaatcagccggccgcatcggctccggggcggcggaacaccacgcagcggatgaggggagatgtgtggccagtgggggtgtgacacgtgtgcacgctgggtaggttaacctcgtcgtgggctgacctaatatatgtggcccaaatacctcctcttgaactgtggcccatggctcttgtatcaactggaagcaggagaattgaactgcactgcactccatcaaatttgggtttttttttctttcctttttcagaagatcaaattcctgagttctaaaaaagatagttcgtatttcgtaatgggcttttatcagacggcaaccaggatctacattacccctttttagggcatttgaaccacggtaccgtagtaaacgatagaaaaaccagacaaaattttaccaaatttaaaatttttattcagatttatttaagcttggtgaagtttatcaggcccttactattatcgcaccctgatgataagctcaataatcggcagtaggaaaaacccatagttgagagatgcaaatggaatttctctgtttcaagaagaccgcgatacaagaaagataggaaacttattctcatagaagcttctgctatatgttgggctctatggttgagtaggaatgatatgatttttgacaaatcaccatctgtttcatatatgcaggtaactttcagggcaacacattggctcaggtcttggacattgctacaaaagtgtgatgaagagggcgagcgtttaaaagttgcatgtcgtaatcttgaggcaacgattatgcaaatgtttaccaattttggatggggattcacaaacagaattcaataattgtgtactccttatcctcggttggtaggtgtcttttttttgtgtgagaaactttttattttgtgtgctgctctgtaataattggctgtagctcgttgagcaaagatcgggatattctattccattatctaagaaaagaagaccgcgatagttcataccgtgatggttcgtcgtggactttaatcagacagcagccaagtttacgggcatgtttggatctctaccctaccaatttatcaataatactaaaatctaggcaaactttgatactgccaataaatgggtaaagtagagttatttagctcatgtttggattgggaccaatataaagccaaaatttgatattgtagtgaagaaactacttgaatttagccaaataaaacatgggtgctacctattggttggccttaatccaaactagcacatttactatttagattgccaaaaatattggtaagacacattttggtatcaatccaaattccaaaatggtcctagtagttttatgccagtaagcccggtaacaatggttatcacagtaaacagtaggaaaccagataaaatttactaaaattagaattttcgtttagattttattcaaacttagtagttctgaaatttataacaacaccgtgacttcaacactatacaattactaaaatgaaagttttgtgagaagtgcttctatgctccttgaaaaaaacctgcacggaaattaaagcacatcaatggttcggatcaaaaggtgattactagggtaaaccgtcattaccaaggggcaatttcgaccaggaagtgaaagcccacatccagcccaggccgatcgatccatcgatctgggaggtcgacacggcaacagggctagatggtgaagatcaccagatcagccgggcatgtgcgaggaatgggagggcgacgagctgtgagggctattgtcgacttgtcgtcgttgcgctcggcgttgagacagattatacagtatgatgagatataggaccagttctcgaagggcagtgtggtgtggaagcggcagaccagatggagaatggccgcatcctctacggcggcggccatccatgatgactcaaactcctgcatggtagaatacccgcttcttgtacctagtgaaacctagatagaaatcccaacgattctcctgttttttgattcagtgattttcgtcctttacaaaagctaatccttttggccgcttgacatagatgatgcagatcttatctgaatatcattccaggtgcgtcgcgagggaattgccgtcgcgaatcgatcgatgagagacggctgggtacggggtgggtatggatatgaacttttgcttccgggacgaaattgcccctcgctaatgaggtttaccctgttaatcgctttttaatccagaccattgatgtgctttaatttttgtgcaggtttttttattgaggagcatagaagcacttctcaagttttgttcttttgaaagaatagattttcttattgattcctcacttttctgtagtttttcctatacgagtaattccattccaatgatttcaccggtgacctattcagttggggctttatttatctgtgcaacccttcgacaaagaaagatattctgaaattagataactggttgtaagagaaaccctaatgacaactagctcaaaagagctatatgcaacagcaatataggttttgctctacacccaatttacatatgtaacactgcatcaatcaaaaccatgtaaaacgaactgctccgaaagtggagctagcggcgccattgagtcaagactgcaaaaagccctttctagtttccattaactttttactgaaatcatgttcacaataattggcagtaacgtacaccaactagggaacttgagcggaaaaccgaccagctcgggaggtggctctaccactgatctgaactactccgaaaatactcttcttccgcagttcatcaacacgcaataattccgatccgaacggttgatggtttacacgtacatcgaactcttgtagcttggtaccacgtgctagttgatctctaacaacgacgtgcatttctgaatccttgttctgaatttctgatctctgaccccggaagtttggtacccatgcaccttcttgccatgtttccctaatccactatgccaatgttggtgtggcagttagaacttggaagacagcatctcaaccaacccccacattctctccctcatttttggcacaaacagcatgtgcagcccagctctgtttcctctctgaaaaaaaaatggtgaaggggcatgactgaccatactggtcttcagaatactagtgctgattccccatatgaaacaagaacacagtatatatgagactatcatatagcagctggtatggctattatggattcctcctgtttttagtcagtcaagagtcaattttatactgctgcaatatgcaactggcagggcactagaaatgtgttttttttcaggtgttatgggatagatgcaccctcaccgggtagctctgtatagcttaggttgtttgatcccaacaatcgggtagctgccaacctcggtggttgagaccacgaccaattcaacttgactgttcatttgtttggcattctgatccggaaaccttatcgcttaatatatttcatttttaaaaatatttagggcttgttcggttcaaaggatttttcaaatcataggaatatgaaaaagtaaagaattttcaatccataggaattttttcaagaggttttacctcatgctaagaatcgtatgattctaagactacgatccttactaatttggtaggagctattcctatgaaacgaatgatgcttagagaaaaaaatcatatggtttcgatcgattcctacaataatcctttggaaatcctttgaaccgaactaggcattaggattggacatacttttagtgggattaatctagtctctacaaccaagatgtatctggctacttaaggttggacatatagaaaccatgtgaaaatctactatgaacaatactttttataatgttatattcttttctatgttttcaaatcaatggtatatacaataaaaatgtacaaaccattgattttactagggaaatttgcaaaaatcaccccatgaattataatattatgaaaagtagctatgtccagaatatttaaaaactaatggtcaaatatttaaatgccacatcgatgtccagaatatcatgttttttttaaccaaagtaaacaataaattgcaacgtggtcaagtgatgtggtgatgaactgcactaagttaatcagatagtattcagattgttcacatattggttgaatatgcacctggcttatgaaaattaaaccaggatttatttatcctgctggcatgtcactgttaatgacctggtggaaggcatgcatatacactgcatgcatgaggacgacaacattgatttcgcagacgatgctacaccaaaccatttttcttttcctcattattgaagcagttacctctcgatccaacctttacgtcagttaattacttaagccaacagatcactactagggctactaatcagccaactgggctactggagttgatacacacagcgcctcatcgtttggcatattcatatgtttttcagccaaaatttgaatttctaactttaaatttggagctgattttgaggttttttcatcgaagtttatttttagcctttgcttttagattgctaagaatacatatataaaagtttaattcatatattgattttcgtttgtaaatatgtcatttggcatattcagaaaatatgccaaacgatgaggctggcagacacacagccgatgatgtgtggctaagagcaggtacaataaaccagctagcataaacacatttcgaggagataaaagagaagatagaaaagcagcgaatatagatttatagtcaactgcagcacggactccatataatacgtgcatgacaggtaggaccatgtattaatagtgtagtacttcctccgtactcataaaggaagtcgtttaagaaaagcagcggactatggatttatagtcaactgcagcatggacttcatgtaatatgtgcatgacaggtaggaccatgtattaatagtgtagtacttcctccgtactcataaaggaagtcgtttaagacagcgacacggtctccaaaacacaactttgacttcttgtttctataaaaatatttattgaaaagtgatatatgtatacttttataaaagtattttcaagacaaatctattcatataatttttatattttcaaactaaacaacttgagagttatttatgatttatattccaaggtttgacctaaacattgtcctaaacgactttctttacgagtacggagggagtatatatttatggtaactattgtatgaattggctattaaattgattatagatgatttagagttaatagtttgttatgctattaaacttgctctaaataattaagctgatttagcaattgaattgttctgcatgacgagtagcagaggtgtgtttttgtctcgatgtgttcttcgctagtagcacctgggctctgaccgatcgacgacggcgacgcttcgatcgattccataacgaagcaggtaatgtttctttcgtcgagacgcggtgtaggatcgatttgatcgatgctgatctcttaactaataaggagtttagagatggaaaaaacgtgacaatacagatatagaatcggtcgatctctttctagcaatgcaaactttcaagtctgaaaccagttgcctggagaaaggtgtactgattgactgcttcccagtaaaaatgataaggccggaaataatcacaaagtagctagagcgctttaatttgcctgaccaagctcgagcaacttaattatagcggttaatttggtcaaccaatgtgtgtcagtgtgctcatgagattttgctccaattttgttgacctccgcaactttcgtccaacaaagctttttaagtaactctcctttctaaaaggcgcaattactttcttatatttcatagctaaatgctcatgcttttatacggaaggagggagtaatatgttatcatcttttttctacggatattcgtctttctctatcaatttaggattgatatttattaatattaagagattcaaggggtaacttgcaaaatttacgatgaatgtacgtaaagtggtagattcaccgccaccaccacttcatttttttaaatgagtatatatatacaagacacgtatacgagcatgcaattaagcatcacatccttaattttattttaaactatccacctctaagatttctaatctataatattatatttattaggatgatccaaacaagttgatgataataatagtttttggtttttatgttagcggtagttacgcttatattttgaaatgagggagtcgtgaggtagaatacagacataacttaaagtgccaccttaaaaagtacagcatagattcacatggtgatgtgaatgaaggaaggaaaaaagggcgaatgagctacccctcatacaatagataatatttacacaagctctaacaggggaaaagaaagaagccagtagattgagactaaacaaataaagtaaaattgttgtagtatattgaagcaggtgtaacagaagtagcgtgtgaataaaatta

SEQ ID NO: 9247 - DNA, 8977 bp, Oryza sativa
aaaaaattttcaaataagacggacggtcaaacgttgaacgtgaatagtgtaaaactgcacttattttgggacggagggagtacttttgtgccgtgtggaaggctgggaaacagttcctggcatcctgtcctgattcctgtgccctgttcgaccgggccccacccccgcaaaccaaaccttgtcttgtctgcgtctggttccaccaagcgcgcgcctcgccggtcgcagtgaggtcctgacgataaacgagattactccatccccatctagcattttctttaaaccgttaaacagtagtgtgttttatagaaaaaaaaatttcatgcataaattatcttaaaatattagatagtaataaaactcaattaattataagttattggtttctggcttccttattactcgtagaaatcggatcatgtaatatagagcaatctatgttagacatctccaacgtcgctacgccactcgcattggacaaaagagaacaagcgcaactgatcgatcaattgacgccttcttggtccacaccaacaaattattaacccacgaaaatgtccgtgggctgattttgttggtgtgagtcgagaaggaacacatcggtatgatgtattggttcgcctccgtccgatgccaaacaagtagagtagcaacgctgagcgtccctctgacgatggctagtttggatcatggactaaattttagtccctgtcacaccagagatttagacactaatttagagtataaaacataaactaattacaaaactagctacaaagatgaaggctaatttgcgagacgaatctattaagtctaattagtctatgatttgataatatagtgctacagtaaatatatgttaatcttaaattaattagacttaatagattcgaatcgcaaattagtctccatccgtgtaattagtttgtaagtagtctatgtttaatactctaaattagtgttaaaatatcttatgtgataggtttagtccctgtatcaaaataccaccatagatactcctacagtatacccctctacagtacatgagtacagtacagtatgtaccagttgtacatggctgcacataatcagacttgaacaaatgctattactgagcgttgagagagattttttttttcttctcatcgttgcaactagtgaagtgtatgcattctgtactagtacatcacactattacgattacgaatttttactgatgaaacaaaattaaaattgggcgcattgcgcatcttttttttcttttttcttttttttttttgccgtgtgcgtgtggtacagctgggctgcgcctgcgcgtgacaagcacgcggctcgcagcggcaaatcctcctctgctacagtctacagagagaggctgaaaggcaaagcgaaccacgtactcagggctaattgcaaggacagggacgggcccactgcagtgcaaacggctcggaggtggtagtggaatccacggcaacttctttccccaatactccgtatacgtactcacgtacagtactgtatgcatgtatatacacgcgcggcgcgcctgagggtattagtagtagagtactgtacgtggtagtagtacagtattatacaagtagtgcccagtgcccaccaccagtagtatactgtacacgtagtagtagctggggttgttggagtcgtcgggtccagttgcagtggtactacaagtttcagagtcgggttcgggttgtttcacgcagagcacaacggatcgatcggaggactataaaagcagatattcttcgtcgtcccctctcaccttcatcccaagtccgcccaaccctcccacccatcacaaccattcccctctcctcaagaaaaaccctatcgatgggtacgccacatcatcctacgctttggatgttcatcgacagcgtcatgcagcggcgtggctcgccgtcgccaccacctgccgcgcagctgagcgggggcgtgcgccgcggagggagctcaccgccgtcggcgacggcctccggatgcaaggggtcgggatcccgatccggggcgaggccttcccggctgtcccgtgaggaggtcgccgtcctctcgtcgccgaggccgaggcgatcccgcccgacagctggggatgacgcggacggctccttcgtcgggtcgaagcaccgcgatgtcaggagggcgtaccccgccaaaaggaagcagcgcgccgcgacgtcctcctcgtcgtcctcgtcgtctcctcctacggctacggagcggctccgcaaccgcgggcgtctcgttccctcgaaccgcgtcgacaaaaagatgcgccgcttcgtgggaacggtgaacaagttcgacgcgctccgccacgacaccgactcccacgacggcgacgacggcgacgacgacgtcgcgcttggcgcggggccgctcgaagccggcgacatcgccgcggcgaggactactccaagcccaccaccatctcacgccttctctaaggcgccaggtgcgcgctccctggagactcgcgcccgatcgcccacactgagtccgaccgcatcgccgtacacccctgtctgctccagggtctcgcgctcgcccgtgcgagggccggcgaccgcgcccgccggtgttcgtcaccaggggttcccaacccagtggcccacgccatctgaatcttcacctcgttcgcatagttcgggcggcggccgtggcggagcaggcgcaggggcaggcggcggccgtggcggagcaggcgcaggcggcggccatggcggagcaggagcaggggcaggcggcgcccgtggcggcgcaggcgcaggcggcggccatggcggagcaggcgcaggggcaggcggcaggcggcggccgtggcggcgcaggcgcaggcggcggccatggcggagcaggcgcaggggcaggcggcgcccgtggcggcgcaggcgcaggcggcggccatggcggagcaggcgcaggggcaggcggcggccgtggcggagcaggcgcaggcgcagggggcggcgcacaagaaccaggcggcggcggcgcacgccgtgtcgtgtatccgtggaacgcccctgtgccacaggcattcccactggcgaggtgctctatctgcggcgctgtagcgctccggtattcgttttgttgtagccgcattctttgcgggacatgcggctgcccatgtgacccacccgccgtcgtcgtcctaccgccgcctgagttctttggatcagtttatctcctagtgattcaccagccagtgagtgggttcccatcgcctccgatgatattcacagcagcttggagccaggtggatgtatggactcactggattacttacgcattctgcccggcgtcgaggcttgtggatggatcacatttggtgccggctaaattctactctatgagaatccaaaacagatggatttcttcgatgcatgtctttgatggatatttgcctaggagcatgattaggggttgatggtctgggttcctgacttcctgctggtttactctagtaatagtacttagttttctcttcctgtaatctgtaatatgtaatgtgaaaacttattatctactaattaagagcttgagcacatggaattgcattgtgttggtttctgcacaattgctgtgtcttcttgcacatttgtaatgtgaacacttattatctcaaaaaaaattgcattgtgttagtttctgcatttctgatagtattattctccaccacaatgctagcgtgagatgctgcagaaattgagcgtccgtgtgttgcatgatgaagaccttgcttctcctttttcctccgtgataattaagaaaaaaagaaagctgccgcagcagcagcatggttgcctggatttttttttaagtacctcaaaatgaatgtgagacgtccatttgattcgatctaatggattagattcaatcctactacacctggtagtagatgtagtataattcgtggaggggtaacgttggaaatgtaatagatggcattgtgatgaatttgcaattggcttaggggtaagttcgtaatctagtccaggggtcaatatgcacaatcggttcacagctgcacggaggcgaggcgagatgctgcagacatgcagtgctgctgtgcgcgacggaggccgccgcacttcacgcgtttggcagtgccgtcaatttgatactgatgatgagatcctgtcaaaggactctgctagtactctcgcaaaaaaaaaaaaaggactctgctagtacacctgtttcaaccgtagcgtcaaggtttagcaacacctgcctggaagtccgaggacctttagtaccgtaccgaaccaaaagtgggatgatccatatcagaatctaagacaaggccggaaggtgatcaaaccgatgaagggttcaagaccgtcgtagccatgctgatgttggtcaatttcttgtcaattgttgtttttgtcggtcaaattgcagattgaaatagctgattaagaagacactaacacagttttagctcatatctgattgtagttatttttgtcagtcaaattgtagattcggatagctgattagaatgacgctaatagagtgagagtgtgcttgcaaccgcgagtcgttgagctttcttttttagccttatttcagttcagtctagaactcagtacttagtccgtcaactcagttctgctgcagataaacgagcttcggtattagctcatttgcctgatgctaatgcgaaaatgactaaattatacatcatcagctaaacatcagtgattcagtaattagttttgcagtatagcaattgagtgattcaagaacacatttcgacaaagcgaccttccctagagcaggccggtacaccatcatatcccaagaatgaagcggtgctgcggtgcacagggccacagggggtggagggatggcgccgtcgtacgtggccgtgggttcacgcgactacgcaaggaggggcggcgggtggcggccgcgcattgaggtgaggggcggcgccgccgtggcagtgggttcgcgcgaaaagaacgggaggcctcgcgaaaggcgaaggcagacgtcgggcgcgcgaggacgggctgcggccgtcgtgcgcaacgaacgggaacgagcgaatcactagccttcgtggaagcacctgaaataacgaaaatacccttccacggtgtagaagtaaaattctaaagtacccatcaggatcaatggttagatttggttcctactacactactaccagctcaagtagagggtactgtaaaataaaatgaccccttgtttgggctttgctaaaagaatagtaccacaccctctctacatgccaatgtaggggatgtttggatggtcacatagactaattataaactcattctataatctagactaattcgtaagacaaatctattttgaacctaattaatccatgattaagctatgtgatattacagtaaacatttacaattaattttattgttagactatatttaatattttaaattagtgtctaaacatctgacctgacatttactaaagtttgatccctgtatatccaaacaccaccgcaatgcatgcatgtttgttcagtgttcacaatcccagtagcatttttttttgtcttcttcttgtgtcgttgctaccttcctttttcatctcagagagagagagagagagagagactatttggatgtttgactgcatgtgcatcattatctgctgcacgtaccgtacgcgatgcagccggtgctccaaggcgccctcgacgctctcgtcgaaggttgacgtcgagagggagatggttgccgtcgcatcgatcgtgcgccatgagcacgacgtgcatgtggatcatggctactatatatacaaactttatacgtatcgtatataaagtttgtacatatatacgtacgtatacaaactttgtatgcgtatgtacgcatataaactttgcatacgtgtgtatataatgtttgcatatatacgtatataaaatttgtatacgtgtatatattacgtggagggtcattaaacttctttaagtgtgtcatgtaggtcactctattttcaaaatgaacatttgagttactaatgtgatataagtgagtcatttacccatctaactatccacacgagtgtgtggatactctgtacaaatttcatgccatgtaggattgaaaaaaaatgccctgagtgtgtttgaaaagccattttatactcttctcactcggctatcatgatttggttgtaccaagaccttaggtccagcttggtaaaccattatgatccagctaatttgtccaataatttgtcaatgacaggtatagggtattttgttttgatagtaaacttttaacttttctatcacatcgtttcaattttttcaaacttctaattttaacgtggaactaaacatagcttaatagtagtattgttaaaaataaaataccaatattgtgagggttccactcgatgtcaacaagaacacaaagcaaatcacaagaatacacaaaacctataggtaacttagatattactaggtgctttaagatatttaattaatattacgcttcaatccgaattgagtccccaccgtaacttaccaccgagttgccatatgatgatcagttgcctgagctctcagattctatatcgatgggaaagtatattcatcctggagggaatatcccctcggttcatgcatgtcatctatgttaaatatgtgatctaaattttaggcttacaatatattcgaattagtttcctactacgactctaagtctttatccactaggactcttagatttctaatgtatcctctgcgtttgtatcaactcctttatagtaatcattgccgatcagcgtctgtattttttcccgcaaggatttttcatgtaaaatttatgtctccgttgtgcatctaatcctattttttcccgaaggatttttcatgtaaaatttgtgtctctgttgtgcatctaatttcataacaagtgtatctgagcctttgagatccatctatcaatcccggccaccggcgtgattccacgatcgaagaaatcgatctcatctgatcggcggcagcaggcgcgtgttcgtcgcgccgtctcgtcaattccgaatttccgagtcatcgccgtcctcctgaccgcgcgaccgcgtgagaaaacgctggagcagcagcgcacgtcacgaaggaaaaagcagcagccgatgcacagccatcgcagaaggaggagcgcaagaaaagtaggagaaaagcaggaggccatctatcgcgcacggttcccaggaagattaggtcaggaagcccaccgttcctgccctgttcatgcgaattactacctctgtcaaaaaaaataagtgcagccatagatatacgtgctcagcgttttgaccatccgtcttatttgaaaaatttataaaaaatattaaaaaaattagtcacacataaaatattattcatattttatcatctaataacaataaaaatactaatcataatcctttttcaaataagacgaacggtcaaacgttagacatgaacagtgctaaaactacacttattttgggacggagggagtaaatttcacgttggtttttgcttcgtgcacacgaagttctaccgggaaatcaagtcctgtgcattgcttgctatggttctatttggtgaatcgcccacacgccagtttaccaggagattttatccggagatccaaatacttctttttatgcatctagagtgtttcacgtttctgctagggttccacaatttataccagcagattcaggattttatttccaaggcgagtttaaaggttgatctaccgctcctgaattgagatgcaatatactcattatggcaagtgaagatgcaagttggtgcatatattgaggatgaaaaggaagtgttgtcgtgcactagtctatcagttgcgcatacatatttcaggacacaagcgaagtcatcgagagggagcctgaagggtcctgtccagatcacgtggaggattacataaattcatgccagcagattcaggattttattcccatggcgagtttgaagtttgtgcatcgatttcgcgtctctgctgggttccacaatgtcataccagcagattcaggatttattcccaatggcgagtttgaagtatggtgtacctcttctggatcaagggtgttatggattatagtccaagtgactatttggcgcacatttattttatcattacgaggttgtttggagattgaagatttttatgctataagggaaattcgtctcaagatgaagattgttaaatatgtgatccgaattttgggcccacaatatattcggattagtttcctagtatgactagtctttatccactaggacttctagatttcttatatatatctcttgtaagccgcacggggagggtgcgacagcccaatgtatccactgcgtttgtaatcaactcctctatagtgatcattgccggtcggcgcccgtggtttcgctgacgtggcgctgacgtggtggtattgaccgggtctcctttacacgtggcgtttaggtggcatttagaattaaaaatatatgtgggacccatttgtcattgacaccgaaaatagattgtgggacccacgtatcccttccctctaccctccctctctctcccacggcgggcagagacggcggcgagtggtggagacggtggtgagccgcggaggcgcggcggtggcgcccaggctgagctccactgcggcgaagacggaggagaccacagcggtggcggcgggaggcacacgcggtggggtacggcgagctcggccgccgccgaccaggtctttgacgctgtaaccggcggacaggagggcaggcgggtgagggcagcggctcatggcagtgggaggacgaggggagccggcggcggtgcgagcggcggctgagggacgggggccggcgggcaggagccgccgccggcggcggcttgtggcagtgggaggacgtggggagccggctgcggga

SEQ ID NO: 9248 - DNA, 21471 bp, Oryza sativa
tcccagattcccacggcggcgaaccacacatctccgtcctctcccacggctgcgaccacccctcctttgctccgacgaccagcggcgcggatctggctgtacagcacgacctcggatcccacggcggcgactccccctcctctctgtcctctccgacgacggcgcaaggcggtgcaccatccctcctctcctcccacccccaccggcacggatcgggaggcggcgtggccggcgagcgccgtccgactcggatcgaggggcgactccctcccccttccggccggtagcgccacccccctccatctatcctcctcgtcggggcggcggctcgacgacggcgaggggagcgttgcttcgcttcggggcacggcctccccaaggcggtttggcccctctcccgcagaagccgagacggaaatagacgcaacagtccgattcggatcggagccggggggaacccggtgctatatatgccccaccaccgtcgaccgccgcagacccagggtcgtcaagtttgaaggcaacatgatgcagcaagacagcaagaggaagaggtccgtgctgccggagacggctacgttggccccgggaagcaagaggaggaggaggaaatctgtaccatcccgtcatgcggccgcgatgctacctgacgagttgctgacggaggtgtgcctgcggttgcccgtcaaatccatccttcgcttccgggctgcctgccgctcctgggacgcaatgctgtcttccgaggaatttggtcaactctacgcagcgagagccgaggagatgtcgtcagctcctaagctgctattcgtctcacctacggcaaatttcaactccaccgcggtgtacaagtgctcaccatcgaagcccaccgatgacctgctgctcacgcttgatgatgttcgcggaaactatgtggaggtgacacccgcaccatgccatggtctctccctcctgtatgatggtattgccccagcttactatgttatgaatgcaaccacacgggcagtcacacggttgccgcctttccgagatgtggcttttgccactgctggtcttgggtgcgatgcccggacgaagaagtacaaggtagtgaggctttttgaagggaacttgcttgagaaggaatttttgaagtgtgagatatacacacttgggggcgatgaaggggatatttggaggcctgccgctggtggagtacctttccggttctacagttttgctcgttctgctatttccaatgcggtgatgaacaaactgcagccacttttcttcaatggatatctgcactggttgatcaacccattgcatcacgttaaactaccaagagcttctattttatcattttctctcactgatgaaaccttcagatggatccgatcaccaccctttgtggcatctggagtgcatttggtggagcttgatggtaatctgtgtatggtccgagaccttcgtgataggtcaactgctgtttgcaagttggaaatttggaagcttaaggactataactctggtgattggtctttggatcatcgaattgatttaacagggcagttgcctagggatttacttgagccacagatagtgaaagttatcggttccgctggtagttgcagatcaggtacgaagataatcatcgccacatccaagcacaaagtttgttcctatgatcctgtttctagaactctggaaaccattacctcaatctcggagacctgcacatcctatcaaaatgagaaatctgatattagattcagtttatttaaagaatgccttaccccagtgcataaaacaagggaagagattgccttcgcaactcccttgtctaaggctactaaggagatcctactccgactcccggctgaatcagtcttgaagttcaaaccagtctgtaagcaatggcttgggctgataaagagtgaaagatttatccgtgcatactttgcacacaagaacatggacaagaggccaaaaatcatgcttgtgggtaagggctctggaaaatcacttttcaactttgttcccttaagtaaatggcttcaagaggcatccaatcaaggcacactgtttcttgacacaaaggtggtttgctccaagccttgccgtggattgaatttgatgagcttcgtggaggaggactatctgttcaacccgtgtacaggttaccacagggtctactggaacagagagtggcatcagcaccaaccatggaaaatgcctacgggttgccgtgaacaagaagacaatccttttgcagttggcaataagaatgttggtttggggttcagccaggtgattcaggatcatgttgttgtggggattttctatgaccggaaagactacaactctcgtgagtattctttaacatgttctctatggagctgtggttctggatacttcgagcaactcccgcagccacctctgcctgtgaatgacatgccacctgtctctgtggatggagtgctgtactggatgagcgaaccaaggttgggtcagagttatgaacgagccattgtgtcttttgacattgccgctaagatatttgaagtcatcccttgcccttcaagcattgcaatgtgggaccccagaagtcgctgccatgcatttgtggtggagcttctaggaaagttgtgtgctgttctttcaaattcagttgcagatgagttagatatatggaagtgggatcatggtctatggactagagcatacacaatcaatttaaaattctggccagattactcacttgcaacgaatgttgtagtgcctatggcagttgaccttacagatggaaggattctgctgaatactgggaggaagcttggtttatataatccatttgatcaaacaattgaaaacttgcttgcacttgatcaggtgtcacttgccacacctaaagtgcagcaacagcgcactggaggtcatcttaagtgccacattaccagatgcgaagatgttcctaggaagttttctccgtggaaactatctatggctccatgtgagaactttgctacacctccaagtgcctcatcagggaagaatctgttgtcctccagacaccaatatgtgaaggcactaaatagtgtgagcccaaaggttatgcctgtggttcctatgttgtatgaggagagcctaacttattatccctttgctgcccgagcgagagtgttgtttagttgaagtggtacctttgtcaaatctaccatttcatgtgtcagataggtcctccatgtttggccataccatgtcaccaagtttttataatgtaatattttgatgtttatgtcacgtagctgtcagaattatagttgtgttgcataatttatttgacttgtatttcaagcacaacttcttttgtagctttcagatcttaagcagaagggtgatgggtttgaaagcgcaactacggactcaaatgaatgttctttccttttcttttcccaatttctcacttatgtggcaacttttttctacactgatctagatcctctgactttgggttgtaaagtcacagacgtacagttctgctctatccgccgttcgttatcatccgacgatccaaaatcgtccttccaattcctttcttcttcctctgtttccttggccctgtttctgtgtagcttcacggctggccgccatggctgtcactcttggccaacaaagcacgcaatttctgccgctcaaaaggtgtaggcatgttgaaaattttcttttaaggctacagcttctgtcttaggcagattgctgttgcaacaagaaaaattgtatcccattattgttgaagcttctccctttgcacgatcttacccagggtataagaccaccgaatttgaacatcactttctcccgtatgggcatttattccatttgatggactctcatcggtacttcctccgtttcacaatataagttattctagcatttctcatattcatattgatgttaatgaatctaaataaatatatatgtctagattcattaacatcaatataaatgtgggaaatactagaatgacttagattgtgaaacggtgggaatacttaacaagctgacattttgacgacgcacctggtatcgtctccccatgtcatcagcaaactctactcgcgtggacggctatcgttccgtggatatgagatggatgatctctgttcacgcagtcacaccgctcgattcggaggccaataaggtggaggccggtgtagggacgtgggtcacgaggccgaaagattgccctgcagcgagcccctttccgttttctgcatcggccatgatgcgattgaagtttgctgcaagccgacaatggcagccggccatgaagctatgcaacgaagggagcaaggaacggaggaagaagaaagattttagaagaatgataatggacaacggagaggatccgctttctctctgtttctcctagattcctagttcctcgtttgctactactccctccatttcattatattattaaatcacttttttaagtaaaattttaatttaacttagaaaagtttaactaagtttatagaaaaatatagcaaagtttttaactcaaaagaaatatattattagaatatacttaatgttatatttaatgaaactagtttggtagtgtagatgttgttaaatttttcataaacttatcaaagccaaaagaaatttaattagaaaaaaaattaaaacgacttataatataaaatagagggactagcttttagttgcatgtatattacttttcatgtggtcacaaagttctcaaatttgtttccacgaatttgtgtgattcagtcgctaacgaaataatgtttgcagtagtgaagattaagattcgatacgcctgtctgctcactttatgcgaaaatcagggggatatgaagcaactcaaacgtacgacaatcgatttttaaaattcatatatgaactagtggtgcttcaatatctctactatctttacctatcttatcttaataataataataataataataatatataactaactaaaaaattactattttccaatagtcacatctttgcttcgttcgtcattgctttaggacgtgtcgtcgactcgtcgttcgtatcgctcacggaatccgatgtgctttgtgtatgtgtagcctgattctaccagactagtgtgtctccaagtttccagggtccaaagacttgtgttatctccaagctagtaagaaatatactactccccccgctcataatataaggattttaagtttttatttatattgtttgatcactcgtcttatttaaaatatttgtgtaaatataaaaatgaaaagttgtacttaaagtactttggataataaagtaagtcacaagaaaataaataataactccaaaattttttaaataagatgagtgatcaaacagtgcaagtaaaaactcaaaatcccttatattatgggatggagggagtactaatgtattctaccaaacttccgtacgtgagtatgtctccaaagtccaaagactaccacgtaagaaatctaatgtaatcaatcaaacagaaatattagtaattgatcacggtcttaatccgattttgtttccaagattcctacttttaatttttatatacactactacaaaatcgatttttcatacagccaaactccatttttgcaagcggttgggaagcctgcatgaaagaaaagaaaggtatgcaaaaatcggatttttcatatgagtagagcaatcacatgcgaaaatccgattttcgcatatggacgcttaagttatctgaccatgaaaatgaaaaatcacaaaaataaattctgaaaatcgattccccaaaccctaaacctaaaacactcatcgtcgtcgtcctcatcatcgccgtcgtcgttgtgcgcgtggggagcaacatccgcgctggagagggaggggcaccggatccacccctcccatcgttgccgctgccgccaccgtcgctggagcccgagccctcatccaccgccatccaagtctgagcccttccctgccgtcccccgtcggatcgtccaccaccgaaccccacgttgagctccccatcaatggatccacacccgtcgccctccccaccgccagcctcttccacccttccacccacatgccacagtcatcgtcgttgctaccgttaccgagccccaagccgccagatttgccgttattgagctccctgtcaccagatccgcaccttccggcattcccaccgctggcctctcccacccttccacctgcatgccgccgtttttgtcatcgatgttgtcgtcgagcatcacaccgccgagttccctatcgtaggatccacacctacggccctccctaccacggccattcccacctgtcgctcctgctctcatatactataagatttttagcaacaaaattatatccatatgaaagtaaatttaaatgccaatctaatggtatattttttaacaaataaattttatttcatattgtactaaatgttggttaaatgttgaatcttgaaatacgcgcgcgtcttatattatgggatggagggaatagtagttaacaacacattgaaataaaaaatgttgacaacaaaattagaacaatcgaattaaatatagtgacatcaattcaaaaatcaggcatcatataaataaacaacccccaaaaaaaaccacataagtaagagaaattttttttaaaaaaatacagatccaccgctgacctacgccttctttgagaaaggaggaaatggcacgggcgcctacaaaaggaggaggtagtgcccacgagcatcaggagtggaggctggagtagggaaggagacgacatcattgtcactggcttggagtagtagcggcggctggtggtggacgttgcagccctgttgttggcactggagtagaggaggcatcgagtggcggctggctacgacgcggccccgctgcggcggtgggtattgggcgccaacacgaacgatgacctcaaaaaagcaagacatgggagcgccacatcaaccaagaggtgtggatgggatgagagtggtagctacatgtttgacttgtcacttcgtgtggcctccatggtagtctagggtttacttcgcacccgggcctattgggctagatgaattagggtgtgtttagatcctaaaaacttttagctaaaaatatcacatcaaatatttagacacatgcatggagcattaaatatgaacgagaaaaaccaattatacagtttgcatgtaaattacgagatgaatcttttgagtctaattgcgccatgatttgataatgtgatgctacagtaaacatttgctaataacggattaattatgcttaataaatttgtctcgcagtttacagacagaatctataatttattttgttattagtctacgtttaatatttcaaatatttatccatacatataaaaaaaatttggccaagaactaaacacggccttaatgcttcttgttcttcgttgtgtccagtcatgactgcattaactaccattaattcatctacacaatttaaatatgactattaataaaaatacattgattatcaataataaaaccacttcggtagaaatataagtcggtattgagctcaacgtagctgtcgtgccaattgaaataatatgatatttcttgtatatgtataattaaatttttatttatccgatgcaatgtgcgggaatttagctagtctatttcctttcgtcacatggctctcttcggggctatttggatgacttccatagcttaccacaaaatatttggcaaagtgtggcatgccacacattatatgactaaaaatttgttggccacaattatgacaagctatggcaaaaaaaccacccaatgacaagtgggtcagcttgctaaaaaattatggcataactcacttgtggcatgaactaaatactagacttaattggtcaaacttaattgccacaactttagcaaatgttggtacccaactaaacagccctttcgtccggtgtccgatcgagtgtcccacttgtgcacgcgcccaccgcccacgcgtcagattgggagaacgttatggccgggcgcgcacaggaggccatgtctccagagcacagacccacgtagagcgattcgagattacggcgtacccgtgcagaagtaggaaggaaacgcgggatcgcatctgcgtcagttcagaccggtcacaaaccacagctttgctacccttgaatcaaacacgccaataaaatctccctgccttgcacgtatatctggaaaactcaattggatatcccctcatttttatacgtcgcttaaaaaatcataaaaacaatttgaaaacaattagtatgataaattaatatgtgatatgtcactttacaaacatgcaaattcaaattccacttatataagtagaaacaaaaacaataaattttactttgaatagaacacgtaattcacggtcaaatttgtttttttttcaaattgtgtaagttgaattttaattcgcatgtttgcaaaaaagatatatcatatattgttctattttgatattttttttaattttttttgataactttttgaacaacagagacacagcaacgaggggatgccctcctcgagggaaaaaaaatccacttccgatatatcggcctcctgggacaagattcttggagcatctccaggctcaagtgccaccctcgcagcgcgtacttctctttcccctccggtgctttgatcagcagctgccgtagcgccagtgtgccagcagcaaatcgcggcagcccggcccggtcggtcgtgcctcgtgaagttccctgctcttcaccatgccgccatgccggcagtgtttgagtcgagtcgaacctcggggacggaatactccagctcagagccctgcgtcgccccgcactagccgtcgcctcagcccgtcaacagtttgagctcgagcctcgaggctgtacccatggcgtctccgagactgggttgggggtggtgatcgaggtgagcagcgacgccgacgcaggggatcgggcgtgcaaacatggccgggtcggtggaagcctcggcctgcgatgtgaaggctaacgatgacatggtgtacagtggagggacactggaaggccaatgagcagaagcagaaagacgaggacacgaaagatcagaagcgagcgcatgttcttgaggttactcttgttaggtcagaccgtcagataaaaaatgtgttcttgattgtgtcgtggtttagatcgttgtttggattgtttgatagtacccaaccatagttggtgattcatatatattatatataccataggaaaacaaaacacatgaatgcacaagtataaaacagaagattagaaaatatgggaaactttatgtagatgagttgtttggaatacaagaattttatttaaactaacaagacaataagtttcagtttatggttttataaacttattgacctcattttccctttactttaatttgttttcctttcatttgtttggtactagaatataatagaatacagaaacacaggagttgttttcaaaggaattcgagggtccattcctttcttttgttttgtactagaatactaatagaatacagaaacatagaagttgcttccaaagaaattctagggtccattcctccattccgaacagccttataggaaaaaaaaaatatactatggtcctcagttctattgatttttctttggaaatcctccatcccaaacatgcccttaattattgatctgaaaatgttttgtcattgttttctttcctagctgtttcctcgatcaaattatttgatgtttattttgattttaaattttccccgttgcattgcatggacatcctttctagtatctctatctctatttttttaatctttacctattatataaaatttcaaggtgtttttgcctataaatttcgtacgtcgcccaactcattgcccacatataagcatatttttctgtccgatttcctttttcaccgcgcgtgtgtacgtcgtacctgttattttttcttcgtccgattctcttcccacgatttccaaatcgcgtggcgtctaggcccatgtcggcccttgtccagatccctcacaaaacctacgagtccgccgtctcctcgcttgcccgcctcatcggagcctccgtagaaaacaaattagagacctgttgaaacctctggattgtcgacgtgtggataaataactcttccaacggcttcccgatcggctccaggcgaacgtgttgttccgcttgaaccctgcctccctcgtcttgctcagctcctactctcctagggctcggagaagcgattccactctgcctgcgcttggttcgtcgcgttgcggctgatggagtgatggtgaacgagggttctattcactttgatgtcattttaaacaatactatttttttaagtaaatttgacaagaatatacatatgtttagtttcttaccaaattttggaaaatataccagaaatttggtaactacacagtaatgaccaaaatttagtagcatgtacgttggcaacaaagtaagcacatccaaaatagctatcttaccaaaatttgataatattgccaaccttactaaaattttggtattgccagaaattgataaggtttaaaatgacattaaagtgaacagggccgagaaggcggtgatgaagctcgccacccgccgttttcttcttcccaagactcaccagctgtcgatgctgatctagatactagcttcgtgaggttaattaatccattcaccgtcgtgggccgaccgagtctcccataacacgaattaagtttgcggcagcacccagcattccagcatgcactgcagagaatcagtcttagaggcaaaatgaatggcaaatagaaccaggagcacggcagccgctgataccctcatctctggtcgccatgaagcgtcattgatgctcttagcctcttaccatgcatgctcgtcctcggtggccagccacttgccgagccttccgatctcctccaccctcctccagtactgctctgcggatgttctatttagttcacatcaaaattaaaagtttgattgaaattggaatgttgtgatggaaagattagaaatttgtgtgtatagtaaagtttcgatgtgatgaaaaagttgtaagtttgaaaaaaaagttaggaactaaggatacattagtcccaggactaggactaaagtttagccccaagactaaaacattagtcctttttagtcatagcctgtttggttgaagggactaaatagtactaaaatggtagcccgcaccagatcctccatggcctgaggcagctagcgtggggtagcggcgtgagcttgcgcacggcggcggaggcggcggctgcgggagctcgcgcgcgacggcgtcggtgggagctcgagcgcgacggaggcggcaggccgcgtgagctcgcggcttaggtggcaggccgcgtgagctcgcggcgtcggcggcggccgcgggagctcgcgcgcggcggcgttggcagcggcgtgagcttgcgccttgcgccggatggggagagcggagtagtcgagtagtacaggagagagaatgaagtgagagagagagagagtgaagtgagagcgagagcaacaggatagggttgggatcgcttttctataggtttttagcctatgctgttttagtctgtttaagtccctcccgtttggtagtttagaggctaaaagggacttatcataagtccctccaaccaaacaccacctgatccaggcctagttgccgctgccgcatcctcctgtcccggccaccacaggtgcgtcatccacctttccgggcgcagctagcgaaggtgcgcgtggtggggtagagggagaggtaataggttatgagagagcgaagtatttggtagtggggcggcgctggctgcttgtcataatgtcatggcctgacactaggatcttgtcgatcggtgtggttcagtttgctgtaagagcaggtacaatagcgctattagccagctataaacatattttaataagataaatgataaaagcaagtataatagtaggttataagtcagctataaatatatttaatgagataaatgataagagcaagtataatagtaggctataagcttacgtggaggaaagagaatttgaaaaatgaagagggttgactctcatgcaagagctatctattcacatacttcaagataaatacattaaatgtatatgtgagagatagagagaggaggagaaaaaaaagataaccttacagctcatttactatacatgttaactctaatataagctataagctcatagttggctctattattaaacttactctaagagcacccgcaatgataaagtaaggtgctctctataaaacatgtacatctcagcaatagactagattaatagtaaaccacctcaatagtatgtctacatgggtatctatagctctctaatgcattgcctcgtttttctctatagactatctccaggttagtagatagctttgtgctctctctctctctctctcttcatttaatctcttccaagtaggaaaatatgctgacatggatatcttgtagagagcctatagataaccattgcgggtgccctaagagagaagagcagcgggctacagatctgtagccagctgcagcacggactctaagacacactgtgtgtatgataggtgggaccatatattaatagtttagtaagcaaccattgtatgatttggctattaaagcaagtttaatagtatagccaactactagctccaattcatatatagccaatctagtagctcatttatacaatagttacatactccctccatttcataatataaggcacgaccactttttttcagatattccataatataaggcatgcatgcatataggccattaactatgaccctttcttcattaaattattacttttttaaatcctccactcttatgttctctaattctattggatgcatgcattgtatttattaggatgattaactacaagatgataataattattttcttggtctttgggttagagttggttatgccttatattttggaatggagggagtactaaactattaatacctggtaccacatgtcatacacacactgcgtcttggagtccgtgctacagcttgtaaatctgtaggccgctgctcttctctctcctcatttatctccttaaaatatatttgcagttgacttgtctgctattgtatctgctcttagattttctatgatgacgctctctctcgtggcccgatcttctggtgaggggataactcttgctttgatcgagtgtgacgtttgcgacgtggctaccaaccagaacaagtccaggatgccgtgcaatcgctacaccacaaacgatgtcgtaccaaccgtgacgcgcggttgatgatccctgcaatgcaaacgagagaacactgcaagaacaagataagatgcaatctaaatattgcgaataggtaattaagcacaaaggaatagttgcgattgaggtggctctgaatcaacacaccaactattgggggctctgaatctatagtcgtcgactaatcgagcgaggactagagacaaggtgaatggcacttggcaaaattcaactaaacaaaacccaattgtttttgacgatgtacaaagctatttataggggaaaataaagctagggttaagtgctaattcatggaggtggagggagacacttccgagatgggcctagtctattacaaggcccaaggcctaagttcggtttcaacaacagcactgtcttattttggcaattcccgttgactcgagatgaatttggacatgacaccggatgcatttgaaaggtagcgagataaactttctatgaagtccaagaccacctaaatcggagttggcatgaaggcgctaggtccgtttgaagtaagtgctgtctccggaggatttgtttaatctgtttgtgcataatttttgttagttacagaccggtaggtgctatatgtatgtgtggatggatggatccaagctagcaagcaagccatttgacggaattgttgtgaaaaatactttcaccggtggacatctgattctggaacatcagaaaggcattattcccagtgtttagagtttagacctggtaattcgtttgagctgaattttcattttttttccctatacaaacattagtattgtacccgtgctttgctttgcaatctcaaaactcaaatatataatatatacaactattctgagttaaaaaaataactataatctactctaaattaggtcagaaggtattagtttgtgactagggttgtgtttagttccacaccaaaattaaaagtttgaagaagttgaaacgatgtggtggaaaagctggaagtttgtgtgtgtaggaaagttcgatgtgacggaaaagttagaagtttaaagaaaaaagatggaatctaaacagggcctaaattatagtgactgcaaacacacgcatggcctaaaatttgtgacgccatggtgatgcctgtttctggacgtgatgcaagaatgcgtggaaatcgaagttgatgaaaaaaccattgttgtggaagacggaatatgcttttcggacgaaaagggtaccgttcactgattaatcataatacaagattaataagaactatgtggaaattttatgttggcaaatatgacgttgccaagtacgtactttggacatttaaatggttacaacaatataaattgaatatattaatgttatcttttaattgaatacttataattaacatcaacttaaaatatagtttccaacagtcaattcaaacagcaaacaatggtatgtttggttatattcaataagtaaaacataacagaatataagaaatactaaacaaagtccaaaaacaactttggatcgtcatcaaatacacatgccacgaacaattaaacggaagatggtggattaattgctaaaattaaaattttaatgttcatgaaaaataaatgttgagcgtaccacgataataaacggttttgttactgcggacatatatatgtacatccgtttaatcggtcagtacgactgttctccacaaccctgccaaaaatatgtgctattcttcctaagattcgcatggactcgtaccactcttttaagttcctatcacatcgaatgtttggacactaattataaatattaaacatagagtattaataaaacccatctataattttagactgattcgcgagacgaatctatcgagcctaattaagccatgattagcctatgtgatgctacagtaaacattctctaattttggattaattaggcttaaaaaatttgtttcgcaaattagtttttatttatgtaattagttttgtaagtagtttatatttaatattctaaattagtgtctaaatacagagattaaaggtaagtccatagatccaaacaccacctcacactgtcacacaactactcaattaattttaacagctgcagctagaggcgacaagtgagggccctggcaggattcggtagaagtctgccaaagagaaatcagtggctcatgaaaagagagattgaagcagagctaagctagggcagttggtgtgaagtgagataaattaatccaatcatccctttaagatcaaaaggaacacgcgatttctcattgttcggcgaattattgttgggaaatggttatcagcggttttcaacctctctttctcacagcatgaacaaaacaacttaatagagcagaaaacccatacacaaatctatattcattttaaagactataattatgatggtgaatctaccatcacccgccacagatatagtatcatcgtccttcattcactttcacactgaccaatcaattgccacacctagctctttcacctagctcccgacgccctgatccgtgcagcttggaagatccaccgcgatgctgggaacataccaggacttgtcattgtcgatctgcgccattgcttgctactccatcaccatgggaaaatccacccatcaccctaggcagatctgccatcgaggctgcgctagagagcttgtcgatgtgccgcctcgatctacaccatgttgtctcaatgtgcacctatgctgccttgatccacaccatttggaggtccaccggtctacggtgccctgattctcactacccatagctctgtcggcccctatcacgctgatcagtgaggaggggagctcgagaccaccaccgtgaatgtctccgagtatgagcgccccacacgactagctagagtagcttctcttgctcgttcttggtggcgccgccagagagagggtgtttggagagaatttaaattcaaatctctccgcccagggaagtaaaataaaataatatgtgcggacgtgccagtgtactaagtaaaaaaaataaaatggacgaaggaaaatgcattttattataattctcaaagaattacaaaaaatacaaaatccttagtcaaatgcgctccatagcctataggcaaggtggatctgacttggcgattatgtggtcctagttttcggggtctcggaaaacacccggttagttactctcacgggttgaacccgcgagacacctccgattaagctgtgctagtcgtcgtcatcgatattagcttcatgttctcccatgcaaggtgcggatgtggtgagggtgtaagtgggcgccggcagtgttcgcggccttgtcggtccacgcgccattgtcggtgacgtcgtctcgatgtaaactccgcccacccatccatccaaccttgtcggtcatgatggcgttaacaccggtgatgccgccgaacacgtcagtggcagccgtgaaaagactatcggtaatgatgccggtggtagtgccgaactcgagagcatgaagaagtcatcagtatgtgtatgaatattgctaggagcaacaaagacaccagtggagatgccaagcttgtggtcactggcagttggggtagcatcgcccttctagtttccacggcaatggccgaccatcgtcatggtacaatggtcagtcgtctgatcactgcagtaaacacttagtattgagtagttttaggggatgttaggggcgtagcctagcctggaaacgatgagatgcgttccaggagtggggtggccctcttgtatatgcgccgacaatcggggccggactcaaatgatgttgagccacctccgatcgtaacggcttgactcgggagtgagccgatggttgccacaaagaagccgtcagtgtataggcgctgtggagtgacagagacaccggtagggatgccgagctcgtgatcactagacggtgaggtgaggattcatatgatgatgacgccgttggcggcgacgagttggaggacttcgccatcagcaaacaagcagtaaatggcgggtcatatatataaatataagggtttcgtcatcgaacggacgaggttggcgagcatgacgccgtcgtcgttggcatgaggatgactctagccgtgacgatgaacgcgaggttatcagcagccggcggcgacgccaagcacgttcttttttaacagccggcggctccaaacttgcacgttggcgacaaatgcatgattggcgctggcaacgacgacaaggccgggcttgccatcggcggagaaacaatcggcgtaggcgatgatgaccaagaacaggttcaccattggtgatatccgcgaggataaatgtatgctaatgattgatgacgaagacgagggttcttccggtttctggccgagatcgcatcacctcggcgtcaatgacaatcatgaaaacgccctggccgtgcaggtctgagagtatgaccggcgacggcgacgagtcatcaatcatcatcgatgacggtgtatatatataaatattttgtcatggagcggtcaaggccggcgagtatgacgccgtagctgttagtacgaggatgatcccgacgtgccgaagcgaaagcgtcgtggacggaaggcacgacgacctcggccagctgaagcgaagggatcatggctggactcggcaacggcgtgcgggcaccaagcaatagcgctccggcgttgtcctcgggccgctcgacaattgtaacatgaggaagattgtagcgccggcgacggtgaggtgttggccgcgtcgcgaggcagaggctgccgtcagcacagtaaggacgcctggcatctcgatgacgtcgcagcgccaggatgtgtcaccggcggccggagtttccgacgggatggagcagcacaacctcgggcgggatggtttgacagcttccacagcagcttgatatgacggcgatctccaccgaggtagcccatatttcattatcttggacggtgtctcaggaactcagacatgcagcaactgtgacacctcgtgtctctcgtcgccatctcgtgcatgcatgatgatctgaacagaaagagaagaaaaacaagaagaaaactaaggagctatacccatggtgatgactgagtacgggctccccagtgatcgtctcctccttagcgtgcctcctcagcgcacgcgcctcctcgccggacgccgaggtactgcggccaacatcaccggccgccgagctcacgcgttcccgccggacgccgagatactacggcaagcacatggatgaacgcagtgagccagtgtgatgagtcctcgcctccaacacaaagtcacaactcggtcacaacggacggaaaaaagaagattccggaatgacccatgggtgtctcatgcgccttggccttatctctcgtacgtgcttgggcccacatgagatactcacagccacagctgtgcccaagtttgaaaaaaatgtgaccccgtagttaatggctaccaagtttttaattatagatagataaataataatctgtacaattttttttagggaaacactgtaggggaagcccccacagttaatattaaattaaaaaaaggaatacaaataatttacaaaatatttatccactaagataaagcttgtctcttataaacttttaatctgtacaactttacagtgaaattaaaaccatatggcctgatcatcatcggcaattcggcgtacgtgtcacgtttcaaatacgatcaggccaggcggtgtactgctcgcctctgatctctctctcctttgcaaagcgatcgtatcagcgttttggctcatgcatgcatgtatacgttgcagcgcagagtgcgttcactactcgaaaagcaaaaggaaaaggcagccaaattttggtcatctctcggatccctcatctctatagtccaaaccggagttaagtgtgtgggaggtatagtagtacctgtgacgcctgtgtgattttaactgcgattaagttatgtattatgtggtagctcggtttttgtgatcagtaacctaggagtactaacctgtgagtagaaacagtttcgttaattagcacatgaatgtacctacatgcagcaaaatggagtagtaccctggaagaagagctgcacaggaggcggtcctcacacaaaaacacacacactctctctctctctgtgtgtaggggagaggttggtggtggactggtagtcaagcaaatgcatgcacacaccatatctgcctccgatgcgttgtgccgtagcggtttccgcgggaggaaggggaggggacagcggctggaggcagcagcgtacaccgcggcgaaaagcaaaagggagggatgggagcctgggaggtgatccgatcggccagggctggcactggcaaagtgacaagttgtgtgtgtgcgcgcgtgtgtgtgagagagagaggggttgtgacccaggcgtggcgctgcgtagtactccctccatcatataatatataagaatttttaagtttttcttaaacaaccactcgtcttatttaaaaaatttatactaatataaaaaacgaaaagttgtgcttaaaatactttgaataataaaataagtcaaaaaaataaataataatttcaaaattttttgaataagacgagtggtcaagcagtgcaagcaaaaactcaaaatctcttatattatgggacggaggaagtacccagatgccgcgcgagggccttgccagcgccgatcccgacccctgcgaccactaggccgaccgctgctgcgcccaagatggagaaggcggcgccgaccccagctactctgcggaggagccagaggacgactgctcagaaggccgcttctctagtgcatgccgccaccactcttgcgtctccgctagcctgccaccgctccgctcgccgcgggagagagggagggaggagggagaaggaggcgatgagggagaaaggacaggagggaggaggggagagaaagagagatgtaagggagagagaaggactcacatgttagtgggtcccatgatataatttttgaatgacaactggatccatgcatattttttaattccaatgtcacctaagcgccacgtcaatacctaagtgccattgtgctattggtggttcattaaaaatggatgcctccacattaatttaaatggaccttgacgctgagctataatgactcagcaaatccatgccaccttcgattagagtttagcatcaatgaagttggcgctaagacgttataggtcagcgccaaggtccttagcgttgagtcgacgacctatttttggttgaagttttttgcaaggaccagtttcaaaataagtttttgagaaagatcaatttgtccaaaaaaagggcacatttgaagtattgaacataggctaataataaaaaacatacatattccgcttgtaaattacgagacgaatttattaagcctaattaatttatcattagtaaatgtttactgtagcgccacattatcaaatcatagcgtaattaggctcaaaagatttgtctcacaatttaattacaaactatgcaattgatttttttcgcatttgatgtgatggaatttttgaaagtttgaatggaactcaaaacaacctatgctggaaagtagggctcccatcggatggcctattcagctaaagtaaaagccaaactttaaattttcaaacttaattttaacattgattttgagatattttcaacgtagtttctttttcaatatcagcttttaaatcatcaagaacacatatataaaagttatatctataaatttacttttattctctaatgagctaattacgaaaaaagccacacgatgagatgaggccctagctttccaatctcctcccttgttcagtcctggaggcctcgtcgatccattaatgaatggaggtgggccccatgggtagacctcgttgatccattaatgaatcgaggtgggccccatgggcaagggaagtatatgcatcgttgatccattaatgaaaggttcagattgaaagctaaagcagaggatgccgatccgtggggatagtattggaggagtactagtagaagatcaaaaaaagtactacctccgtcccaaaataagtgca

SEQ ID NO: 9249 - DNA, 13186 bp, Oryza sativa
atcggatgtacacagccaagaatactcgtttttatacgccgacatgccaccacgacatcatagaaactgactatggaaggatccttctagtcttccctaaccattcaaaccaatctaaggttggagatcccgcacatggcacacctatcaggtaggctatcatccttgtgctacgttagattcggaagtcgattagcattgattctcggttcgccctaactccacatccatcctcgccttggtgcctatgagagagctgagctatactataagtctagccattatccacactgacttatggtaagtacaataatttctcacaagagttttcgtgaattgtggtaagtgagatagtatctcaaggccattccctatgagtcttaggtagcccggcgttgcctccccctcaatggatgccataaatcccctttaatgcacaataattcgatttagggttttttgtttataataaaaaaatagtgaatattctaaaaatcatgactaaattcatatgaactccagtaaattctaaaaatgccaaaagtccaactaattataaattggtttcatgtgttgtttcattatattctaacgtttccgaagcgccattgtacttcgagatcatcgcaaaggtccaagtgtagagcaaggcaagttatactattgttcttgactctattctacgtgaattaagcaaatgttttgcttacttgaagtaagcattcattgtttcacaatttcacatgggatgtcaatgacctatatgtagttgtaagctatagttcgaatactatcatttcctcgatgacttgggtaacatgtgactagatgtttgcctaggatggttagatcaactagctcactattgggataattacctctctattttatacctaggaattaattaatggtgacactttgcacatggttcatgaggatgactaatccaactaaaagatgactaaatggtgagttttcggtgcatggttttgttgacgcatctatagcaattaaggactaattcgtcagaaacccttgtaaaatattattgtacttagcacgccagcgtgatcaatggttgggcttataatacagctcgctcctctcccaggcaccaaggtgagggtgggcatgatggagttgcgttggaccagggaacaagtcctgtcaatttctatgttcggcaatataatttatagggtgcacaagatcaaagagagatggtgacacagatttatactggttcaggccctcgagtgaggtaataccctagtgcagttggtgtagattggatctatgtcgagaggtgcggagatcagcaatggagtggctgatggcacgtgtaatggagtgtgtgagtaactcttcagggttcttgccgaagccctttatataacgttagggcttccggcggcatgcatgtcacaatatcccttataatctgggtacgtgcaatctatttacatgggattggataatatttcttatctcttatcccttcctatacatttttttttgtggggacccttcctatacattaaggatagccgcatggacctggctactcggcctgctctatgtgacacggcacaaaggccttccgtgaggtacccgggtatcgtgccctccacaggtgttgatcgacttttaagtccacagtggtgcaagggatatttcatttactttgagtcgttatatgcatgtggtagcttgatagctacttagttaaagcagtttttatccatatcatctcggaacctccggagaattgactgaaacctaaggttccaaacaattgaccggagactttgagaaataatttaatccgctacaaaagtttgtttaaatttcagttttcgcctattcactcctctctaggctttacaagggactttcagcatccacacaataaaaggtagagttgagcctatcggttatatggagaaaacattaaaaaattgaggatgatgtagagaatataaacaaaagacaaggtagaaactaactgcaagtttatatgcaaatatagcatgtctaattccctcctcatatgtgcaccacacattataatcaacatccaacttggtatgatcatccaatcttggttcgcaaacaccagaagagattgtgcatacatgagcgttttataagtttgtacactaaattacatccaactaacaaattcatatgccatcaatgcaatttgctaacaatgagtttaatagcaaaatgctatactttctatgggtaaattgacactcattttgatgtttgtccattgacaatacaggaaactattctaaactctcgagagaatatcctctcattgtttgcatgtcatccaaatgattataattttctttttaaaaaataagcaagataaattaatatgtgataaatcactccacaagcatgcaaggttaaatttaacttcaacatgttgcaatgagaaaaaaaacaaatttgactatgaatatatgttaactagcttttttttttgcagattgtggaagttaaaatttaacttacatgtttatgcagtgatatatcatatattaatcaattttcttaatttttcataactatttgtatgacatgcaaacaataatgggatatcctttggagagtttaaaatccactccattgacgatatattgtaatactagcataatgctcatgctttgctccatgtaaaggaatatatattatgacagtattatagataaaacatattttttatcgaaaatatatcagtatcacttgtttgcttattatttacatatatggtattcacttatttaaaacgagaaccctagccctagcaaaaccgggccgggctgggccgggcttcactgctttacaagagccagcttagtgaacctaataattctgctcctgtcctccttatcctgatcagtcctcggtcggcttttcctctctctctctctctctctcataaaacagagacctttaatgcgtcgtgatctctcccctccaatcccgacaaagtacacacaccatcgtctccccctcctgcctcgatgctagctctcccattcccatctctccactctccctcctatcatatgctcctcccttctccactcttcttctcaaatcctctctcttcctcttcgtcctcctcctcttgcaaccaaaaaacaccataaaatagtaatcccaatccacaagctcacctctctcttgcacacacacacacctgacacaacacttacacatcataccagaagaaaaaccaattcgattttgccaaattacctagctatagcatataggtaggtagctaggtagcttggttttccctaatagctctagcttgatctctttctagctctaccggcggcgtggcggcggcggcggcggccgcaccactctacatcatcacgtacacctgaccagcttagcgggaagccccacaagaagagtttgtaggtcaccaatcagatcatcagttcatctttgtggttgtgtgggtgtgtgtgtatatatataccatggcgtgagagtagccatggatgtcaccggagacggcggaggaggagggcaacggcccaatttccccctgcagctcctcgggaagaaggaggagcagacgtgctcgacgtcgcagactgccggggcgggcggcggcggcgtcgtgggcgcgaatgggtcggcggcggcggcgccgccgaagcggacgtcgacgaaggaccggcacacgaaggtggacgggcgggggcggcgcatccggatgccggcgatctgcgccgcgcgggtgttccagctgacgcgggagctcgggcacaagaccgacggcgagaccatcgagtggctgctgcagcaggcggagccggcggtgatcgcggcgaccgggacgggcaccatcccggccaacttcacctccctcaacatctccctccgctcctccggctcgtcgctctccatcccttctcacctccgccttgccggcttggctggccctcgcttcggcggcggcgcgcgggcggcggacgcgtgggaccgcgtcgtcggcctcgggttcggcggtgcggccgacgccccgtcctccgccacctcctcctcctcgtcgccgcttctgctgagcttccactccggtagcgtcggccttgacgtgtcgccgccgtcggcgtcgacctccccggccgccgccgacctctcccggaagcggcggtgggagcaagaaatgcagcagcagcagcagtaccagcagcagatggccgggtacacgcagagccaaattcctgcgggcacggtgtggatggtgccgagcagcaacgcgcaggccgccggtggcggcgctccgccgggaggcggcggcgagtcgatttggacgttcccgcagtcagggagcggcggcggcggcggcgcggcgacagtgtaccgtggcgtgccaagcggactacatttcatgaacttcccggcgacaccaatggcgctgctccccggcgggcagcagctcggcctcgccggcgccggcgggggtggcgaggggcacccggggatcctcgccgcgctcaatgcctaccgcgcacaggccgcgcagccggacgccggcgcggcggcgcagaatggagcgcaaggctcaagtcagcatcgtcagcatcagcatcacggcggcggcggcggcggcggcgacgagcggcatgagagcatgagcgccagcgactcgtagggcttccgttccgtccggtgtgtgccccgcattttctctggttttgatctgttcttctttaattttctccgtttttgtttgagttgttgtctactaatgtctatggctttcttcctcgacccatcatatattcatgcaaggatcatacagttgcattccatgccatctgcataaaaatatcttattgtgtgctcttaagaatggatcaccaatttcaccatgataaagctcttgcaagttgcaagtggtagggtttggttagaatgctagagaaccttttttttaaaaaaaatgaaaatgagaatgctagagaacctagaatcattaatcaataaatcattgctttggtatattgatcgatcgatgaggattatccaccaactaatcctcatccaatgcatgcatgcaagctagctagcatccattcgatctgccactctaaataatttcttgttggttatctattgcgtacacatttcatacatcttttctctgtcaccgtatatagcttttgcaagacaaaagtttttcattcgaattgtactaccggcatgcatgcatataacctcgacaaagttcctttcatttgaatgcatatgcagtgcacggttctactagctagctagcggttggccgggcggcaaaggttgccaaaaaccaagacaaggtagcacggtagcaatcagggattgcattgggttaatccgagggtaagcatcgacgacgaacttcatcaatcaaatataatttttaaaatagtttaacagtgaagaaaaatagatctactttctacaatccagctactaccagtggcccactcctttacagtcgtgggaacacacgttttcaaatgtgggggcactcttactaatttgcagaatatgcttatatttatagtcacgtgtcaaagttccagtgggcataacactattagtatcataggagttagatagtgattttatgaagaaaaacatagccttaagttaaatagtactacctctactagcggtgacaattagtcaattagtcatccgctggtcagaggatgggttaatccatcgagagctaggaatatccttgacttgtttttaatcacctgtcaaacttgatacaaatagttaaaaaagttcaaaaacaacattgaaatatagacttcagcaaaattcaagtttacacttaatctacctacacatcaagaaaaatttgaacaaatttctgtgtgaatagcagctaggtattgttcatatatatgatgtatttgtttttttccttcctcggtgtgtcatcagtctagtttagacttgatatttttgttgctagcatgcatgtatatcttttccgcaaatacgtccataacacatttcactaaattcttattgaaagcacacctacatattcacaacattcatgtacaataaaatttgaatccgtggttgaaatcatgtacccacacgactttaccgtcacaccactagtacgtcccacaaccatacatgtatatatcaatgttacttcctccgtttcacaatgtaagtcattataatattttctacatttatattgatgccaataaatttagatagatatatatatatgtctagatttattggcatcaatataaatatggaaaatgctagaatgacttacattgtgaaacggagggagtaccaaatatttccagaacatctggaaattgtccgcgcgtcgtatcttcggagtggaggaacgtacgtacgtgggtggggattttgtaatatggagagctagcttaggttatatatccagtacccccgatcgaggcaccaaccaccaacaccaagccatccatccgactatccgtgagcacaccgaggcccccaacgccgactgatccccaccccccaccgcgaggcggcgcgcgtacgtctcaccgatcgagcgaaacgaaacgaaacgctgcctgccacggtgcatgcgcgcccggcggcccgtgcgcccgcgggatggatgggtagatgcgggcggccccgcgcgtacgtacgggacgggaggaagagatcgtacatcgcgcgagcgagcgcgaccggcccacgcgcgcctactggcgctggctggctgcaaaccgatctcgcgatcgatagcgcgcggggagatggagcgggaagcgcgtggtccacgcctttctccgccagcgcgcaagcgcaaacggagcccctgtgcccgcccgcctgcaggtgcaggggggcactgtcgcgccggtctcccccgcggctagctagcttcatcaatacaatcgcccgcctgcgcggacgtacactgcaggtggagggccggagcatgtaccccgcatcgcatcgcgcatgcatgctatgctatgctccaccaaagggtacgttacgtatatatatcagccgggcgagacacgtacgtttgcatatattttgcggacaattattacccctttggatcgatggaatttaattagtactgttttcatctcagaataaattaatatatttatagaagattggagatagattagcaacacacacacaaatgatcacaatgaacctatttaataaccacactgcattttctataatatatatacgtaaacttcttttattaggcgatgggaacggaaagatggtgggtaggagggagtatatcttcatctaattaatttgttgggttccacactttattaaaaaaataacttttttttataaattcgaatggtagaattcaattattccgggatggagctagtagggaatatgaaggaattgaatctgttggtaaaaaaaattctttgagaggcttttggatggtagggttccctcatagaaaattttgagaaactattactatatacatatatacgactcaaaccgtccaactggatttgatcaatggttgcagtgtatataaacatatgtttctttgttatttgcatatccctaattgtacatgagttatacaactaggttgtacatatagcagtactcgaaattttatatgttaggaaaaattctttcacattttgtataaattcttctagcaaattaattgctttgaaagtttcaatatacctatctctcccttctctctctctgataaatgaacacataatcttatattttctccacttttcgatcgtacgaggcatccaaataactattttgtgtaatacttgcggttttgtttcctgctacaagaaacaagttataacattttaatcatatatctttttatactaattcctgtattttaaggaacccggtttcttcgactagtgtggttggcactagcttgaccagctaattgaattggtgacacgtttgtgcatggatgcggtcattgatgaacatgaagacgatcgatcgagagactacgcgtcgttgcctcgttggggttggccacataatgagctacaatgtggtgactgcacaagtgcacagtttatgtgcgtgcaggtgggagggaggaaagaggggagagaggtgagaggatgaggccaataacgtgcgtgctggagctgtcggttgttctctgcgccaaattggagccgtcacatgtccggctgattggccgcattgagtggccttgcctagctagtggccgcagcacgtagcagcagcagctgctgcagcgccctaaacacaccagtgaagcacatgtgtcgtgcctcgccttgtctccctaatactgccactcgtttcgagctagcagcttagagctaacacatctctggaaaagtattagttcaaaaaaaaactctagaaaagtgattatgatcccatcaattaaccaagagttggttataaatcaaaacgggtggacggtgatggcaacacacccagggacatctaggaaaggagtccacactactaccctaatgttcctacttcctagtgacatgggagatctagaaaaaaaaacaaagggtatttcagctcaacgaactctcaatgctatccctctctgtgaagataaaagaagaggctagcccagatcatcccttagagcatctccagcagggacactaaatatagcccctaaacagattttggatgttgaggctaagagcatctccagcaatagctcctattttacagcccctaaaaatttaatgggggcttcccccattttctaagtacctaaaaaatatctttaactccagcagcagtcccttttctcgccccttatttcatttcatcttctattttaacatatactttaaagtacaaatctatagttctatactctagctactcctagtataaaaccataataatccaaccatatttaaattcacaattcaaattcgattcttttagaaaaaataaaatggaaatgcaaatcctagtagcatgtattcatagctcgggtgaaacgagcttctgctgctgtggcgcttccatgcattttctcacatgtgttgatttttcccgtcttctcatccaccaatagaccagctacttctctcacgaagcaacaaccaagcaaagcaacaaaaaagctgcatagcacatcgcatgtatcactttccccattcttctaagtcccacaatcgcagctgctagtgctaccctgctactactttctcaatttcgcagcctgcaacaacacttgaatcatccagtgcctcgacgccatcgcatgactcggccactgggccatgtttttcatcgagttcaggtagagggtgcaggctagaggagactccaggtacagcagacgcgtcggccgggaaggagcgttgggtagaggaatgcacctgagggatgacatggtaggcagggaggagccgcaccggccggggatgagcactgggcaggggaggtgccggtggaccaagaccacgtcgggcggctcccgcgcttttccaaccgtggatgggggctgtgcagtagagcccctgagactaggggctaggaaaggttatttgggtgcctacctaatttaggatccttgataggggctctgctggattgagttttttagcctcaacacccaaaatctgtttaggggctatatttagtgtccctgctagagatgctctaactgtttgcttggttgttgcttcgtgagagaagtagctggtctattggtggatgagaagacgggaaaaatcaacacatgtgagaaaatgcatggaagcgccacagcagcagaagctcgtttcacccgagctatgaatacatgctactaggatttgtatttccattttattttttttaaaagaatcgaatttgaattgtaaatttaaatatggttggattattatggttttatactaggagtagcgtagagtatagaactatagatttgtactttaaagtatatgttaaaatagaagatgaaatgaaataaggggcgagaaaagggactgctgctggagttaaaggtattttttaggtacttagaaaatggggaaagcccccattaaatttttaggggctataaaataggagctattgctggagatgctcttagtcttctccatgtgaatttacaattctttactttcgtacggttccttttcttccgctatgtttaatatgaaatatgcacattcgggtgccgatttgttaaaaataaataaatcaatacggtgtgtttacgatataaaataatttgtgagtaaaatatttacatatatactcttacccacctaacagtccaaattaattttataattaaattttaaaatttaaattttgactgcggttgatttctttaaggtaaacgacgagtcacatagcttagacgagatgagtgcactgtttgacgcaaattaatgcgcatgcaatcgtacacccgtacgagagggagagcatgtcatgtgatttcgagaggcctaggaacatgttggttcatcagtcatgccggggcgcatgcagaattagtactgctcggtaatttgtgcgactttatggtaatttagagagcagcagtactgcagtagtagtacgacattactacacttatttaatcgtctgactaattaaactagtgtcagtttattcagtatcagtatgatactaatgatagtatctgatctcaaggtcggcattactatgttgggagcatactccctccgtactcgtaaagaaaatcgtttagaacagcgacacggtctccaaaacacaactttgacttcttgtttctataaaaatatttattaaaaagtgatatatgtatacttttatgaaagtatttttcaagacaaatctattcatatattttttacattttcaaactcaataacttgagagttattcatgatttatatttccaaggtttgacttaaacattgtcctaaatgactttctttacgagtacagagggagtatatactttctccatcccatatactatatctatatatcctaaaaaagttatttctaacatgacagtttgtttcaaaataaaactatttctccatagcctctcctttcacccaactataaccattatttacttaatttcttcatctactttttttcttaacgaatcacaatgtttattcattattttaacttctttttaatatccgtgtttatctttaaaaaaaatacgtatattttaaaacagagttgtatatatatttttggagttcttcctaggacgtaagcatttctaaagtttgtcatggtacatgactaacgaggagagatgtgaagttaaattaagatcaatattgtagttagttaaaataggagatacagggagaaataaatgaaaaatgattgtgatcgattaaaatgagaaattaagttgatgaatatattacatagtactatatatttttttgataaaatttaaacgctagccgtagctatattttggaacgggcgagagtatttcactcactctgaatttgacctcctcatgttgcactaggtggcttttgtcaggactagctgtggcgcgcattcctcttttgaaaagataggcagggtcgacgcaggcaggcaggcgcatgtgtgcgtctctaccgaggtgacaacaaaatcacagggaaaattctcccctttcatagggatcaatgagcttaagcacacagctctcatgccgttgctgcgtccagtccttttcctctcctctgcatcatttcctttctctctgtctgcgtgagtgtgtgtgtgtgtgagagagagaggggaatctgcagagaggccacggttgggtttgcaaaacgcagacacggctgcttgctccctgatctctactgcatgcagtagctagcactgcactgcatgctggaggaacaggatgggagtaggaggagctagctagccgaggaggagggagagagaggagggcacagctttccctctactcccgtcgcttttgtggccagctgatcgatgagctgagctgagctgagcttaagccgggaagaagaacagctttatgtgcgtggtgaaatacggagcattcacacacacacacagtgtacatgtgcatgtcagtgtgagatactgagggcatgtttagatcagtttgttgtggaaaaattattttggtaaaagttttggtggtaaaagatttggtattgaagtttttctagttggtgtttagatgcatggtaaagttttatcattttactagtaaagagagatagcacggctcccaacatattttttggtaaaatttactactctagacacccaaataacaaatgttaaattgctaaattttctactagtgtttagatccattttaacaaaaagtactccaaaacagtaaaacttttgccattttagaggaactaaacaagacctaagggttgtgtgtattgtgttattgcgtggtggcagtagtacaacttctactcttacctcccctttccagtgcgtgagagagagtagagatggatactaccccacccattcatattataagttgttttgttttttctaattagaatttctaaagtttgattaagcttatagaaaaatatataatcatttttaacataaaacaaacatattatccaaatatattaaatattagttttaacaaaactaatttgatattataaatattgctaatttttatatatatatatagactaattaaaataacttataatgtaaaaaattataacggaggtggtactacactagtactcctatgttgcttgctcctgagctagctttcgacttgtcggccgctctgatcgatgctgccctttatccctctcctttctgcctcgatccgggccatcgcatgatttgcgtttgatgcaccggtgatgaccgtccaacagcaaattctggcgggcatgcatcacaccaatcgtccatggatcacttcccccctcttgcatgtcttgactgctgttcgccggtcacaagagctcccatgctggccctgttttagggaactttaaatagctacagttacttcgagaatctctaactccgtaaacaatctaagaacctgtttggtacagcttcaactcctgaatttagctccatgagttgagtctggagtgga

SEQ ID NO: 9250 - DNA, 7291 bp, Oryza sativa
tcccatcctaggttgttttattttgggacggagggagtattgtagcacttttccggtggtatgttgggaaaaaaaaacatgaactacaacatgtttttagaacatatttttccgtcaggaataaactaacaagactaagtttccacaaggaattaggtcaaatttaaggatgggcgtgggtcactgactggtgcatttagttaattttgttgaactagacaaattcatgacgatcaagcaaccaatggaacttctcttgcaaagttgcaaacggaacttttctctttttcacaccttagagagctatatctccaagggaacagttaagatgaactataaatgggccatcatgtacataacacacgttaacctttcttttgctcagaactgctttgtgttacattggtctattgacaatctgacacgcttcttccatggattccttttctacatttcctaatatataaactatatggttgttaaggcgggtaaggcgacccacccacgccttactagttaccactatagtgtaaaaccgctaaggtatggcgacaccataacctaagtgattagcagcatcagaagagagagagaaagaaaactcaggccagcccaacaaagcccaataacgttcataccagcccaaagtcaaagaaataaccctaacacccacaccaggtacacactctctcctctcaaagcgctgcctccaatgtcacttcttcctcacgcctgtatcgcttcttccttgtgctagctctgctcctctatctgtgctccttactcccctgattcagaatgaatccagtgcttctctttgtatgtgctccttcccttggatggatctaatgctgctcccttgagtcaagatgaatctggtgcaggggagagaagaagagaggaaaccagagctaagggggagcaagatggcgatggcatggagcagagaaatgggaaaatggtgtagttgctgcttccttcacctcttctccctctccctctctgggttatggcattaagcccttaaggtggagggatgccttaacaccctcagggagccctagagctatagcgacgccttaacaaccatgatataaactagagatggcattattatcaagtatcagaattctgttgaacaattctaaagaaatgctaataaaaaatcgtaatatatttcttaaacctcaagattgtaccatagaaatatttgtggattagataagttatgagcacttcagtttaattgataacataaaattgcacttgcagagctgaatgataagagaggtgaaggcatttgggctcggttcaattatctaagaaagtgtttcacgggatatatactctattttaaaaccaggatactggccatgttccattcgtataaaagacaataaaaatgttctaggttgctaatgcatgcattgatagtaacaagtccaaacatttctcacacggtatctttacatttcggaaaaaacacagcttcaagcgttaatctacaaaaaataactagttaatcaattttatgtcagttttcaaatatttaactaaccaatggaaagatcaacttaatttgctgaattagtaagtattttcccgtctccaaacactatgcgtttccaaatgttttactacctttgtcccaaaaagagttcacttttagaaacgaatctgggcatgcctcttgtccagattcatgtataaaagtgcagtctttttgggacagaggtagtatttattaaccacaatgacagaccaacatgcaagagagagaagctctcgcaaaatttctacaagacatgttacgaataataaatatggaccacaacttaggaagctttgtgcattaacgtaccgatcaggcagtggatccacttgagaacgataatatggaacatcagatggagccaaatggcggtagtatgcatgtggaacatgctgaatctctgggatagaagggccatgacgaggctctagggcatgcggcacaagacgaggctctatgtcaagaggaacacgctgagactcgcgtgcaacaagtgtttgctgataatgtatgtggggaccatcatgagcattagacaaagaatgatcaatcctataatccactggatgtggatcaaagcgtgttgccctgtataagtctttagggggaggaacatgcatgacaggcaaagaagatcgtctttcttcatattgatgtggctgtgtttttccttcatagtggtgcatctcttcaagaggcttctgtggagctggttgaggtacactcacagactcaaatagagctattagcctatggacctgcacaatatcatgtaatacataagataaagtaaatactaacatctatgatttgttcttttaaaactttctgttttgaacaaaattcaaatgacactcacttgtctagagttgagctcgggattgaacttgctctttgcactatagttctctctgattgcatccttaaatctgctctcaggaagtggaaggcaatctttatctatcttaaatttcacctgtggcgagctcaagcacaaaaaatagttttgagtacaacgaaaatatcaaatcttcaacactaactactctagatgaagcccattttcaaacagaaggttgtgtggaatcttgtgcccatgaattcgtgcttgatcattgaaagtagataacagtccaaatatgcaattgtgaggtcttaaaagttgtgcacggaattggcaatggtggtcctaatatacatgctgtacagtcttatgtaagaaccacttgtacaaactttcgtgactttccatcatatggtttcccagatatggtaaattccaactaaccaatggaagtgcagtaaaaacaaatcgaccctcacagagttacagttatatctgaaatgacaacttgaatataaaccaagcatcaaagaactctatggacataaatggtcacaagcaaatcctgttattaagaaacaggggcaatgaatgttctcttagcagtctatcaaatcattcagtcacattacttacagcaccacctgttttcttaattaaagcaaagatgaatatagctagctagtatatctacatctgtttcaacagataaccaatgcaaatgcacaattcaagttacagctgatgatgatgtctaatgcatatgcatcaatcttccgaaaatggaaatgcaatatgtatcgacaacagggttattttgttctcagaaacagtgtgaaccagaaagataccatttctactatcgccaatcataggtttgtgtacaaaaatcattggtgcaccatagtatcaatcaatccccaaaatagtatgtacacccttaagtataaaaacataaaccccaaaaaaccatattcacttcctctttaaaaaaaacattcacagcatatgagtttgtctacagcgatggaataccagaattacctgtgcagggaattttccactgaatgcatctcgaacaagatcaagcccaccctttgatactgccttgtacaccccataaagtagcttcaagtcaaaatcatagaggaacaacctcatccctggtcggatcttctcaactattccgattttccctctgggatacccaaacaagcggctctgaaagcattctggtttagtctgcgcattacacatgaatataagccctcctcccttactgtcaagcctctcttccttcttgcttccctcctcctccttcctcctttccttcacattgctagtcctctccccagcaatctctctttttctcttcttgatggcatcaccatcgttgttatcagcacctacaccattcttggtggcaactacagcattagcattagcattagcctcagccagctttggttttagctttagccttcgctttggcgttgatgcttcagccgtagctgccgctggcgtcgatatcacccgagctgctgatccatcggccacagtagctgatcgcggagccggggctgcaggcgatgcatcagcattgccaccagcagcaccaacggatggggaccctgaagcggcagcagctgctgcagccttcgccttcgccttcaccttattcaacctagatgtcttcttgaccgatgcaggggtggaagggctccccttggatgccccgtccgcatcagccaccgcggccggtcgcaaagccggagccgcaggcgatgcatcagcattgccaccagcatcacccagggacgcggcctctttaccagccgcagcggctggcgcagcagccttctcccggctagccttcgccttcaccttcgccttccccttgaccaacttagtcaccctgagcgatgcaggggtggaagggctccccttggacgaccccccatccgccccaccggcggcggccgccttgaccttggcggcgacgttgggcttcttcatcgtggttgacctagcgtggaccaaatggggggcaaacaaacgaacgaaaacctatcatcaaaagctacaccacgcgcgcatcaaacgaaccaaatcgggaaggaagaacaaatcgaatcgatcccaactccggattggatctccgacgagggagggctacgagagagatagagatgaaaaataccttcgattcgattcgattcgcacctgctcgcgggcagcaggggagaaggcgcacgggcggggaggagaggagcaggccgaccgaccaccggtttgcccccggcccctcgtcgccggcgacgtgcgccggagcgaggcgaggcggcggaagttttccggccgtgcctccgccgggaacggcgtttctcttcgcaaacaagggttacgatagcgcaaacggagaatcgaagataaagcgagacggagagaggggtggaggtgtggaaggggaaatgctttatgggcctttatttccaaattagtaaatttagcacattttagaaaactttttttcttcaactgtcaatttccttgaacttttcgtttgccttgctagtaatgggtatatatatgccacaagtaggatgactcatctaaggccatgttttttcagcttgggattattataatccagattattaggagtaagttgaaagaaacggataacttattgaagtagcttattataatctagagcccagcttattataatctgataaactcatttaggtgagctttttctagattattgagtgaaaaattactcaccatgccaccccactccctttttagacttgcaaactcaataatctaggctctaataatctggaaagaaacaactaaccgcttattctactacagattataacaatctagcttatagtaatctaactcaataatctagattataataatcccaagctgaaagaaacagggcctaagactcttatatctacatatgtacttcctctgttccattctaaaattgcacggtgaatattaaaggtaaagtgtttttcaagcaatatagtttttctttaatatgtcaagctacaatttttgccaaatgctaatcttgataaaataggtatagcttcgtgacatttattccgattaatggatatcactattaggaacactcactaagaacctgcataaatagtaataagtggtttttaatggagtatccgccaataaatttcccgccaaagtctacctcctcactagctaaaacctcatgcctatgttatgcaaatccgatcaataatattttttttacctatctgaattacaacaccttaacatcataatgtcttgctcatattgatgttgttaaaagagaaaaatgtaattgatgtttgtagaatttgaagggtattcctgaagatcaatgtcaaacataataagagaggtgacttgtttggacccctaagaccgccaaagagagatgccattcattctatcctaagaactaaaatcctagtgtgcgatgacatagtgacgattatcatgttgcttaagagcataggaaattatacgaatgagtttgaatatatggttagatgttttctctttgctatcacttgttggtaaaccggaggaatgtgaggaatccaatggtataaaagccctacaatttaaagcttgcggcacacgccaaactaactgatgaataaagtacctatttggtgacattcaaaaaattttaacattcatgaggatattttcaccttcgcatgaattcacaatctgttaaccaccatcatcattatgtcaatgacatgagtgtgttgcacaacttattttgggcaaactaagatttaagcatcaatacatcgacaattatctcaactgaaattatgaaagaaatagcaatttcgtaacaaaggaatttgtcatgtacataaacatacataaggcaggagatggagcggagcttgaacaataaaatgaaggggccaatatgtaagtttctttgaagtataggctactatactaacataacatgtgacataacatgtgacagattatagtggacaaacttcccaagccccaagctaacaaaaaaaatttcttcatcagtatttctcagaatatcctttaaattaattaatttttcaactttcaaatatttaactactttatttgtgcgttcctataattgtcataacctcagttttattcctcaaccatcaatactctacaagcatggcctttaacttcaagcagtcatgggcatcaggttgacatcataaccaatcactttggtagaatccttttacagtcccatactcccatcctgattcagcactgcagaaaaaggggaaaattagaacaacattgcatcatctagctgaccagctctaatccatcaccgcacataggcaatccatgcgaacatgtgatgcagctttccatattttcttcgtattactcaaaatattgactagccacttcttggcaaaagaatcacagcatgatcaaatacatatttctcatggacagacggcagctggtgagtccactaagggtgagtttgaggaggaggagattgagaagattgggaagatacaaaaaacgaggtgagccattagcgcatgattaattgagtattaactattttaaatttgaaaaatagattaatatgaatttttaaagcaactttcctatagaaaatttttgcaaaaaatacaccgtttagtaatttggaaagcgtacgcgcggaaatagaaacaaactcactcactttcttcagctgccgaacgcagcctaaagattgagatggcagcagctgataagagctagcagaacagaaagctgcttcatgtgtcatactccctccgccgcaatatatccaaacttatagtactaaactg

SEQ ID NO: 9251 - DNA, 1057 bp, Oryza sativa
gacggtgaacgacggcgcacgggggtgggcgggagggtgcgccggggcgtgcggggacagacggtggacggggacgggatgctgcggcggcaccattcatcgcagtcgcccaggtctccgccctcgcctccacggtcgccgctcgcaccgccccctcacccctgtcgcaagtccggtgctagccgtcactcccctaatcgcaagaggacgaggccctaatagtgagcttgacgagccggccacctcgccacctcctcacctcgcctcctccgccaccgcctcgcctcctccgcgccgcccgccgcccggcgtgccacatgtcccgccggcccctgcacgccgaccgcccatccacgcgccgccgacgccgcccactgcccgttcacgcatacccgagagagagagatagagagagaggggggagggggaagagaggtaatggcaggtgggccctttattttattttatttctttttgctgattggatttccacatcggcgccacgtgtatgccacgtaggagaaaaaccgctcaggattgagtccggggggtaattcatccggtatcaatagttcaaggtgtaatatgtctgattttgtggttcaggggggtaattcgtactgtcacaagagtttagggggtaattcgtacttttccttttctaaaaagtgaatttcattctagaccatcatttggactatctcttaacctgtatttttccctttagactatcatttcttaccgtttgtttcatcttcaacctcattcttcttctccaacttcaacatgtcctggtttgctgataacttataactaacttgtgaggagattagcagcttatatctagctctatgccaagaaatagataggagagctagaggacagtaagggtccaaaatctatactcctttaaaaaggaatagtggtggtggtgagagctgaatctacaacctccaccagtaccaactccctaactttttaagagatgtagacaaagaataatggtaataacgaggttaatggtaattttcattgattaaaatcctattgcaacgca

SEQ ID NO: 9252 - DNA, 4902 bp, Oryza sativa
  unsure (1)..(4902): unsure at all n locations
attcctgcagccctgaataaaatactccaactattagtgcagtggagaaagatatgggaaacattgacaaaataaaatgtcactggatatataactctttctcctttttggatagatacaattgggagataagtttgctataaataatacaggagcattcagctatagtttccttccaatagactgccacatactctattactctacaccatgatggtccagtacagtttagctaatgaaacaatactatcataaaccagcaagaaaaatctacaagtttctgcccagcacagttgtaagaaaatgctacaaaggaaaattttgttacagataacaaagaacgctcacgtaaaattctcctggccagtaaaacaacagcatatcagtggtttcctcattattgggagtattttttttaacttccttcatagaccaaagttgcatagtgtcaggaattccatttcagtgtcaacatacttggtccagagagctttgtactggttcaacgcaacatcaagccacggtttcatattcccattaaaatgtatcacagcagcaccagcgataacctcaggactgatgcttggattatacccaaggcccattacatgccatgatttgtcaagcggctttgtattgccatagaatgtcatcagcccagcaggtagaacagatgtgggatcccaaagcacaccatcctcattctgccatgaaaataatgggtcatacattcatacacatatcagtgccttggtgagtgcaaacgcatgctagtaagatgcaaaaatagacaactatgagatcatttgcataactgcatatgtatatagtatattacacaggacaggacaaagtaggtcaagataacatgcaaacataaattgtatatcggggctgttattgttttaattactacacaatggccaatgaacacaaaaagcttagggctcagcaaaaaagtatcacatatgcatggcaatagaaacctagtgatgaattcatcttgtgttttgtggaacactagttgagaagtcaagatcatgaagcgctcaatcaggcgactattatacactaactgacatgattggttagatccttgtttacaagatttagccacactgtggttgaatcggctaaactagaaccagtaggtttgatgacttggttcacaattatagccatacgtttcaacatgaaaaaccagcagtgtataccttcatgtctatatctctatttttttacttctctcccttcatatctctacatctctcaatcttcaacatttagtggactaagcaacacaatacttaggggctcaagaaatatctataaccacatcgtgcaatcgcatgggaaattcgctagttgataaacttttacaaatgtgatacatttctgattatccatacacatcattgatagtagctaattggaatagtcacccaagagactacataattcttcgtatgtcacagaaggaatgtattgccctataatttcctataccaaatgcccactcaggttatttaaaaattgcaggaaacatcaagatacctgaatcgcatgatgatcaatcacaaaatatcttaagaacttccatcgagctagtgaaactgcaaactaaatgcatatgcacaaccaaatggcacgaatcgaggagattgggcattgagcataactataagcggcagtcgcgtatcaaaccaaacgcactccaatgctactcatatatgttatatataaccggataaaacagaagcttaccatttccatgtactgatggaacagctccgtgcagccatcccttcgccatgcctcaagatcatacacattgaccccatatgcccaagcacatgcgccaggatcgaaccgctcctgcacgatggcctgcgtgaagttgagatacttgctatatctcctgaatccaccgaagcacatctcgacggcaccattcaccttcccatccaagtcgagatgccagagcccagccaaatccttctgcaccaccacatcatcctccaggagcaccaccctctgcagtgccgggaacatgtctgggaggtagaacctcaggtaatcgagcaatgccacgtccctcttgccggcctcgatctgcctgagcaccggcgaggaggtctcgttgaggaacgggaagtcggagtaggcgaggagctggacgtgcacgccgagcggcggcgggcggcgggcgaaccagacgcggaatgccggcaggtacatgggcgcggtgaccacgtggaagacgtggcgcgaggggtcggccgcggcgcgcgcggcggaggccaccacgacggagacggcgagcacattgtcggagaacacggcgtagtggtacagcgaagggtcgtcgaactccggggacgggtcggggtcgtcggcgaaggcggagggcttggcgaggcgggcctcgaggaggcgcatggcgaggcagtggagggacttgggggtggagcccgcggcgatgcgggaggacatgcggcccgcgcggcgggcgcgggccagatgctcgccgacggcgaacaccgtgtcggagagcttctggatcttggactgcgtgtcgaacccttccttggcgtcngcggcgaggaggcgggcgagcttgatgcggtcgcgcgcctccttctccaggggcttcaccgcgtcctccgggagggacaggtgggaggcgaggcgcgacgagagcgccgacaggtcggacgacatcgtggcgaaggacagcgnntcnccgcccnacgcctccttgagcctccgcgcgtgcgcggcgtacgcggccagcaccgccgcgtggtccgccgcgtggcgtcggatggcggcgaggcgggacggcggcgatgcgccgaggtaggaggagcggtgcgaggcgtgcgtcggaggcggcgaggataggaggaacgagagcgtcgccagcaggagcagcgtcaggagcgccgcgaacgccgcgcggcgcggcgccgacggccggaacgcgcggccgccggccatcggagcagtggaggggagggggactggagtgggaagcgcgtcgcggatctgagactgatgaaggagacgggtgggcccgcggtgtcagtgggcgcggggtcgggtatcccggcgtaaacagtgggtgggcttgtcggtgaggttagatttactaggttatttgtttataggatgttattattggtggattaagtcgtgggtttaattaaggtggggacattattaatcatttgattaactgactgactggtgggggcaccgttggattcatgagaaggtgattcgtgtcaatgacatgtggggctcgttacattgggtccacttgtcagtgaggtattaagattgggagtagttggtttaggtgggagtatgcatgggagcaagatccggccaggctggatagatatcgggagtcaagacagacattctaatcgcaattttagaatagatcaaattcgatcataagattagttctaaactacgtaccgtgtcgacgacactcgacagtggatagtcaacgcggttcccctgctctactccactgaattttgctccattttgttctattgaaacataaataaacattaacaattctttgacaatggctagctgaacaattgatctaagggtgatcgaaggccgaaaacatagccaacctatacataaatgttgttacgatctgaccgttaattagttttgcttactctaatacaattgtaacgtattcggtactccctctatcccaaaatatagcaacttttggatggatatgacatatcatagtaatatgaatttggacaggcctcttatccatattcgtagtattagaatatgtcgcatccaaccaaaagttgctatattttaggacggagggagtatatacatagaaaacatccttctttgaccaagacatcgatacacttatctaatacgagagggtggaccagaatacgacatgtgtactcggtcccccagcgatgtaacttgcaatgtaggttggcgaggctgactgataggatagatccacgtgtagagatcgcaaatgtgccacccttgcagaggttttggccagttgcgatgcccctagggtgcagggataggctgagactagccgatgaagggatgtctttacattgacgatacagtggaagctccatgaaagcaatgaggctagggtgacaattttgagtgcaatgatccctctagacggcgttgtcaaggtggctcgctctcccttccaccggtcatttcagggtgaaaaccatatgttcagttttccttttacgggcgatggtggtgctatggtgttgtatctttattgaaggcgttgtcttggaggatctgtttttgccttccgttttcagacagttgagcctatgtttttggatgacgacggtccgttctttctcacactctccctctgcaacccctctcggttgtctggtagactttggtatttatcgtcttttggcgtgttgggttgttcagttttggatctgccatggctctagtgatgtctgatctggcttaattgtagtcagtgtggtgctagtcctttggttcgtatagacattatcgatgtgtgatggtgattttgttttacttttcttgattaaagtcttatgttttctttttatctcctatatcaatataaaacatcacaatatctcctaatgttaaaaaacaagtaaattgtacattggatcacctagtccacctcttaacccatcttttcacttcagacaacccctttcttgccttttgtttcactagcatattagagtaagtttaatagtatagctcactactagctccaattaatctatagccaatctaatagtcaattcatacaatagttgctcactatactattaatatatggtcccacatgtcatacacaca

SEQ ID NO: 9253 - DNA, 5988 bp, Oryza sativa
gatttaggcagctctacaaccccactctagacccaactcctggagctaaatttaggaattggagctctaccaaatagaccattagcgtttaaattatgtgactccatagcggaatacgaaaaataaactagcagacagaagttgtcctcctaagggcactcacagtgcaagcaccagttgccgggtcctagctcaaaaggttggcccaaagacacacatccccacagtgcaagtaccctattttgtgtggcttaattggatgaaggtactctgggaggaaactgagtccacagtgagcgttatcccaaccgcttcgttctctccacaatgcaccaaatttatccccaacctaccctctcctcgagcgcttcttctccacgcacggatgcatcacacacccctcgccttcgctctctccacagcgcagcgcaccagcccgccggaggaggtcggtcaccagccacatcgggctcgccagcgtgcgggagggggggtagggcgtcggtgttcgtggtgacagcctggtgctcgcgcggactcggtgtccgtggcaacgacgcgatgcatccctccttctccccgaggagatgctggtgctcgacgcggtccgaagcagggcagactacgttggtggcggctggcgcgctggcgtagtggcgggaggcgtccccggcgtcggcggctggcacggtgtggcggcgagcaaccggagcgtggggctgcggttccggcgccgccacaaccggatccggcggctcagcgttggatctggccggggtcgacgggagtggacggcacaacgccgacgagcagcgggagcggacagcttctccacctcgccgatttccccttccttttctctaccaaattactcaagaattttgttggtttggtctgcatctgtggtgggttttttccttttctctaccaaattacttgagaaattttgttggtttggtctgcatctgtggtggttttgtggggggggggggattcgctgtgcgtttggagggatttcagttcgtcgatgattccgttggagggtgatttggggttttgtataggtgcagcgcgcttgcctcgcttttccccgtccgctcgcgccctcgccgcaacaaagttttgcgccgcttaggtaggggataagaaacctagctgaggtgcgggcatggtcgcctcgttgacccgaatctgagctggcgcaacaagatcacgtaccagctcagtgcactgtgaaaggcctaatttaagttttcaccagctggatacttacaggcaccaatgttttagaatcttcagcccctaaacatggcatgttcccttttgttcaaacttttcgtagtggtgatgatattattgaagcaattttcaataagaaaagaaaatctagcaaacatatgcagtttcagttctgcatgtttatcccatttcgccgtgcgtgcgcgtactctttttggccggtggagtacacgggtcgcagagaatcgttgctgggcgctcctgcgaaaaatacaaaataaagtgccatggattttagtgcgtttttggtcgcgtctaaaaggaatcaaagtcataatatatgctactgtgaccatcatgtatagtactactataatcaccatattgtatatgtatcgattgatttattcatagtctatagtgctattgttgctgctaccggtagtgtctagtgtgtggtgctaattaatattcctaggcactataattggattagaaggctctaatcgtttttaattagatttggatggtccatgccgttttgatgcttagcgctcaggatatggtcattgggacctaaattatctggagaaagtgaactatctgattaaaaattataggtgtgccatttgtgcttacgtacgcagtctcacccaaaaacagaaacttcattgtttaaagtaccatgcacagagggaatggtaatttggcacactaaattattactctctccgttttagagtcattttgactttagtcaaaatcaaatcactttatatatgatcaagtttgtagataatttataacaccaaactagtttcgttaaatctataattaaacatgttttcataatatattattcttgggataaaaacgtaactagttttcctacaaagttgattaaatttggagcaatttgactttgaccaaagtcaaaataactttaatccgtataagatgtgcacggtgagaagaatatgatataatagaagggaacaaagtcgaccatagtggtctacaagagcaccttcaatagtctcctaataatccatcttcaataaagtgatattgaactatcccaatatcactttttattattaggaagctacttttgcagctccccaatactttattttcactgtacatcatgacatataggctctatccattagatggccaacaccatcttctttatctctccttgacggtcaaattcattgtctccgcccttcctccgcatcccatgttggcaatggggcctcatttcccatttatgtgcgggaaattctctttaggacgggaaaggttagaattggttccgcataagaagtcgaacgagataaattatgtcacgtcaggtttcatgggggcaaagatgatcccccattcgatcattccccgtcccctgcggagacccacataggtttcaatctttgttaagggggtatttgaatctcctgaagatgaaaatgaagattaagtgtttcacgcaaaatgagatggtaataacgtgtgattaattgagttttaattattgcaaacttgaaaaaggattaatctgatattttagaacaattttcatataaaaagttttcgtatgaaatgcgccgtttaccagtttgaaaagcgtgccacgaatatccaaaacttaatccatttttgtaagtggaaacgaacgggggcaaatattaatattatttttttatcatgtgaattagtagatatatgttgatatattaatataaagtgtgaatatgcgttttacgttcgcatatataatttgatatgtacgtattgttttaagcaggaacagagagattaattcccatgcggaggtggggatgggaataaagtttcccccattatttttcgctgagacgaggacacataaaggtttgactcatgtggatcgataaaaatggggatgcattctccggcgaggaattccccgttgtcatatctactgcggtgtcttgcgagaaagccgaacaaggtagaggcaagcctaggttggagacgcattggatgagtcaacgacgagtgtgcgctcgaatttagcgagcaacgccctcttcggctagctagagctcggggcggtggagctccttcgggcagcgctagctaggcagtggtggcagagctccttgggcaccaaaatttggaaaactttgatggggtatttattgtcaaaattaaatgtgctaaccgcataaaaaatgccacttgttcgtgactgaaggagggatttgagtactatcattttgagatcccaccacggaagacacaattttacccatcacacccatgcacaccacatcctcaattacaaaatatagaaaattatattttaaaaaatatgtatctttattttctttttttttaaaaaaagaacaaaactccaagtacttacgaagggcagccaagcccacccgagaatacatgtgcatgcatccatccatactcctttcgtttaaaataaataaatttagtacgaaatgtgatatattttggattatttagtcccatatactatttggatccagggactaaaaattgctaaaggcacgtggaccaagggagatgctgccactttagtccctataagtacctccaagagggactaatagattttagtcccaatatgcacttttagtttcttttagtcacacctgtttgaatttctagggactaaaagagattaatgtggtgtttgaatctcctgaagatgaagatgaaaatgaggtatttcacgtaaaacgaagtggtaataacatgtgtttaattgagttttaattattacaaacttgaaaaataaattaatctgatattttagaacaactttcatattaaaagttttcgcacgaatcacaccgtttagcagtttgaagagcgtgccacgaaaatccaaaactttatccagtgttagcgatggaaacaaacagagcctagaatagagggactaatagattagtcctatgaaccaaacagggtctaagattataaatctggacaagcttcctatagccctatatatacaatacaatatgttacatcccatatactttatccgtttcacaatgtaagtcattctagcatttcccacatttatattgatggtaatgaatctagacataatgttagaataacttacattgtggaacggaggaagtaaaattattttatttgaacggaagtagtacttaccaaaactgaaactgagcaaattaatcaaagttggtggttatgcctggtggttgacagaaaaatccaggagctagcttacctgtatatatcatcccaaccctatcagctggcgcatgtgtgtgtgtgtccttgcagcagaaacaaatgaagggataaagctctctagcctaagcgatatcgatcaagaggtggctgcggggaaaggggaggaaagcggcgttgggccgggcgacacggcggacggcgacgttggccatggctgtcgccccacgtaaacgaaggaacactgcccccgcgtctcgatcgacgtacacacgaacgaacgcacgcagcgcggccgcgtcgccgtcggctgatcgatcacgtcgagacgtcgccctccggtcgggtcggctgccggcatccgtcgtcaccaacaagtgcagcacggtgagaggaggagagcaagcgaatcactcctaattaagcagcagcagctgtctgatcgcctgatgtttgtgtaattgtgtcctgatgattaccagcagagtccgaaccacaaattgggctgaaaaccttagtgggccgaaatggggccagaggcggcagtttttatcttgaggggccgaggcctggtttgggaggggaataagttcattctaggtccctcaatttgtcgccgagtttgaaattcattccttaagtgcaaaaccaggtacaacacatcctttaacttacaaaaccgtgcaaaagaggtccctcggcagtattatgcccagttttggctgacgtggcgcttatatggcaatttaattttaaaaaataaaaaacatgggacccacatgtcagctacatacaaaataataataaatggtgggacccatttggccccacatgtcatccctcttctctccatcctctctctctctcacctgggcggagcaggtctgagcggagtggctggccggtggagctaagcggcggcggctggagcaagctggcacaagcgacgggcaaggggcggcggcaccgcggcgccgagaggtggcgggcacagcagaggggcggcgggcagagagggggcgagtggcaggcgagctcctggagatggcgacgggatgaggctaaaaggacgccgccgtcgtcgtcggtgtcctcgaaccagtacggcttatccacacccttgaggagggggaaaccgttgaacagcaccgggattgcgtcaatggtggtgtagatatgggtattggccgtcttcgggtgcttctcctcgcgccacggcaccgcctcacggccgtcgccattgtcgtcgtcatctcaatccccgccgccgtcgatgaagaggtgggggacgatgttagctaaactccggcaactgcagtgaaacctgcaacacacacacgcttggacgcgagaagaacaaaccaattgggaaagtctttttggcgctgcatattacttgcttgcgacattttctgtttctttcccttttatccatacgcgattacagaacgtgggcacgatgacccaacttacgcggacacgatcctttctcagcagatgcca

SEQ ID NO: 9254 - DNA, 31590 bp, Oryza sativa
tcccagactttggaggagtgttggtttccatcagaattcagagaactcctgagtgctcttggactagacactgagcatcacaccctgccttttaaagaggagaagggtggtgcatccatgaactaagcactagcagtgtgcagagctacaaccacaatggctgacacctctcgtgagctgtggtgacagtgagtagatgtccattcctgaaaagaaggggaaaacaaatcaaagaaaaaaaaaggattcgagtggagttgcacagagcagcaaaagcaagtggattaacccaatgtattatttttagtttctgacttaatagatatggttcaaagcatgagagaatcgaagatacgtataccagatgcagggagaggagtagagacgcccatgcaaaatgtgtgcaagcagccatgcgaaaagcagggaaacaagtgaagattttgctggtcatatattcttggtcttgttcagttcaaaacacgtgagaaactaggatatccaaacttttgaagttctgattatttttttcatcgcacttgtttcccttttccttggaaaaggctacagtattctgaaagtttatgcaatccgatcatcttataaaggtaggtgatgagttcattcttttgttcattgcatggcaccaaatgaaagtgatgtctcaatgcaagaagaatactctgaatttcttgccaccatgttgtacagagtatctgtcagtacgattagacccagcaaataatgtgaacaaagacttacaaagccgtagtaaaataggaaatgtgttcacataatctctggcaatactgaaaagaacgagatctgctaacaaatctcgatatctacccacgttttttaattaaagaggtgatggttatggaacatatatcgacacacgagtttctgttaattagatgctgtaacatgatgcagacagtaaaacggacagaaccacactatctcagcatccaacaccaagtcaccaatagaagtgacagagcatctaaagcaacagttaaaggtaggtacgatttaatgagagaccaaagctttcccgaatagtgaattatgcagaagaacagaatctttgttaattaattaacctcctaaaaatataataataagacattcattcatatcttaaccctacgagcttccttcaattcaaaatcactagtacatgcctgctgcactaagcataatgatagcagaaaacaatatatgtctaaaatatgaacgtacaaaatttcccaccttgtgatgtccccattgtggtgataaaattaactacaaaagaagaaaagatttgctgcactcaactagtatagtattcaaccaacacaagcataaagctttgtgctgcttactgcaggccctgcaggagcatacctaaaaaaaaacaagttccactaacttacgcctaatgggatcatgtcaaataattagtaccaaagtgatatagcattagtaatattttgcaacctaaacaatagaatagctctggccgcaatactgatgaagtgcataattcagattagttcaaatggaaaaaaaaacactttactggatgatatcacagccacacagatgtgctgttgaaagatgctaggataagtacgtaaagcatagtactgtttgaaagattctgaacgtaagcacttgataaaaaaaatattccctctttatactttcagtaattttacaagttgtctatctgaataaaacaagaagagatgtagatcaattaccctacctgaagtcccgaataaaagaatggacactaaattcggtattaatagtttgacatgcccgtacaatcttcatcttcattcactctaactaaatgttatttaccagtattattatcagtagaagtgattttagcaattgatttatgagttctaccactagtagaaaaaaattatgctaccagccgttgatatgggattatgaatacatatgatctattcaattagaaaagacaaacagtctagtatttgctcttagagatgaacatgtactaaagcacagctaagagcaagtttaatagtatagcccgttactagctctaaattatctatagccaatttatacaatagttgcttactatatatactattaatacctggtcccatctgtcatacacacattacgttttggagtccgtgctgcagctggctacagatctgtagcccgctgctcttctctcttttcctttatcttcttaaaatatatttatagtaagcttatagcctgctattgtatctgctctaacccatgcatgctctaaattaaagaatttgtgaacttgaagaccttttccattcctgtcgtttgaaaactgataggccatgcattaggtggttgcatgtaaagcacttgagctaacgcaagagatgacatataaatggtctctccttttagggtatcgagaatgctattgtctatgcactacatgtgattcaccctatatcctaaactaaaggatttagcagggacaaatatcattgccaatttgcatacttttcaattttcaaacctatattggctctgtcactaaaaagctaaatgtttgcttctagacgaaagcaaacacacaaagttgcgttaaaaggaagcatgcacatttccgtttctctaggaataaccaagataactcagttattgaaatcccctttttgaaaaaaaactcgattattgaaataccagcatatttcattgccaaaacaagaatttgcaccaagaataaatccagtgttttgttaaaaaaaatggagttcattcctaaacctgtttttttttgttactcattgataataaccataataaaggggtgacaactgaactatatgttctgcagaaaaactagtacagtaagtagtgaaaacatctttcccatttcacaaaatgattgccaacaggataacacagataaagtttttttaaaagaaaaaagctaaccaaagttgatgtcggcagctggagcaaggatgtggtcaagattcaatattcttacatgaacaaaaatttaccatgtggccaaagttgctaagagaagcagtataacattactattttcataaagccaaagccacttttttttttgcacgatccctcgaatctaactgattccaaatcagaacagataaaaacacactcccctcagggggaaaaaacaaataaaaacaccaatgggttgctggtgaaaataaatatgaacgaacggttcttgaaattgcgctaaactagattaaactcttaacaagtcatgcctgcaactagggtagttcgggaagatttcatttttgccacccattgctattgcaactagggttgaaaacaatttggaaagtttctagatttccgacctattttcacaaacgaaaagcacgtacctgtcggaatttcttttgggtaattttcaagaaaggaaacaaattcagattttcttttctcaaaatggcattattcgtcaaaaagtagaaatgttcgaaaactttctgaagaatttctcctaaatgaatttggaacttctttttttcgaagaatgtttactgtctcaaaagatgaaaaaatggagttgacatagtgatatgtgaactacgatgttatccttatgataatgctaaaatttggaattttttatctattttttagacaaaacttggaatcttagttggagggttttttacattctaataaatattcattaccgtatttgcttcgagtcgtattcgttcctttttgtatttgataatatttgattccgtttttctatccagggttccctattctgaataaaaaatattaaaacgaaaatggtaaaggtggtttccatttgttttcgagccgttttcatccataattgcaattgtactatctcttccaccattgaaagtttgtactcctcttttaccaccctttcgttagttcgtatatttttatgccatcactatctagtcaagggtagttggctattaagtttgcaattaaaatatcgttatgcccttatagatgttccaaagtgaaatagtactttaacttttagcaaatactgtaacatattaagataacaattttccccttagaagatattaagttctcatgtgcattgctattcaattttttaagaatattggaagctatgctatatttatgtggttatgcaaaaatgttttttactttactattccattttttaagttacatgtataaacctttcaaatgaattgaaaatttccccatgaattttttaactgaaaaaataagtcctattttgatacatactttaaaaactaaagaataaatgatattttcattggtttcttatataatttttagcttcataagggcacattggtcctaaaatacttttaaaactaaagaataaatgatattttcattagtttcttatataatttttagcttcataagggcacattggtcttttagggacaaataagatggtcgttgacagcgaaggaaagaaaaagttaaacaccaatggaatagtagtattatgaaagagaaagtgccaaataaaacaaggttcacaacaaattaaacaaggtttcggtgtgtgagaaaaataaatttgtcctaaaataaaacgccttgttgataagacagcacacggtttgacaatcaaagtcatgtgaagatggtttctttcccggagaaatacaatcggatgtacacatttgacacatacacaacactcacacaatcaccaatgagtcatccttccgcgtcacaaatgatacaaaatagagtatgaacggcacacagacttgcaacaagaggatatcctaataattccattatgctcactctcctgtgccacaaatgagtcatccttccacctcttcgtctagtgcagatttttcggaaggatattgagactagtagcgagctaggctgcctaccaacaaattgtgccaactgccaagtgaatggaatccaacaaccacggtgtcaaaatgatgggagatgtatgcttgcaaacagacatgacactctaaaagggaaaatgtgctcgctcgctgatactctatcatctactaggtgatatgaaaagaaagaaatgaaagaatcttcgattacaacagatcctcaaccattggactctttgcaaagttaaaagaggaggacacattgacaatggcaagcccaaagctccaccttaagatggtcctacatgtagtatagattgcccaaggcgcgtaactggttctattttcgcttagggagtgtactttttctctctataccaataaaaaaatgagtatgttctgtccttatttgttaaaaaacacaaacacatacacacacaatcatcaaatgcacgtgcatttttagtgtacacgccaaaatgggtatagtctgtctttatttgttaaaaaaacacaaacatatacacacacaatcatcaaatgcacgtacatctttagtgtacacgccaaaatgggtacaggctgtccttatttgttaaaaaaaacacagacacctacacacataatcatcaaatgcacgtgcatcttcagtgtacacgcttaaggttgagttcttttttgggtattccaaacttcttctactgttttccatgcgcacgtcccttaacatgttaaaaacgaagtgttttttaaatattttctataggaaagttgctttaaaaatcatattaacttatttttaaagcttttagctaatacttaattaaccatgtactaatccatcgctccgtttttcatatcggaatgtgagggcaacctaaaagatatccggactttggctttctagctgttggatctttggatcattggatgagctgatgccccatgcaaaagccaactaacggaatgtgcgttgttgatcaggtgaggtcggtcgtttaatcgccgaagaacacgagcacgtacgaagcgtgacgagaggatggatcgagagctagtcgatcggtgcgtgcatgcatgattctggtatgaatcgaagttgaacgaattacgggaacggcaggtgttccgctcgctgcacactgcacgcccgcccatgcggcagtggcggagctagtatatatcaggggagtgtttagcaacccggtcaaaaaaaagttttagctatactttatctattttcactatatatgtacccctcaatacaaacttaggcacccgcatcagcttaaactcgatataaaatagagtaaattaagcaggtggcaccaccctccatttcgttttagctccgcccctgcccacgccggtagtgtgtgttgtttctctcgctggatcgtcgcgcgcgcgcggcgcgcgggcggttcggcggttaaattgctgtcacgcgtggcgcggcggcgtgaggcgtcccgacgacggtcccgtcccgtggccgagcaaaataaccgatacggcccacgcaccgcgcgacagccgaatcccccacgcacgctagtacgctactacccgccgatcgagccagcctactccgccgcgcgacgaggccgtgcttttcgcgcgagcccacgtataatagaaccgatggcgcctctgcctaacgcgcatgcatccttcgctttgccgggtgggctgtgtctgagtggtctcttttctttaagaaaataacaaaacgtccactctacacccctcatttaatggttaagtctcaatcacatatcaccacaaaaccgggtacaacacataggggtggagctagataggggagggggggtgtccaggaatccggtcaaaaaaaaaaaattttagctataatttatctattttcaccatatgtgcatctctcaatttaaacttagatacttgtatcagtctaaatctattatattattaaaggaatagaaaaaggagcctccacgttcgctttcatggcctagaaattctcacattaatcgaagaaaaagaaaaaacagagtccatatagaaatacaatttagaaataactgaaattcgaaattaaaaataaggaatattagaagaggagactagaatccatatagaaatacaatttagaaatagttgaaattcggaattaaaaaattaggaatattagaagaggatactagagtccatatagaaatacaattaggaaataactgaaattcagaattaaaaataaggaatatatattatgaataaatttgttggatttttttaaacaacacttttatagaagttttcacacgaaatataccgttagcagtttgaaaaacgtgctaacggaaaacgaagagaatctaatcctataagcttaaacgagcgcacctgaagcgattcgaaggttttcacgttgcaggccatgattctccgtgaagcgggccgaggttgggtggtttacacatacgaggcccaacgtttcaaaggccacacgaaggaaatataacttcttcctttttaaaaaactagctaaaatacccgtgcgttgtaacgggtgaaaaaaattctaatgataatatacgttttttatgcataatcatgtcaatgacaatgtttgtattttaatgagcggcttgttttttttttataaacggtgtttttttttcttgcacgattttctcgcatttctttctaacagttttttttctagcatgtttttttccttttttttactaatgacgaaaaccatatttttctccccttttttttttgcttttctcacgtgttttttgcctattttttctgacaattactttctcgcatggttttttttttttgcctgttttttcggaatgttatttttttgcttttttccaatatatgagaatatatgacgaaataaaagccgggtagtagatggtaaaaaatcgatgtatcttatccgactcaagcgtccatcaaattagcttttttctgacaatttttttagagcgattttatatatatatagtgtttttttcttgcgtggctttttcaaaccattttatttagaaatggcgcattttttctgacatccttttcctcgtatgtttttttaaaaagtttttgccggcaatggaaataatttttctcacgcgtttttttattttttttaagaagatggaaaaacctcttcagtgtgttttctgtgcttttttctgacttttttctcacacgtttttttgacctttttattttctcgtgcattttttatttttaaatagttatattagattagagatagagaagagatttatactgattagaaattggactttgtttcgccctttccactttttttcttgcgtgcattttttattttatacgaactaactttttattttttacgaaccatttttttgccactttcttagggaatcggacgaacttttttagatgtttttttcggatttttttcgcctatacaggaatcagacttcttttctatttttaaaggaatcagatctagtgtttttttcaccacttttttttttccttttataggaatcggattttttttcccgtttgcatctacgttttttttcgccacttaggggaaatagacttttattgttgttgttttttgtgtggcttttctttttttttatgcacctttttgcctttgttctatcccctttatttattgtttttttaaaaaaaagaccaaaagcaccttattgcaagattatagggacttaaacgtaaatataaaaattacagggactcaaatgcaaatgtacaaaccaaaaaattaaaatcatattaaaatggaatgctctcgacatgtaggttccgtttttgcaaacagatcttcaatctggcacattaattttttttcaccaagatgtatgaaatatcacggtataaattgaaaccgagagaagtggtgcctagtatgtcggactcaaacgtgaggagtgggactcggatcagagtcggaccttttttttttctgagagggaacgaggagtcggacttttttttatttttattgatattttttttgaccgagtcggactttttttatcgctattttgttttttcttttctttttttcgcacgtttttgttcgcccggtttttttaatcggacaattttggttttttttcgcccgctttttttcccttgttctggataggacatatttggtttttctttttttttcgcactttttttcacccggtttttttatcggataaacttggttttttttcgctcgattttttacgaacgatggaagcacctctttttttttaagtagtagagaaaaaggaaaccgacataaagacaactatgctctctgtgaaaattcttcaagaatcacactcttatattcatacaactatatttttatttgtggacccgtttcacaaaactacattcaacgaggattcacccaggacccgtagctaacaattggagaacctggtacaaaatgcacaattaatcgtgccttaaaatttgatagccaaattctcatggaccctttatcgtgatcgacacgtatgacttgtataacgggagaagacggacagatggtctatcacgatgactcgtagagcgttattacatccatttctagtcgatttagcttcggtattaggcctgttgtattttccacttttagttatgggccttaatcctgatctattgggctttaatattccggttacaactaattaagtatacttaatactccatataattaagattttgggcccctaaattttgaggccctgaacagttgcacaccccgcacatgccgctctatggccctggattcaccccaagcatcctggcaagaagaaaaagataattcacccaagattgtaacttttgaaacacttggctgattaaaaaaaaagaaatttgctaacctttatttggttgaaaaatcagaggcccgatttgcagattttgaacccaccgatctgcttcgatattggtgcaccgatatcttctcctcccacttcgactatagcggcgacgaccccccaaccaattaggtatccgagttgggaccaaggtggagggagtgggaagatatgaaaattttacttggcttagaaggatggccatgggagttggcagcctagtagtagaagggtggtaaggcgatggcaccattgaagccgcaaaaggttgacaatggatggtgggcaggtgttgcagcaggggcaaagtggtgtgaatggttaggaagacgacgacagtgagggtgcctcgccaccaccggcttgaagagggtgtgaggcgaggagggagacggggaagtccgctgggactcacaagcgtcgtttgcaccttctaggttctagcaaccaacgaggctaggtggcgacaacagaggaggtgttggggaaggtgtgctcgcgtatggttcctcaatctcttgcgagggaaggtgtgctcacgtatggttcctcaatctcttgcgattttttttattattttttttagagaagggtattttttacccggcctctacatccaaccggatatatacggccattgaagtagggaacttagccccgcaaacaacccaatctgaaattcgctccatatgagatttgaactcaggaccttggggtactactcaggtcactgtaatcgatctcttgcgatggcggcagtgagaccggggagggagggtttagggttgggtgagcactgaacgaatctcaaagccaacggtctagaattcacaagatattttagggtgttctccatcaaatgtcaaataaaaatctagcattctcaaactacatcctacaagtgacttcttcttaggttcctattacgagtgcagattatgaaactgataatgacagttacatctactttactgtaccccatcacacaacaagacctcgatggaacagaacaatcgatgccaaacaaatgtcatgtcagaagacaatgttgcaagccggccacaatgtgctaaccctatccccctcccctgcccatccctgcatctttcttatccctccccgtgagccagccagccagccctgcatcccaatccatacgcacacacatgacaaaacaacacagagaaccgcacacacacagctctcgacctcgatccatctcgatcgatgcctcgatcgagacagaacaaaggcacgggagagggagagatcagaaccttgatctgtgtctgtctgcaatattttagcctaataatgcattcccccaacaggagcagcaccgaggccaaggccatgccatccactgcgtttgcatgcatcgatctcatcgacccattgtggccggcgttgttgcaaaagcgccggccggtcgccgccgtcgatcgacggatcgactggagcgtcgtgatcgtaatatatgagcgtgacgtgtaattttttgcgcgttcgtgatcggtcggtcgatcggtctggccggacaactgccgggctcgatcgattgatcatcaccggcgcggattgcgtaatcataggaaaactacaaaacctgaccaaacatgcaagaagaggatcatggtgtagtaggcactgtagcaggtcaaccgacaaccgatcgatgctgccattatcgatcgcaaacagtgcctgccagcatgctgttttaaatatctgtatgatgcatgctacttttgatcaggtgtttgattctttgcttttcttttcgatcttatcagagaggagagaaggaaatatgtatgtatataggtcttgtcatgtgttttgactttggctttcgttgtgtgctacgtgtcttttatacatcctgttattgacatgtaaggctactggagaggttttctttttccccttttctttttctttgtgttcttcaataggcattgagattcgataactaccatatatatttttaaaatataaatttacaccaatatactaactccatctcaaaatataataacgtttggctcgatattacttaacgtggattaataatcagtaagtgtactgcctcctcaaaagtggacaagtactagcccgatttgttcatgggctgctagccctgattgaggcttaattgggcctcaaaattaaggctaggaaaagcctaaaaaggattaacatatatcatgatcataatgaacaacaagggtacagtgttgttttggggcttcggataccagacattcaaaccccgggcttgagccttgcaaactagcattcagtgtagttcggatttttacttcgataaaccaatatagccaatataggccgaattgttacagtaagttatagtattcccacataactaaagtaaaaaaataatatgttgtagtgatattgagtacgtttccaataataaaaatcaataatcaccagcatttgaactctagatcattttttaattcataaattatgtgaagaacatgttagacatcaagctattgattggacatgaaaaaagagcattttggctactagtatcttgtagaattgcaaattaaactgaattagctgatcaaattaaccatttttcagctcagtaaatttggtttgagatggttaaaaaccaacatttatatttctgttattagcattttcataatataattaaccagtcaatccagcaaaaattacattgaggtatcagtacctcacggtaccaaatagtttacaatcgttggatctaactgggcaggatgtgcattgctagatccaacgatcagaaatgatttggtaccgtgaggtatcgatacctcgagatatttttttttgaccggagcaaatctctttccatggaaattgtggaggaaaacaagcatggttcgtctcatatttctccttataaattaaaatactacacttcttccgtgtatcatgctaatatttttttagaaaaactttcttgtatttgcaagtcatgaagaaattttgtgagcatgatattctattcttataactccttggggacgagaatcagtcgaactaggtgatttcccgtgctttactgcgaaaattattaaataactttatacacacacacacacacattacctataatataattcattgaattctacaaatcaacatctaattatctttcttcacattatttttaacacacacacacacacattacctataatataattcattgaattctacaaatcaacatctaattatctttcttcacattatttttaacacacacacacacattacctataatataattcattgaattctacaaatcaacatctaattatctttcttcacattatttttaacacacacacacacacacacacacacacatatatattcattgaattctacaaatcaacatctaattatctttcttcacattatttttaacatatagatatatatatgttaaaaataatgtgaagaaagataattagatgttgatttgcagaattcaatgaattataggtaatgttacatgcttgcataagttttgtatgtaattattgctagtggatgatgaggtagcacgtttgtatgttgagttttagaattagtgggttataactttatagtaagatatgattctcctatttcccgtcaaggtgatccttgtaaactatatttttagaatcgtgcgtttcaaaagaaactctaaattaggggcagccaggcagggcgcaatttggaacacatggaaaatgcagagaacaatttcccccctcctccacatttcctcctccctggctccagctgaaccgtcacagttccatatcccactttcctaaaggaaacaaagacgtacattcattttccgcattctcccatcgttttctctccccctctcctaaagcggtgtgaacatattcctctcatgccattggcaatggcaatgccactcgctcggctcaattcccctcgccatggccctcgatcgaaagggagagcagcgaccacctccgtcgttgacccatcgactgtctccgtcgccgccgtcgtcgtcgtcgtcgtcgtcccacgacgccgacgtcgcgccctcgccacatcacagcgacctcctcctcctcctcgcgcccggtcaaacccggtcgccccgcggcggggcacgcacgaacgcactgccgacgccgtggcgggcgcgcgcgggggcgagcgatggcgaggccacagggggagtccactactgcctttgccacacgcgcgcgcgcgctggctgtctcgcgcggcgccttgtttggctcaaattttctcggaaaaggaaagaacaatgggttgcatcgatcggccgcggttgcagctaagctttgcagatcgcgcgccactagctaagctgagacgactgagagctagtaagtgaggtggtagtagcagcttcgagctgatctcggctttgagttacttctcctttctcctacctcccacttgcaagtgtctgctgatctgccgcctccttgtgcgggagggaaaacgaaagaacacaaaaattaatcctttggtctcaacaagtggagagatcagtaaatgcttacttcatgcctagctagctagcccatcgaaccatataacaaaaagatttaaattttaccatcttacctactattggtctctatcattatcttctatcccttaattagctgacattttacaactctattttttttattaataaggggtatttcgatcttttacactccctactaagggcatgtttagttcccaaataaaattcttcgcgcagtcacgtcgaatgtttggatacatgcatagagtattaaatgtagaaaaaaaataattgcacagttcactaggaaattgcgagacgaatcttttaagcctaattgcgtcatgatttgacaatgtggtgctacagtaaacatttgctaatgacggattaattaggcttaataaattcgtctcgcaatttcctggcgaaatctgtaatttgttttgttattagactacgcttaatatttcaaatatgtgtccgtatatctgatatgatatgcaaaggaaattttttttgccaactaaacaggctctaatttatcaagtcaaagttagaaattgagtcttctaggatggaggtagtgctcctgtatatactcctttcgttttgaaatgtaggaggttgttgacttgggcataacttacttacacaaattggtgtaaatataaaagacataaatcatgttgaaatgccacatttaaaagttaattgtgtcatacatttagaaacaaatgtagtacctttctcttcttagtaattttttttcgaaccaaccaccgcacgattgtgtcgattttattgtatatagcagaaaaaaaatataaggttatatagtcctgtgaggctacgatcaggagaaaaacacaccactgctataacacatccttggagaaaaaagaactagctaagtgagcgagagaagtaaaaccctcaattagtgcagcaatcttcttagcaatttttttgaaccaaatttttttgtggaaaggtgaaaaagagttcactcttgtcttttagatccaagtccaacaaacatttctacacaccgatgtaagttgactcagctcactacctgcagcctgcctggactaaaataaagctggcaccatgcaactagtcaactagatagcaggattaaggcaccaagagagattctttcaagataatgatgatatattctccagttcgtcattaacgagctagcaccagtacacagcttcgatcgtcttcaccctgtttcttaattggccggacacaaacgcaacttcctccaacttcccctgatcgtatgcataattgcacgagctctcgctgaacgccaaaatacagcgccaaaaattccacaaaacccagcggatgatagctcgagatcaggcacgaaaacagttcagaaatctcatgcgctgggatcaattgttcacgtcatggtagaccattagaacgcatatacggatgcacgatggatttgaatcacatttatttcgtaccccgtcccgtattaattctaagccattcgtcaacggagatgcttagcctgcagaaaaattatttgcttttggaccacacagcctacagaggaaaaaaaaagcgtaagcagggagcactacgacactagtagtagctgtgaatgcacttccttgcatggagagaaaaagggtgcacgaacgagagcaatgtgactgtagaaaggtggtgtattggggcgaaggatagtacatcccatctggcatccgccactcgacttgttgttttcgcccttgaaaggaggagagaaaaaaaaattactccgttcgttccattttaagtacagccatgagtgtccatgtttaattttaatcgtccgtcttatttaaattgtttttataattagtatttttgttgttatgagatgataaaacatgaatatagtacttttattcgtgacttattttttaaattttttcaaaaaaatttaaataagatagacgatcaaaattaagagcaaaaaatcatgactgcacttaaaataagactgagggagtataatttagcgggcgagaacgaaagcgtaagcggaacggggtataccacactagctcgcgagcatgcacgcacacgtcgcgtcgcgattgggtgggcgtgtcatgtcttgtcaaataccggaaaaaaataaacatgctccaccaccgtcacctgaagctttggcctcacccaccatcagcaatccagcatgctctaatcaagcttagctaggttgatacgcatgcttgctaagcttacctagcttagctgcgtgcgccaatggccacggccaagcactgagatgtacagagaagggccacctctctaagctactctaccactagccgtagcgatcaagggacgaattattggccatgagatccactaataatacgggtcacgaaacaaaatttccccgaatgtgacggcgatttcctgtagcactatgaaaaaagttatctcctgatctctctcttccagtccatctgtccccaggctaagcatatgcaacagggattagggtcaacgtcgcgcatgcgctttaatctcttcgtcgatccatcggttttgcgagagatgaccatgtcgacattgctcattagcatgtacctcgcacaatgtggtttcttcacaggagattttgatatgcaattcgaatctcaggcatagtatttgactatttgggaggcctgaaattactgtcgttttaaggccacaaattaatccgcggtaattgcgtgtcctagagatcaactttggtgatacacatacatgatacatcgagctggatatatagttagctgaattagctagagtggcaagaacaaattcgatggctgagacagcacgaccaggtgcccctgcacaagagcctagctaattagctagctatctactgccagtttactactactactactactactactactactactactgctgttgttacattgtaattgtgcaatttgatgcagacaaaagttagctatatggtgattatattggatgtcaggatcagtgcatctgtagataacactgataagcctgcttcgctagctacaactgtcatgttatttgggtggtaattgatgcatggcttgtgtgctttcaagatcggttggattggatccttgaattgatacatggtctagctttgatctctgtgttggaagataatcttgttgatgacactctgacacttgtaaagagattggaagggcctgatgagcaacagtgcaaggtgtaaagatgaggagagcctcatagagttttccttccatcgtccaattcatcttggactttataaaaccaggaatgccacgcaatcttcagttcagagaaaataatttgacacaaaaagcaagtttttacatgagaggagccatcgatcaggcacatgtattgtgcccaatgcatgcagaaaccaacagaacctaacctgaactgaaaatttgtagagatttcatactggttcaggtttgtctaacaacattcaacccactttctatcaactcagattagagccacacaggttattttccacgagtccactataactgacaataccaatctgaaattctctactcatctactgaagatgtcatgtcccaacaatgcatttggttttgctggtgatacgggagaccatcgattaagcactggattaatattcgcatatctaatcatcatacttttttttggaaaaaaaaacaaacagggagaggggaactcccagcataatcatatattgatgatcaggaaataagacataattatcagtaggaccatatatttgaccatttgttccccttgaaaaatgcagtgcttcagaggatgtaatggctagtacaatggcttgatgtgcgagaggtctttaatgtgtcccagtctgaggctttgagcctcagcaaccagttttcgacagcctgatctgtccacaattaatcgtacttgtaatctgtaacatcctcttcagtcttaaaaaaatttggtcggtctaacccttcgatcggcccggctaaaagaaatgcagtgctttgagtacatataactacaaattgaaaggttaatgatccccacttgtgtctcataagtttgtgttaattgcatgaaatctgaacagttagctagttcaacaaagtctagctgaatctctacaatcgttgaccattaatattccaataggccggtccaataccaataaaataaattctaggtcaaacatggtcctgtgaagctgtttatactaactgtaacctttggactgtgacattgtataagaatattatagtaccactaaacttattcaataatcagggttcagttgctatttttgattattacacctcctaaccttaatcactttatacaggagttttatgatgtatgcaaaagtaaatttcacaaaactacaagtgcattgatcaatttattacaaaactacagatttaacattatattttcaaaaaactacagaatttatcacatcagaaaactacaaatttaacatcagttttatcacaaaacaacaacttttataacctcaatagtgctatggatatgaactctaaaatatctagttctttgctaacttcattatttaatctatagtttacgttaaatatctatatttttgttatacataattttaaatctgtagttttacaatagtttaattaaaatatctgttgttttgtactctatatgcaatctttgaaatggacgggacctgaaaagaggagacggatcctaagtccctgtcaggattccatttcaagtaattaatggtaaactaacgaacagtagtgtcaaatctgaaaactttgatttgttcgagtatatgacatgattctgaaacaagcatatataacagcaagaaacaaaattagctaatcatcaaaataaaaaaggcagctactagctgcttctacctataaccaccccaacatatgcgatgcgtcactcatagtcatcagtccttttatgtcaataatggaagggaagaaaagaaggatgtcacctcttttgcgaatgctttcatggtcttaggaggaggaactgtcatttccctttcattgggaaaaagtcaaaaataaacaatatatgcttgattaaaacatgtgatttcccaaagagaaagaggtgagtgcgtttcgtatgttgcgccggaccttccacgcatgctttgcttccggccaaagggaaaaaaaataaataaaaactttcaccctgtccctccaactcccacaagcaaaatgttttttgttttagaattctttacccttgttctgcaactagtatttgcacgaccactttacatgtctgaactcatcggcatgctctcacaaaccacttctagtggggagcaagaaaattgcctcaaaaagttgggtgtgccaaacgaaatgaccagatagctgaataattttgcgataattatttaaacgtataaataatgaactagctattatataaattaaaaatatttggaataatttcataagaaattcaaatgcagatatttgttttaagaaaaaaatgtattgtttagaaattcgagaagcgtgtgcattcctcaaaatcattggttaagaagagagaacagggtaagcaacttgaccagatctaccatctagagaccacagttgtaaaccatatttgtttttagaaacacctccctgacttatatttcctcgtttttcacatgcacgcttcgtaaaatgtaaaacgacatgtatttttttaaaaaataaaatttctaaaaaaagtagtttcaaaaatcaaattaatccattatttcaaaatttatgttagctaatgctaagggagggatcgtttcgtttaatgtacaggaagtagagttcccaacctccactccgtgcacgtaaaacaaaataatccattaacacataattaattaagcatcaactaatttttttaaaaaagattaatatcattttttgaaaaaacaacttttctatttttttaaaaaaatataatgtttagcaattttgaaaacgtatgtgcggaagcaaagggagtataagttgaaaaaggtgagtgcatgcatgcggaactcagcctaaaatctaccatctgtcactcaaaagcaacgtctcaacatgttaacaagggatccaacattgatccatcctgcgttcagacaacaaaagtctctagctagctagctaaagctatagcgattggcaatttattaccggagttaattcttcccttgaccagagccagagggcttcttcttccctcagcaagaagccactgtccgtcagctggtaggccggccgacaccggtatcaggcaggcttaatgactatgatgatctccaaacaatcccattcactacagtagtgtagcagcacagtagcagcagcaacagcagcacattgctgatctctctctctctctcgatggaggacaccacaattaagccaagagcaattaagccaagaggcagcttaggtgcttactgcttaatactcctacttgcttaatgccctcatctagctgcttgcaattgcccaccggccagctactagctaccaagtactaccaagtggatttggcatcattgtaacattgcagcacactgcactagagtgcatatgcatgcatgaaacactgcacaatgcctcctcctcctagctgtcactgcaatagccaatctcatgcagggtatcagagtgtactggtgctgatgcaggaggagtagatccaaaaattcttgagctgactcaacagatcagcggtccatacggcagggcacgccattgaagatggcattcaagctagtactcccagtagtattcaactcttgactttcacacagatcagtgagcagcgtcgtcgtctcagctgctgaagctgacagatgaggagttgaagactttgatctttactcaaaactctgaagacacgctctgtgttgctgtatttattgtcgtctaaatctctgaacctctctctctatcttcttctttgattagtattaatttctctcgctgcatgccataaaactcgcttgtacctgcagctgttacggaacgagaggagaggaaaaaaatggcgatgctaagctagcccaagatcgaagccaaagcttggaagctggtgaagttaactgaacgagaggttttcgcacatgcagcgtttgtcaaaggtgacaccaccgtgtttaactacgcctgaatgcgacaatcttgggagcaaaattttggctgcagattagctcgacgtggagtggctagagcaaagccgtactaatgctttacttactcgcgtaatctcgcagatcatgacaagtctgattaatcttgattgatcctgcaaccacgcacgcgagcgggcgatccatcgatcggtcccttttctgaacctgaatatggacgatcggaaacaagattttcttaacctgaatattgacgatcagaaacaagaaacgctgcatcctttcaagccacatctgaaagacagattgattgcttcgatttaatttactgcgatgctattacatctcaacagattgattaattgctctgctcgattgatcgagatcgttgaatctgaacattattcagagtccttgccgttgattttttctgctgcagtcggtggcgtcagacaaggggcatgtactgctgcgcagtgctaggtaattccgtgcgagtgcatgtagacgtcgtcgccgccatcgtatgtacggtcgtcctacacaacttgtttagatgttgcagcatagtcctgtacctgtaaaaatacccagaacaaaaaatctctctttttggaggttgccatccaaaaagatcgagaaaaatttcccccagcctagatggctagctagaaatgcaacttgctggtcctcctccacctcgtcctcctcctcgttgttgtcctcgccattttaccagcgtatcacgggacaatgacgtccgccacgctttctcgcgcaggccaatggagctgctagctatggacttacaatggcttttatttctgttatctctcttcagactcggtaacagtagaatttgtcatatttcatattagtttatttcagactttcagtatgaaaaaagtacaatggcttgcctttcttttgtctctgtcgctaggacagagctcctatacacgtccaagattgttcctttcaaaaaaaaatttcagctttgtacttgaacaaatctgacaaagtgacaaagtgcacgcggatatatatccatgtttaatttcaacattgaccaatgcccgtgccgacacggtacaattgtacaaagagcttgttctagtttagtaggacaggtacagatcaagagattaattaatttctgggttcttttgtgcagaaagtttgtatatttttctatcataagggctttggatatatcgatcaagagcatgagcatctgcttggaagttcttatgtgtgacaagatgctctcgtctggtccgattccaacttgctactgattactggtactcacatagtcgtacatgccaagaagacgagatagagcataattgaaaagtataatcaaaatgatggtagtattaattaattagccaataagcaaacccctgtgtcctggatccaatcgccgtccaacaacagggtcagctgggattacaataagctgggtaatcatcgaacgtgtacggaacgaagaatctattgcgtcagatgatgcccctgccgttggatcgacgaacaacggtcaggaacgaccacagggttaagcggaataggtagagatcgatgaaggtgtcaatttttttaaaaatttccgatgtaagtactttgacagccgtacaaatgtacaaagcaaggagtgagtaggaaagcattaatcctctgttgcagtacaagtgacaacttatcttcagaaataatataatggttatattccagcctctgtcgtttataattaaggtgttaggacaacaaaccctaaaaacctgtttgttaatatgatcaattataaacggattttctaattaacctacattcagttgaaaactaaagtcaaaatcttgtagattcctagccttttaatattcttcacgatctcaatatacttcaataacggtggcgacaactcatactagctaattaggattcggggtggagggagagctagaaaaggggtagttccccagtttagagaaaggtagcataggcttggcagtgagcagtaatgagaagactaaggtggcatggtggcaccggcgtaaccaaagctgcagggatgaaagacggtggtaggcaatggaggtagcagaagcataagaaagcggcagttaggtgctttgtggtagtggtgacggatccaacggcaggagccatcaaaaacatatgtgaaaaacggtgcgaggcaccaactatatgaagaagatgagtgaggaaggttggaagaaatggagggagaaaggcgatggtgttgggggctaaccagaagacattgtcagcatagcctccggcgatagggaggcggacgagtagtggcacatggtgcgggagagagcggtggaccaaaaagatggcagcgacaacggaagttgcgtggttccgaggaagatgagcacgtgaagccaatggaggtggactagtgaagatcagcaaatcgtcaaatttgatagaggaattctttttgcaaatccaatgggtatataggtagtcccaattataaatgtgtgttgctttctttgaagaaatatctctttggacataagacacacatactatcttgataacgagctttctcgagccgaggctagacatatgagtgtgctctttcgaacccacgctatcgacaacttacagaaacataccaacactattaggatgggttcttttcagattattgaaacggattagttgctccatcctttaaaagatacattttctcaaaaacttttttatactgtataacttagataacttgctttgagttatttatctattaagtttattcagtaaaatgtttaactcattcctgtaatcaagtagaaaatcagctcattaatcttttccaaactgagcccaaaacaagcaaaccaaacaagttcaattaccatcatactcacaaaatccagggtaaagaaagcgtcaactctccaacacttctatgttgtcgtgtgtagacgattattcgggttgggtaaagtagtactctacatagtacatacacccctcgtactgtacaggccgtcctacataataattaaggaaaattggagccatgccattataattttgtaaagtttaagatatgccatcctaactcacatgttattgatttatgtgggtcctacatgtcattgagataccgatggcatatctcaaactttacaaaattataatggcatggttccaaattagcctaattattactacctcccacacgtactcctacaccactacgactactccagttaaatttaacagcagctccatttatatctcgctgaacgaaaccactgtagcccgtgcccggccggtcgtctaccgatgaaaaccacttgttcagatccaccctcgcggtcgtcacggtaaaagtacaaattttcccggccctccgcatgtaacctccgtacgtgtacgtgtgtgcgcggctcctcgatcgcctgatccccaactcggtcgccacaaacagcgcccggccccgcgcgcccgcggccacaaacgcaaaggccccaacccaaccgcgcgcgcgaggcgggcatggcagctatgcgcagtggagcgtgggggccagcctcgcgcgcgcgcggactggctacaccactgcacacacatacactgggtggcgcctaccacctgtcgcgtgtcgtctccctccgcgcgcgcgcactgcacgggtcgtcgcgggggcgcggctataaatacgcctcctcccccgctgcggagaggagaccagggcaagcagcagtagcaaagcagaagcagaggcagaggcagcacagcttgatcgttcttccatcgatcgatcggcagctagcgctcacagtactctcgatcgctcgctcgcgctggtccgttgattcgttgtcctagatagatagctaaaggggggccatggcatcgacgacagcgccgtcgaggaccaactctcgggtgaactactcgaacgagatccatgacctctccaccgtgcagagcgtctccgccgtccccagcgtctactaccccgagaaatccttcgccgacatcttccctcctaacctcctcaagaaggtatatatatataatcaagcaataatcctagctagttagcaacgatcgatcgatgatcatcaatcaggatcgagctagctagctagcaaatcaagaacaacaacaagaagaaggagaagataaagtatatatatggtgtacgatgatgtgtgcggcaggtgatatcggaggtggtggcgacgttcctgcttgtgttcgtgacgtgcggggcggcgtccatctacggcgaggacatgaagcgcatctcgcagctggggcagtcggtggtcggtggcctcatcgtcaccgtcatgatctacgccaccggccacatctccggcgcccacatgaacccggccgtcaccctctccttcgccttcttccggcatttcccctggattcaggtaacttaattcatgcacatgcatgaacacatcgatcactcatgcctgctggctatctatctcctttactttatttccattttccatatctcctctccctttctttcttgctttctttcttcctttttcatgggttgtttcggatgaaaaagaaaactctatttcctcaaaaaaaaaaagaaaagaaaaaaggagtttccattaattggttgagttctactaactagtactgttagttagtactcagctccttaatttactccttgtgtttggacatcgatgcaacctcatatattaaccagctacttttcatctccaaatatatactagtaccaaaattctttttcaaaaatcactgtacaaaaatatattttccattatctttcgaaaaaaaaaacttcccgtgaataggagttgtcagcatgtactcctggacgtgcacaggaattagtcacggcttaattaagcaaaactttggagcctacctggcatctaccactccttgaaaaataaatcgcatccactgtacacatggacgatgcataaccttctgacaactgaacatattcgaagcagccagccaaatagttcatcctattcatcaagtagctaggacacacaagttgataaaagagtatataggactggctcataataatgccataaaatatactttccttttttttttgcgaactataaaatatgttttctgcctcagcatatttgtccttacctagtctggcatgaggccagtagcatgcatgaggaattagcaagctgacaaaaaataattggcattactggcaacatgctgggctaatcacaacatgtgaacaagcccatcattcatcagatcgaaccaaggctctaggtaattaaaaaaggacaaaattagaacaaaaaaaaaggagaataagacaatcagtagtagtagtactttttagatgagaaggataaggcaacttgatgcatgatcctctcccatgattaattagctcataattaattcggcttaccatgaaagcctcaatgagttgccactaaccccaaccaccaccacgtaccagcctaagctaaggagagggggtttgacattcgcatggttcccttgttaaccatgtgatttttgatcattgatatccttaatatatttatatgcatacatacggccttgctccctagcaaccatattcccaattattgcgaagccgttcttgcttgtaggtcacaaatacaacatctcacgtacgtacttgagctaaccaaaccatcggccgtgccaacaatggcattaaagtggaatagttctggaatcagccatgatgatagaacccaaatttcaaaaaaagtataacttccagcctctgcaaaaccacgaccatagataataatgcctatatatgcttagaaagttgccgggctttagctatgaaaggcacgtgtgcacgcttctgaatcacgtacgtgccctcaatctgccgtgaaaccacgccggccgccctttcggcgagaagaaattattcgatccgatgcgatgcgatagatgctgtgctcgctcttgcgtgccagtctctcgccacacgcgagcatggctagctaaggatctatagctaattaagctacttgcagcatgtcgatcaatctgacccaacttgcccatacagttagccagccagccatattgcatacttgcatgtctgaatcctgatcgatctgagtgatgcccagagatagatagatagatagatagatacgattattcattctctgcagcgatagatttagatcaagagggggagttcaagaagactccaaagattcgtacgctcttttaattttttttctcccttttcttcccatgtctcgatcggccgtataatcgatcggtcgcgaggagcggcgtgcattgcgttcgcggtcacatcacgatcgtggagctagcaatatatatagctttggttgtgtggcgttttcgatcggatcctctaagcaaagcataatattattgagcgtagtacactacggccgtcggccgtgtggcttatacgtattcgcggctgtgtgactgtggtgtggtggtgtgtggtttgcaggtgccgttctactgggcggcgcagttcacgggggcgatgtgcgcggcgttcgtgctgcgggcggtgctgtacccgatcgaggtgttggggacgacgacgccgacggggccgcactggcacgccctcgtcatcgagatcgtcgtcaccttcaacatgatgttcgtcacctgcgccgttgccaccgactccagagcggtaaatataataatacatttactcacaagattaattaattggcttcttaaatctgctgtaaataattaattacaaaaaaattaattgagatttggtttaattttggttgcaggtgggtgagttggcggggttagcagtcggttccgcggtttgcattacgtcgatcttcgcagggtaattaatgaatcgattactaatgaccacccctaaacttgggaagaattaactagcaccggattagttatttaattaaccgtaatcaaaatattttagtaaccactagtacgctgcatgtagtgggtaatagctaaccatcgtggcttttcaacaaacctctggaaaatctagcttagctgacgacattctttggtagaatcttcgttgttcagcccacataattatttttttttctacagagaatttaaagcgccatatttataacaaggtgtcacacacagactgacgtagagcagagccggactcagatgacttatattagtatacacagtacttagatagttaggttcaaggcacatgcaccaagctagctatgtctctcacatcgatcagccattaagctactgtttaattatgtacttcacaaaacgacgttgctaacatggactcctgattagcctgtacaaaccattctttggacctcctaacactcacacacattattcctgaccgtatcactacaaggacacaacttgcatgtactgactgaaactaaaaaaacttctaaaaaatatataaaataagaaaaggggtaattaaccatagtataaagtagagacgagtagtgaaaaagatcagtatgtgttgattaatggggatgtatagctgattaagacgcggcgaaatacgacgcgagtggaaattgcaggccggtgtcaggaggatcgatgaacccggcgaggacgctggcgccggcggtggccagcaacgtctacaccggcctctggatctacttcctcggccccgtcgtcggcaccctctccggcgcatgggtctacacctacatccgcttcgaggaggcccccgccgccgccggcggcgccgccccccagaagctctcctccttcaagctccgccgcttgcagagccagtccatggccgccgacgagttcgacaacgtctaatcgccctgacgccatggacccacaccgtactgctatactgtatacgtatatacatatgtatgtatgtactgcacgcgtacgtacgtacgcacgtgcacgagcgcgggaagccattgtttgtacgatcgacgactctaccaagtcgaaatgtaatgtgtacggtgtctgtgtacgtgtggtggtgctgtgtgtacgtgggcccgctctgcttgaagaagaagagagagcttgagctagctatacgtgtatacatgtaccgtgtactatacgtacgtgcgtatttgtcttttttttttcctctcttccctgcgcctacgtgcgtatgtacgtacgctttctctcgctggtataatcagctggcgatcgatagcggcaaaaatatgttatgtgttcgtgtcagtctctttggctttgtattaaaaatcaatctgagttaatgaaggagctgagctttgcttgtcattgatttggggtgaaatttttgtgcggtattagttgagaatttgtgggctccattgaagatttaccttttggttttataacacttaccaatatagcactatgtccctagcctctcactatttatttttatggatgcatatgaacagcttttgtaaatagagatattactaattactttttgtctgcttattgttacctgaagatcaatcatagtgggtgctttgatcgatcatttggtgatgatagcaccatcatcaattaaaagcatgggtttaaacatatgttactgacagtttaattaattaattaagtcttgttgactataacttaaaggagtgaaataatttaaaatgacgactctgagatgggaattcaactactgcaagtaaccctgctggtttgctgctcttgttttcatcgatgcttgcaacacacacacaatcatgcacacatgtcgttaattcgtaggaagctgagagatttggttgttagaaaaaggtggatgaaggagaccagcagcaaagttgctttgcctaggcaacgtgaaagcacctgcagagtggtcaaaattctttccacttgacacagtaacattccaaaacagaaaaaaaaaagagaaaaggttaagaagcttcctcccactatatgaaaaaaagaaaagaacaacagtgtccactgaagtaaattacaaatagtcaaatactgtaccttcaataatacatgtgggacagaagcactacaagaaaagaattaagagcaggcaagtgattgttattttcatgttcgtgatttatatgttcttccactatacctcttgtcatccatgactcctgctacttgatgtacagggagaaagttatatccttttccttgactttttgacttggttaaaattttgtctctcttctccaaaatcacatcgtttgttatttatccgccaataactctataaactggataagagtttgtctcttcgcttgatgactattttgacttaaaaaaataaatattagggaaggacctaatatcaaataaactagcatggtgacccgcacagatagcgcagctaatatcactatattttttctcaaataatagcttaaatatttttcacatttatacttaaatatattaaaatggcaacaaaattttaaatctattatattattaaaggaatagaaaaaggagcctccatattcgctctcatggcctagaaattcccacattgatcggagaaaaagaaaaaaacagagtccatataggaatacaatttagaaatagctgaaattcggaattaaaaaacaagaaatattagaagagaggactagagtccatatagaaatacaatttagaaatagttgaaattcggaatttaaaaataaggaatattagaagaggagactagagtccatatagaaatacaattaggaaataactgaaattcggaattaaaaataaggaatattagaagtagagtatagagtacacatagtacatatagagtataagtaaattttatttcgggctactatattatatatgttcaccaaagttgcacaatagatcatgccagactcgccaagaagaattatatatgtcctgacgtaatgatttattatttttaactagaaaaaggaatctattaacttattaaaggaatagaaaaaggaacctccacgttcgctctca

SEQ ID NO: 9255 - DNA, 10611 bp, Oryza sativa
tgaggaaaattagaagtttatatatgtagaaaagttttggatgtgatgtgatgtgatggaaagttagaagtttagggtagttgagggtgaactaaatacggccagagtaagaataagaatttacggagaatgatgtcattgaagtggttgttttatctttaactatactaggcatgtgccctaattaagactttcccctattcacactttatagcatttcatataaaaatatcataaattaaatttatttttaaatttaatatactaaaattcttatacaatgatgttactcaaatttgtactcctttaatttcgcataaacttaacttgcgttccatggaatgtcatggaatcactggttaatctatgtgctaattgcagcatatattggttggttggacctacatgtcaatgagacgcattaagaaaatgcaggttaattgtttatccatgtagaatggttactataacagatcgtatatatccagaaaattttggccttgtgctatttcggaccttaggatgtaaagtccaaattaatgattgatgcatggatcacaagcgcactactacaaactcaggtctccatcgggtcattttctattagggatgtctcatgtatatatagtgcttgtttactcatgggatcacctttgtgatgtgtgttccaatggaggtctcctgaagtggtgtctggaatcttggaaatttttttatcattgataggtttattactgctggtaaaaaataatgtgaaaagcagggagcacacgcagcttccttctgtcattttccttcaccacaattaaggtgactttggaaagtcagggttcagagttcagacatggtttgacataagtaataatatttatgttactaatcaacccaagataattaagtgagattaattagctgattaagccaaatgaaagtaggaggaaagagggtggcatggcaagtccagtacaactctgctggatttgatagggcatgggttagtgcgtctagctttataattagatggaacaaaaagattggaatatgcattttgggcctcatgttttgcttctccaattcatatggaggcaagcatatacatttagcccgtttattattagcctctagttcatactggccgttttgtttccagactaagaatctcataaagtttttttaccaggatttttgtaggtaagctttttagctgtacgaaatggtgtgcacctcacaagcgaaagatgctctgtttttttagttaggatgtcacatgtaacggttcaggtatactttttaattttctttatttgatcaatgcgtgagtttctttttttcaccttttcatagaaatttccagccttttatctttcaaagattaatgcggagacttctagaagaacatgtcaatatgtactatatataaaaagaagattgttgcagtgttttcccacaattaagaaaatgacatgaacttttgaaacacaaacttaatgatttctcatatgcgtaaactttgtctctaaaggtgctaccataatattttaattgaactggctgttagtctagctttgctctctatttattttttgtaggtaggatatgatctcgtccacagatccaaatgttcccggttccaacagcaaggaactataagtgcgcctctcttttccaaagaaagtaaaaaatttaatatagattaaccattgatgggctaaattacctggtacttgatacactctctggtccacagatggagactgattaattctaagccactactttagcttgtcatgcgtttgtgtgtaggtgatttatacttcggtaaagcccacttagctcgaatcagaagctgtcatcttattcgacacgcagctagtatatatggatgtatctccatgatactgacctgcatctccattgttgttgccattttctgaaagcaatccccattaccattttcttctctcctggtgttggtcttagcaggccaacagcaaactaaccgtggagtttgttcgttttgagaaaccacgtacatatatataaactttgttcaaagaaattagccaatttctttgctagtggtgaggatactgtttagtttctacgcactttggtagcaaattctatgatcgatttgggtgcgtatgtgccattcgtgtaatcgtaaaagaaaaacatatatgattgactcagtatggatgtgcaaacacatataattcaagcctttcaatccactggtagtgatcaggatatatactatttagtttctacgtagtttggtagcaaattctacgaccgatttggatacgtatgtgcctttcgtgtaatcgtaaaaaaaacatatatgattgactcaggatagatgtgcaagcacatacttccttagttgatagatgatgccgtctttcgaatatatgtttaaccattcgttttattcaaaaaatttatataaatgtataagatatatatcatgtttaaagtattttgagtgctaaaacaactcacaacggaataaattataattacataatttttttaataacacaaattgtcaaacgtgtgataaaaagtcaatgacgtcatctattaaaaaacagatagtataattcaagccattccactggtggcgaggatactatttagtttctacgcactttggttgtaaattctatgattgatgcatgtacgtttgtgttttctattagcctcacctgttacacatgttccctaataagccaaaatagcttattaggaaataaaaaattaatttgtatgtaaaacttttgtatatatgtttttagtgatttaaaagctaatataaaaaaactatgttgaaatatcttaaaattaacttcaaaattaagtttaaaaatcaaattttgattttggttttagcttattaggccaaacggtggagccctatgtaatcgaaaaaaaatcaataattgacttggatgcatgcatacatatataactagccagatgggacaaacccccaacttatgccgatgatatgatctactaaaataatatttttttcaaaatcacatagatactatcacgaaattctgtaggtactacgccatccaaactggaataaaagttccttaactactaattccaagcgtgtagcaccattgcgcatagtatcctgttattcctgtgaaagcatcatacaccaagagtggagccaattggaacacatgaagataacttgcatgatgttaggcatttttttatggttaaaaactatatcattacggcaacgccaaattgaccaacataaagcactagctccaaacaaaatcgtttttttttttgtctaggcactccccttaactggtcaccaaaaatatcttttacattgtggggagggggatgttgaaggcaaagaagacacatcgccaagcaaaatgtgcaacatgacagtcaaaaaaaaaatgttggatggtctcttatgtattaaaaaacaacattgcttgtttcccctccaatttctctttataagattatctttcgttaagattactttatatggatatatacctgaaattgacgaatgaaagaggatacggagcagcacggacagggatcgagctagttggacaaccgttagcagctagctgagtgaaattggccggttcagtaagaaaattaagtagagtatgtggatttggagacagcagtaacctgcatgcattccctgtccgtgaggagaaggagtgcgtaccagacgaaaggcggcggcagctgctggatcgccgaagagacgagggcggcggtcggctgcggcgcttgcccgatggctccgtgagaaggcagatgccgccggctagctccgtggcgacgctggtccggcgagggcggcgaagatggcgccgcgatttccctcgctggctcgacaagaaagcggcgacgctggccgcaggctccgcaagaaggcggtgtcggcgccgacgaacctcacgaggaggcgatgaagatttggggattttgggacgatgggtgcgctgattggttaggagcgatgacggaggggatcggggtgatgcggctatgaggcgtagacggatggatcgatgaacccgtggacatcgtcccggacggtgcatcaagggtgaggtcctgtagtactgtagcaggctttctgggctgagaatcgtcgattcactgttggtagtgggtcacaaaaactaaagatttaatatgatatgatatgattcaagtcaatggttttttttttaagaagggcaagagctttgaggatctgaaaagctttcaagtcaatggtcttttggtgagcatactttttagtttctacacatttcagttgcaaattgtcctattgatttgagtgcacataagccttccatttcataaagaaaacatctgcaaatgactcggatgatatgcaaacccatataataattcaagccatcatgctgggacttggatgtcagcgacaaccactgtatagacagtactgcaagacagtccctatccatgtgtgttggtacttgtaatgaggatactattcagtttctacgcactttgtttacaaattctatgattgatttggatgcgcatgtgtttatgtatgcgttttccatataatataatcggaaaaaaaagttctacgattgactcgagccaatttgattcgagccaatttcctagtgggcaggatactgcttagtttcacggtttgattaattgcaaattctataaatggcgcttgttcgtgttcttgttccatgtaatcggaaaaaagaatatgatttgcacatatacattgtaatggatcaagctcatacaattgaagattgactgggtgggtgaattaagaataaaacactgcacgggtcagatatatatttcgggattggctcggtttgtggttacctaagaaaagtaccggatgacacttacggtgggaaaggggtgcaagaggatgactccgttttcaaaatagtagacaaatgatagaaaaggttgtgtgtgtgtgttttgggctagtttaccacacagaaatcagaaatgttaactttcggccttgctgcatggctgatggctagttgatacccagactgcccaggccgtcatcttatctgaagcaattggcccatatcaccacatgcatcggccgaaagggcccgacgtccaacaggaactcactatttttggcccaatattaaacacgagagtggcgactggctgctttgggccggctctatgggaaacaaaggccgtcttctaagcccaccacttatttaaaatttatttgcatctgattcatgatcaatttagggtgtataggtatgcaacattctgcaatttatttggttaaaaaactttcaaatgcaattatattataataaaatgtgatcagcagcatatttctctcaactaccccattgatatcttatttgtttcttgcatggctgcatgtatttttttttagaattacactgaacaatacagacactcacaacgcacgcacactcacccctatgaatgcacgcgcgtaaatcctacccctataaacattttcgaagactgggccagcaaatcctgtattggacagctgtgggagtgcatgtaggatcgaagaacatggagcgggaagaccaattaccaaagcgactccaggactgaatatcgatgcagagttatgaagtttgatcacgcccgcgttattttcgtagtctcgctgcccataacaaatgtgacgatcaaaaccgaatggaaaactatttgacagcttggttgcgctagcactatgagcttatactgaaatcaagggcatgtttggaaaacttaaaattctaagcaagaactggttggtagccagtttcagagaatataaaaaggttgggttttccagcttctgggtctgggttctagttcattttctagattctataactatggattcttcgaatttagaccaaatgctgaattatttgatgtagcttctgattttacgagaagctacagcagctagaaactcttccaaatatgcaacaaatcggatggataatcatcgaaactagaataataaattttattgtttgaaactgagatattagatcaccttggaacgctgatctggaggcaagtcggatggatggattagggatcgacttaccgccggtaaccgcgcggttaccgtggttaccgggcttaccgcgggggtacggtaatataaataccgcggtaacctccttaaattcaaataaatttaaaaaataatttatttttttgataaattttgcgcagtttcatacggttttcacggttaccgcggttaccgcgcagtaaccgtgcttaccgccggggcgcggtaaccccggctccggcggtttgggaaaccctggatggatattcatcgaaaccggaataaactttatttggtggatagatatccatcgttcattttgagtttttttaaacatttaaactattcgtcttattcaaaagattataaaattgttatctattatattattaaaatggctttgaaaggaggtaccacgttcgttgtgggggctagaaattctcacattaatcggagaaaaagaaaatgagagtccaagtagaaataaaatttaaaaatagctgaaattcagaattaaaaataagcaatattgagagaagagtccatataagaacccaatacaagattaatctaaattcgaaataaaaataaaataaaatccgaaattagaaaagaaaatgagagtccaagtaggaatacaattttaaaattactgaaattcggaattaaaaataaggaatattgagagaagagtcgatataagaacacaacacgagactaattaatattcggaataaaaataaaaataaaatccaaaattggaaaaaagaaaacaagagttcaagtaggaatacaatttaaaattaactaaaattcggaattaaaaataagcaatattgaaagaagaatccatataagagcccactacgagattaattaaaattgagaatgaaaattaaaataatatccaaaattagaaaaattataagagggttcaagtaggtacaattttgaaacaacttaaattcaaaaataaaaaaataaattatgaaattagaaaaataaaaaagatttcaattaggaatacaatttataaataactaaaattggtgataaaaaatagactattgaaaaaaaaaagaccatataaaacacatgatgagataaaataagtaacagatagggatagcaatcgggcgcgacgggcacgggtagtgcctacccatacctgtgcccatgagattatttgtgcccgtgggtatacccattactacatgacgggtaaggatgattgcccatgcccattgccagcgggcgccttgtgcccacgggcgtgtccgtttacccgacacaacaaaagcagtggaacaacaagtctacaagcttctaagttcgaatcgaacttaaaacatcaaatattctccgtctcaatgtggtgtctctcctctggcggcgatagagtaaggggaagagaaataataaggaaaataaaagggaaaccgtagaaaacaaagaacatggcttatgtattctagtggattttgctcctcgcctacatgtaagttagactttacgggtaaacgggcaaaacgggcatgggtagtgattacccatacacatacccatttacctatcgggcatagcttttgacccaataagatacccatgggtataaaatggagaacaaacccaaccctaatagagtttttacccacgggtaaacgggcaaacgggcagaattgccatccctagtaacaggcctataaaggagtagtgtggtggcggttgatacaacatataaaaactgttaataaaacaccaaatagaatcctaatgacgattaaaatgaggaacgacaggcaggctgtaaagctgacgggcaagacggttgcttgaacttctagaaagtaaaaaaattaaaagagagttcaagtaggaatacaattttgaaacaacttaaattcaaaaataaaaaataaattctgaaattagaaaaataaaaaagatttcgattaggaatacaatttataaataactaaaattggtgataaaaaatagactattgaaaaaaaaagaccatctaaaacacatgatgagataaaataagtaacaggcctataaaggagtagtgtggtggcggttgatacaacatataaaaactgttaataaaacatcaaatagaatcctaatgacgattaaaatgaggaacgacaggcaggccgtaaagctgacgggcaaggcggttgctggaacttctagaaagtaaaaaaataaatcccattgataattataattgatttttaaattcttaatgacaataaaaaggagaaacagagcgtggggtgtataggagtgtagttgcagagccactaatggttggcaagacttctagaaaataaaaaatgaattccaatgatagatatgttcgatttttagaatctcaatgataataaagagtaggcggcggatgggctgtagaggagtatacaggcatcgtttgacgggacttctaaaaattataaaaaatgaaacccaacaagacaataaactctaaaaactacaaggagaaaatttttatatgttcggaacttctaaaaagtaaaaaaaacccaatgataatcatgttcgattttaaactctgtgacaataaaatagggaggtagcgggcgagccacaaaaggagtacaatggcaaagccgctgatggtttggctggacttctataaagtaaaaaatgaacccaaacaataattatgtttgatttttaaaatcccaataacaataaagagaaaagacagtgaacgggtcgtagagaagtataatgacagcgtttgacgggacttatagaaattataaaaacgaaacccaacgaaacaataaactctaaaaactataagatttaatttttagaggtttcaaggtgaatgaatagaaatagtggtagatcgagcaagcaaataaagaaggatatgacagaagtaaggggtagcagctggcgtgacttttgaaaactatataattagaaatacagggatggtaaggtttggtctttcaaaattttaagacaacgacatagctatttaataaatttgaagtaaaatcatactgaaaaatatatgattttgtttaggtgctagccgcgtaattgcacgggccacccagctagtttattttatttgtgacttgctttattattaaaagtatattaactatgatttatcttttttatatttatactaatttttaaataagacggataatccaacgttataactaaaacaaatcaaaatgacgaataatttatggcggaaggggtacaaagcatgcgtgtgcgttcatcctcatgtcggtacacgaagacgttttcacgccgacgccgacgcggcggcgcgccgcctctcctccctctcgagcagccgcgcgaggaggagctcgtgcggcacgctggtcccgaaccctgcgacgcgctcgtcgaacgcggccatgctggcgtgcacgtgcggcagcgcgtccggctccacgacctcctcgccggccatggcggagatcgccctcgtcccggcggcgcaggagcccagtatcacgtcgagcagccccggcgtcgcgccgtgcacgaacgggccgccgacgaccgacgacgggaagtccctctcaaacccggcctccatcacggccatccgcgccttcatctcccgcaccgcctccgcccgctcctccggcgtcggcgcgagcaccgccgccgcgcgcgacagcggcgacacctcgccgtggaagaacctcgcccagaacctggccgcggcgcgagcgcgcggggacgacggcggcggaagcagccgcggcgcctgtggccacacctcgtcgacgtactcgaggatgacgagcgactcggcgagggggcagccgccgccgccgccgtcgtcgtcgacgacgaccagcaccgggaccttcccggcgtgggcggggttgaggcgcagcagcagcgtctcgctcttgcgctcgaggtcctcctcgacgtactcgtagcgcacgcccttgagctccagcgcgttcctggccatggcggcgtgcgcgctgccccacgcgccgtacagcttcacctccttgggctgcgccgccgccgccaccgccgccgtcgtcatcgccatgcttgtgatcttcgtctactgtgctggtgagttgctgtgagtttcttctacttgtccatggatgataaattcatcgatgaatatatattcttgcggatgctgatcttcttgcggattaagaaatggatttggtttttgcaattgaaattggaatgctataagggaggcacgtgtatggtgttagaatggaaatctttcgacgtggctgtgcttgttcggcaagaaaatgttttaatttgttgattactctagtcgagtagtggagttggtatccgatcctaaaatattcatgcatcgagtataagctggtctgtttgataagcctacaagatctttttccacgaattaccccctcaacaattacgtcattcgatttttaaccctgaactccaatactagttatttttaa

SEQ ID NO: 9256 - DNA, 10235 bp, Oryza sativa
  unsure (1)..(10235): unsure at all n locations
tccatacgcgattacagaacgtgggcacgatgacccaacttacgcggacacgatcctttctcagcagatgccatcccaaatgctaggatcgtggccacgcggcgtcgtcgacgcctaggccgagctccgccgagtcgccgacgctgatctggggagcgaggctatcgtctcctccctttggatccacggcgacgagaggagaggggaaaagggagaaggaggtgccgtcgtttgtgggctggccgccggttgctcgatgtcgtccgcggcgccggcgtgggttgtcgtcgtcctccaccgccttgcccctcgcctgtgccgcggcctccgcctgctggagctgcgcgtggagcaccggcgcagtggagagggcgaggagctcgctcgttctagccgctcccttctctcccgtatctcgtcgaccaccgcgagtcactccctcctctcccactggtgccgcgcgccgctgccaactcttccgtctcccgccggcgccgcgcgtcgctccctcctcacccgtcggccgccgcgcgccgcccctcctcactcgcgcctggagagaggacaaaggagaggggagagagatgaaggggagtcggggagagaggaagaagaagaggaggggcgaggatgacatgtgggtcccacgtgggcccccaccattttttattaatttgtgtgtgaaactgacatgtgggtcccatgggttttattattttttttctagatcgaattgccatgtaagcaccacgtcagatgaagaccgagtcaaattagccacgtaggcgccacgtcagccaaaaccaccctcaaacccatcgagggacttaatttacaccggttttgatagttgagggacccgttgtgtctggtttttcggttgagggacaaaagtcgaattcgttgacaagttaagggacctcagataaacttattcctttgggaggccattaccaagctcagagtgttaatgtacaggggattgctatttagcacacacattttttactactttttttgtgaaagcttttatatgtaaaaatttcatctggaaacttcatttgaaaatttttcttctcaaacttttcataagaaactttggcgcgggctttatggattgcttataagcaaatgttataaaataaacaatgattaaaaaataccacaaaaactaacttcaaaattagtttttaaaatagattttggctaaaaaaatcacaatgaagaaaaacacaaatcaacttaaaaataaattttaaaatttaaatttaggcttataaatatgagcctaagcgaaacaatggggctagtagtatttttatgatatggaagggaggaagaagaataacgtgtgttgaactattgatcaccagatggtttcatagaaaaactactcctacctgatactattaccatgtactctctccccccaatccagatttgtagtactgagtggtttgatatatattaggacggaggtaggtagtactacgtgtcatgttcactatagaatcagtagttaattgtctaagtttgttgtagctaaacaaacgatcaattatatgtagtattattgtgtatagatatggcatgacgagattatatcgacagtaaccgtctaaacagcttttccctcaaaaaaaaaaccgtctaaacagctattcgtatcatacgggagaaaatcctataaaatccgatcgagctttgaaacagacgcacatgtcaccagcttgtggctgtgtctgcttacagatggcgatttgttgatgcatatggaatggaagccgccgtctgtttcatggcagccaacagtatacggctaaatatagcttgcagattcctaagctgatttgtgcctttatcactcgattaattaagcagagataattgtaccatgagagagcagttgccagatgataagtagccttcaaatggtgctaaccttatcacttctacttggcactagcagtgtgatgtcatcatgattaaaatggtggtccatcagaagttcagaactccattggctgaccatattattcagagcgaggtcatcatgtgtggcaacttgcaagcaacggaagaacttgatgggtaattttaaattcttcccgagaaaacagcatgatctgcactgtgtaattaactaaaacggatttctttgngtcacagacaggctccaaatgccatcctgaccaagcaatagaagggaaaaaaaaaaagcaagagcacacagatgcaagacagtctaagtcagaactcagaaataacaatacaggcccatttcaatatacaaatgccatccctcttcaaggtaaagtctttatactgaagattatatcattcagtgtgctgctagctctgactcagtttggagcacttgctttctgtgggcattgctgttttgagccacttcagtcaagctggcattgcacatccgacagcctggtccatgagcacagctcactgctccttttagaatacaatgacagccaaagcatcaccattagctagagtacgtgacagaaaaaataaagctttgagaatgtgatggccaactcactgctgcatgtaatgctgttttcagctcactttgtccatcagcatggagaagcaacaggcacaattcagaggaaactaaatctgactagatatttctttttaacacaatgctttatttgctataccttggtacaagatggcatcccccacaaaagggtttgtgtatatgaacatgaaaaagacttctactgactaccaacacaaatgtagttagaaaaatcaggcaatactacaacatgacatgagctttgtgcactggcaggaagaacactgcttaattggccttactctgctctgctagattgagcttaatcggtcttgctctgctctgccacattgagcttaatcgggcgcgcctcgaatccacctcccttgcggttctcaagagtgtaaggcatgtatgttccgaggatcttgtcccacatgacaaagaagggctgcgagaagttgtacttgttgccatagagctggtggtgaatgtcatggtaggcgctgttgttgctgaagaagacatggaggatgttgcccgggagccacaggccgcagtggtcatcgacggtcttgatggtcgcaaacgagaagaagaatatggccgtcttaggagtcatgccggcgatgaggaaggagagggcgccgccgatggtgtccaggatgaggccctcaaggggatggttgtagagagctccaaaggcatacgggactacaagagtgtggtgcttggagtggacatgcttgtacaagaacttgttgacatgcatatatctgtgcatgaagtattgccatgtgtccataacaaacatcgcaatgatgaattgcaatgctatcacaagggccggaggctgcttcctcacagtaccactttcatcaccaatgatctacattttggggaaattgcaagattgtaagtacaataatcacataagaagtttcatcaagtagaacgaaagtaggttcaaagagaaacttctattagtagtgggaaccgttgcatactatttcaaactttattgttttctagatcttcatatattagcttgcgcaaaatgtttgaaatccaatataataaatttccccatgttaaagaaaccaaccaaaccctgtttacttaacaggttagcttcagagttaactacagtttaaggcatgttcaacagtgagacaaaactcaagctcatatgctcccaaaatcaacatgcaaccccaccaattctgtttgctatcaccaggctaatttttccccacattacaaatgctacaaaaaactgtccaatttcgcattcacagttatcaagaaagctattgtttcagactagttcatgacatattctcaaatccatccccaaactgaattttcttttccctatgacaagaactaacagcagcgctaagacaaatgtgaggagagggattgttaccgtgaagaggaggagggagacggcgatctggaaggactgctggacgaggacgcccttgacgacggtccacttggagacgacgttcttggtggcctcctcccccttggggtggagcctgtagtcgtccatccccatggcgtccagcacgatgtacagccccgagtagagccagtacaccgcgatcgggacgaacgtgccgagcagctcgtcggacaccgcgaacgccatcctctcaagacactccaaatctccttcaaatcctctacacactgccatcgaaaaaaggcgcaaatctgaatgagcaatctgaatcgcaatacgcaggcattggcgggcaccgagcacaaaaccctcaaagaaaccaaaaaaagaaaaacaaaaagcagggaatcgattcggatcttaccaggaggaggaagcaaagaacgcaagaaggctctcctttgtttgattcttgtgctgctgctccgaggtgagtggatatggtgcagggcggccactccggcgagtacttatagcgaagcaatgcggagggggggcaatggccaaggcggtggcggtggcgggcgggcggggtctgagaagggcggcgagaccggcgactcgtacaaagatttgttctttttttggacggaggcgagacgcactcgaggaaggaaggaagaccggctcggagaggagaggagagaaggcgagccgtccactcctcctatctgttgctgtcttgacttcactggaatctgtgtggaaggagaggagggctcttctcaagctggacaaagggttggttgctgcttctccggtttaggttgtgttttggggttttttttttttttgaaatttttgaatatttagtattaaaagtaaactcttgtaaaagttgttttccaagatgtgaatcttttggccacgcaaaataatactgtcatgtcggtctggttggcgtggtagaataaaactgtcaagcctactacacgccagctcgttcggattttggaaataagttttagaagggtttatttttaaaattaaaaattaggaaggtatgaaaaaaaaatccactttactatcttctacgcactttttttcacatgcacgctttctgagttgctaaacggtatatatttctaaaaaaaagtctatagaaaagtttctttaaaaaatcatttaaatctatttttaaatttttttaagataatacttaattaattatatgttaataagctatctcattttttatgtgggaaggaaaagtccccaactcctacttccaaatacatctggcattctaggatttaaattatatagaaaagtttcctgtagaaaatatttagaacaaataactgattccctacaaagttctttgaaattttagtggactaggctactatagaggagttgtggagaaaaataatcatgtcttcatctttctataatttcaagctcatgtgtttttcccatgtataattgaaactgtagttttgaggcttttctaagtttttagttttcataggaatttaattagcacaatattctatttattattattattttttttagagaagggtatttttttactcggcctctatatccaactggatatatgcagcttttttttaataggaacttagcctatcgaacagggaactaactctcaaataacccaatctgaaattcgctcctatggagatttgaactcaggatattgggtgctactcaggttactgcaaacacgatattctattatatgtttctttttcatttttgtattttcacaattccacgttttaaaagaagacctataatctagataactaaccctagtggtaagtggcgaatgtgattactgttatacaattgtcaaacagaaaattatgccggctagcacacaggattacaggagattggaatggattctcagatgcattaactgttttgaaggagatagcacgtgctgggatgttttgaccaggccattattttttttactcgagttgttttatgccagcctgtaccgtccaaaagaaattatttgtacaatttaaaattttaaaacttagttttgtaactaaaattagatgtttttagttgtttttacttagttttggctttatgaaaactaaaaatagaagtgtacaagttttatcgtaaaattattttatattagtaatgtatttttagttaataagtcgcagctaaaaatatatcttcaagtggacaataacagtatcacttggcaggtttgtaggttgacacaaattagggtatttttatgttgaaaaggcacttaattatggtgagcacgtcacattttttgcttggtattttttggtcaaacttggagaaaccaggataacagaccacaggatcatcatatatactatcatgattctacatatcattccacgtgagattttgagattgacctctcgtcgcaggatgtcacattatcacatcccatcacaccaaagcactatactactcttaacgagtaattttgccccaaatcttctacggtgattcaaatcaatgatcattttgatggatgaattggacaacttggaattgacaaatggcatatgccttcctctacgcctttccattaaggcaggcgttacaaaattatttgcccggacagaataaagctgcaaatttaattactccctcagtttcacaatgttagtcattctagcatttttcacattcatattgatgttaatgaatttagatagatatcaatatgaacgtgaaaaatgttagaatgacttacattatgaaacggaggaagtagttttttaatgagttacttcgagccgcctagccatgttgtcagtgtgataaaaaatacgagccttttgttgtaaaaaagtgtacattttcgctttcaatagtgcgtgatagagcccacgtgtgcgcgtatggaatgcacatttataagcgtatggagtgggcatgtatgcatatacatctttgtgtaattagaataaaatcattttattaaaattaagtaagcgcaacttaactgattagattctttatagtggaatcaactcattcggataaattctaaaacacgggtgttcgtatttacggttaattattctttccgtgatagataacgtatatgtcaatagagagactcacatgtaaatatcaagatatgtgcgcgtgctatgagcgtatacgtctgtactgtgattctaagattaccttttatttaaaaaacaaggtagtgtttgagaaccatagtgttccacgctagggagaagtactaccgtaccgaacgaggctttcaactccaaaggccaaccagtttagaccagatcgtccggaacggaacgaaaaaacagaacggcgttgtattccgtggaacagtagcatcgcgtccatgttgctctaccggccattcatctattctgacatcttcggtgatggcttggtcagcaatggcgcagttaaaaatatttttaaaaaaatcagcaacagaagcccattcccttgactaatttcgctctgtcgttaccagggtttaaaagaaccggacttcctaactggttcgagttctaaaaaaaatcaaactggattttagatttgtgacaaaatttaaccgaattttaccaagagtcaacggttttcatagaataaaccgtcgacttgagaacggtttgataaacctggttgctagtgcatgtcaccattccataatagacttgttggccttttgcttcctaccatggcagatggcacaactgcttcacactgattacgttaagttttggacgactgatccaccactcatcaacgtgcctaatctattaattagatgctactgataaatgataatacacatatccgcacccacttttcttggctctagaaaggctagatagcatcatgccatgaatctacttctccggtctctgcacggtaggggccaaagttgaatcatagaatataagagcgtttttttggaacgcgggattctcaaaacgcagagagagattaaagtgtcatgacatctcaaatcccatggattgaaaaaacacatgaaaacatatgaatagccatttggatagaacacaggaaaaatatagaaataaggccctgtttagaggtcggctgcggctcccgatgaggaggagctctgcagcgagtgagcgaggtcggccgcagcggtggtgttaggacttgggcggcgaaacggtgaggacagccggcgatgtgagaggacgaggaggatggaaagagtgacggggtgaatgaaaagagtgacggagtggtatggttctaattttaaaaattttcagtgtcatccagtcgataacgcgaatagtagtgttatttttttgatttgccacatttgcagtggcatgggtctaattaacccaagtttttttccaaacttcacatcaaacctttcttacacacataacttttctatcacatcgtaccaattttaaccaaacttccaaacttcagtgtgacctaaacacagcctaagaagagagaccctaaggatttttctccaagaggttgaagtccatgttaaaattcctccagaattcctatgatttgagccaatccaaaggaatttcataggaatttttttaatagttattcctatgaaccaaatgaccattgaggaaaattttccataggattgaaaatttataatggtctagaatcagctactaagctctacttgaccaccatcaaaaactaggtcagaatgggactgctgtaactgctaaccgcacggcacggccatacgtccatacgtacgtcacctcggacaaaactgatgaagcacacaagggcacaagtaataaaaataattgaagaatacaatccccagcgaattagcaagggttataatatttataggaaggcaaaatgcatcaccttccacaacaatgcgattgagaactcgaaaaaaaattctcagctttcatgatgcaatcagcccaaggatatcacatatatagccttcttcttggatagggatgaaatcagattggaatcaggaggacaatatttgtaccagatcctgggtttgtattatatacactatccaatacactttcatccctagtcttggatcaagagtttataatcatccaaggttcaaagaacacaaacgaaaccacccagcctcatagccctacttgagccttgttgccttggcggaatgccaaggccaaaagaatgcggcaacacgcaaacaaaaagatgagcttaagattcatggatataactttgcagcacaattcaacagcatgggtgaacaaggttggaccaggacatcatttgtgcagggagcagatcaacgaggacagaaaatacaggtaaagcaaaccacagtgacaggaactgtgacaaccatccaggtttcctaaggtttggacaacttctaaatggcaccgatgcatctagcagtataaccggctcagggtaaaaacatggtaaattcagagtaccaatcatcgatacgctggcgcgccaggaaaggaatagagagacgaaaccgatgcaccaggtgcattaagccttgtagaggcatacctttgactgatatcagaatatgcgggattggggacctcataatgagctgttggatagggtgcgtggagagggaggtccacagcatgagtgatgcgttggtcagaacggtaaagatcctctacacgaacagcacgagcagaaatttctccaggacggtacagatcctccacacgagcaccacggataggaatttctcctggacgatacagatcctccatgcgagcactgtgagcagcaacctctcgtggacgatagagctcctccacacgagaaccacgagcaacaatctctcctggacggtagagctcctccacacgagaaccgcgagcagcaagctctcctggacggtagagctcctccacccgagcaccaagtgaagcaatatcccctatccgcctgagttcctcaacacgggcagcaccatcagatcttgtggctgggactgctgtataatctcttgaaagaaatggatcagccacagttctggcagcaacactgaagttcaaggaatttgttagccaaaagcatggtattgttctaagtaagaaaattgaagcctataataaccaaaataggatgtaatagttagtttgggttagtattcaagtgtacacctacagcaaacaaaacatgcttaatatagatgatacgctgatagaaatttattaatactatagtgcataaaacatttgtccaatt

SEQ ID NO: 9257 - DNA, 22549 bp, Oryza sativa
atgtagtaatacaattaagaaataatagaaattcggaattaaaaataagaaatattagaagtagggtatagagtccatgtagaaatacaattaagaaataatagaaattcgaaattaaaaataaggaatattagaagtagagtatagagtctatataggaatttaaaactaactaaaattagtaataaatataataaaattaaaagtagagtttagagtttgtataaaaatacaatttacaaataactaaaattcaaaatttaaaaaaacatgggaagaagaatctaaagtcaatacataatacatgaatacaatttagaagttactgaaatttaaaattaaaattaaagaatattgaaagattagtttagagtctacatagaaatacaattagaaataataaaaattcagaaataaacataaataatattggaagaagagcatagagtctatatagaaatataatttacagaaaattaggaattaaaaaaaagaaatattaaaagacgagtctagagtccatataggaatatatataatttacagataaataaaatttgatattaaaaataattaataactaacacgtatataaaatacaatatgaatatgacacattagtagttttgtaaagttattgcaaaatttaaaattatgtttaaatataaagttttaatatatttgaataatataatgagaaaacatatatgctattatatgagagaaaatataacaatgctagccgcgcaatctgcgcgggccaccatgctagttatgtagtaactcgatcaaactaacccatgcgtgacattcatattgaactatatatatatatatatatatatatataaaatatttattatgtattttttaattttaaattttagttacttttaaattgaaattctatatggactctagacttctctttcaatattccttatttttttaatttctattttccattatttataatttttattcctatgtggactctagactcctcttccaataatcctttttcttaattccgaattttgttatttgtgaattgtatttatatatgaactctaaatcttcttttaatattccttattttttaaaaaaattctaattttcataatttgtaaattgtattactatatgaactctatatattttctcaatattccttttttttattcagaattttagttatgtacaaattgtattgctatatggactctagactttttttttcctaatatttctttttttaaaaaaatgaattactgttatttatcaaatgtattcctatatggactctaaactcttcccccaatcttccttttttttcaatttcgaattttagttatttttaaattatatttttatatggactctaaattcatttttcaatattccttattttttattctaattttcagtttttttctaaattatattctatatggactatagactcctctttcaacattccttttttttaatttggaattgtagttatttctaaattgtatttatatgtggactctcacctgtactttaaattttcttattttttaattataaattttaattagctctaaattgtataccttatggactgtagtctctttttataatattccttattttaaaattctgaatttcagtaatttttaaattgtacttctatatgaactctatcttttctttttttctccgattaatatgagaatttctagaccaatgagagcgaacgtggtgactcctttttctattactatactaataagttaatagatagaaggggtgagttttcaaacccaggtcgactagcccaccaccttgtatagctagccgaaagacccctagtcttttctctctattttgacttccatggcacctaagtttcttgtcgttaatgtacaaatgagaaaagttgcatgtactttatacagatgattcgttgtagagatgactagttctgtagtagtatctgcccctcaactcattgacttggttaaaacatttttgtttggaaaaagtatgaattaccactcttaactatcgcggttgaccgaattaccctcctcaacccgaaaagcagatattactcacactgaactttcaatactggacgaattaccctcttgacccaatccagagcggttttatcctatttagcgtacgcgtggtaatccggtcaggattttcttttaaaataacggtgggacccacctatcgtacctcctcttcctctctctcgggcgcaaggtgtcgtgcccctcttcccccccccctcgctctctcgcgggcgcgcgggggcgggcaaagggagacagcgtgagacgcgggggcagaggccggagctaggtggtgagcggcggcgggcacggctgggtggctccgaccggcggcaggagagacgggcgtggctaggtggctccggttgatggctaacggcagcgtccgcccctcttcctctcttccccatgaggtgatgcaaaatccgacgaggagcctcaccgccgccattgcctcccctctactccttgggcatggcgggggcatggcggagaggcaggcggtggctgggaagctactgtgggagtggcgagggcacggcgggcggatctaagagacacttcacccgtcccccaccgaatctcccatcgccaacgccttctctccattttgcttccacctccaccgggccaccgtcgtcggccgccctacacaatatttgaccccgccggtgcgccgcaccctcctccgactccttctctaccgctggcctccctcgcccgagcctaggcagcatctccaccaccacctccctaggacaccaacgacgttgctctagctcctccatcccaaactcgagtagggatgcccgggtcatcgacggacgcctccgctcctccctccacgcctcttcatcagagttgcgactgccgccgactcctcctctccactttgcctcccaccccttcccggtggtgcgacgacgatgtcccgtggcatcaagatgggctcaagctcctccgccagcgtcgtccccaaccgagagctacccgccgtctccagtaccttcctcaaggggatctcgagctcctccccctcgtccccattgccgccgctgacggagaggccgcctcctccagtcctcaccgacgacggagagtccacctcctcctcctcatccgtctctcccattgagcattagagagagaggtagagatactatgaagagatatgacacatgggcccattaaatatttttattatttttttgttgatcgggtgccatgtgtacgctactgagatcttaaaccactccaatctatgttagggggtaacttatccggtttagaaagtttggggtatggaatattcggttttatagttcaggggttaattcgtactgtcacgatagttttttttagggggggagttaattcgtactttttttctttttgtttctacctaaaacacaaaaaattggataagactatagcatctccaccaatttcgtcgtccttttgattttaatgacaatcaggctggatggcaatggagagagtcataagtttctctcctattgtaacaagtgcccttcactgcaaacttaaattcaactccgcgttagccaaaaccaaaggtttaataggttgagggataaaatgtaactaattaatttgcagaggtggatgatcagttctaacgtgtttggaattaataacgaacagaaaattttaactcaaacaaagtcatgggatttctttatacaaatccttcctagtaaatgttttggcataatctaattaagctatcctctatatcttttttatcatcgttaatatataagctggtatgaaggaaaaaattccagaaaaatccttatgcaactatacaactatgttttacatagaagaaatcaccacatgcacattgattatgtgtatccttgattatttagtgcatagtccaaaggttatattttcttttatcataaaacaccattacacacatacacacatatgttacaaccagagttgcaagcagggttgtatcttaaaattttgggccccggtgcaaaatagacttgtagttaaaaaatacgagatagaagagtaaattttatttcgggctactatattatatatgttcaccaaagttgcacaatagatcatgccagactcgccaagaagaattatatatgtcctgacgtaatgatttattatttttaactagaaaaaggaatctattaacttattaaaggaatagaaaaaggagcctccacgttcgctctcacggcctagaaattcgcacattaatcggagaaaaagaaaaacagagtacatgtagaaatacaatttagaaatagttgaaattcggaattaaaaaaataaggaatattagaataggagactagagtccatacagaaatacaattgagaaacaatagaaattcggaattaaaaataaggaatattagaagtagagtatagagtccatatagaaatacaattaataaataatagaaattctgaattaaaaataaggaatattagaagtagggtacagtgtccatgtagtaatacaattaagaaataatagaaattcggaattaaaaataaggaatattagaagtagggtatagagtccatgtagaaatacaattaagaaataatagaaattcaaaattaaaaataaggaatattagaagtagagtatagagtctatataggaatttaaaactaactaaaattagtaataaatataataaaattaaaagtagagtttagagtttgtataaaaatacaatttacaaataactaaaattaaaaatttaaaaaaacatgggaagaagaatctaaagtcaatacataatacatgaatacaatttagaagttactgaaatttaaaattaaaattaaagaatattgaaagattagtttagagtctacatagaaatacaattagaaataataaaaattcagaattaaaaataaataatattggaagaagagcatagagtccatataggaatataatttacaaataatattgaaagacgagtctagagtccatataggaatataatttataaataactaaaatttgatattaaaaataattagtaactaagacgtacttcctccgtttcatattataagactttttagtattgcccacactcatacagatgctatttagattcattagcatctgtatgaatgtgtgcaatgctaaaaagtcttacattgtgaaacggaggaagtatataaaatacaatatgaatattacgcattagtagtttcataaagttagtacaaaatttaaaattatgttgtcattttaatatatttgaataatacgttgagaaaacatatatgctattatatgagagaaaatataatgatgctaaccgcgcaatttgtgcgggccaccatgcgaccatgttagttctttagtatttttagtattttgaatgcacgttcatatcatcattatgagctacagttctttttaggtagccatatatattaccattgaacacttatcaaaggtgaagaaaagaagcttgttttaaccaaatcggtaagtaagagagtgaaactttttaaaattagaacgagaggcctttaagcacgtttgaacgcattagcatggattaaaatttaaaaatactggaaccttgttccgtcgtccaactcgcgcgcacgtgcttatcccctcccctagatgcaatataatcgtgcatgcttttatcagctgacaatcctatatatgatcgacacaaatcacacacacatatatatactcgcaaaattgaaacactgggcgaacggagaggaaatatttctggaagacacagtggtaggcgttataagttggagaggaaaacgaaagcgcatgacaatgccaccaccacacgtgtacggcatttgtgatcaagtccacccaattaaagagcacggcttgttgctaacactgcagtggcaacaagtagtcttggccatgttctttcctcacctttcccaactcacctctggttttccacgcgcacgcttcccaaactactaaacggcgtatatttttttaaaaaaaattatatatgaaagttgctttaaaaaattatattaatctattttttaagtttattttagctaatacttaataaatcatgcactaatcgttgctccgttttacgtatcgggaatgagggttctgaacttggggtgcttggatcgagggactatacgtgtccatgtcacatcggatgtttggataataatttggagtattaagcatagactacttataaaactaattaaataaatgaaagctaattcgcgtgacaagttttttaaatctaattaatccataattagcacatgtttagcctaattaatctataattagcgtatgtttactgtagaatcacataggctaatcatagattaattaggctcaatagattcgtcttacgaattagtccatgttttgtcaatagtctacgtttaatacttctaattagtgtcaaacatccaatttgacagggactaaatattgtctcatccagccaaggtttattagtgggtacacccaaagcattttttcccctactgaggttgacccaaagctgctgaataaaatatatgaggaattgtgtagtgtactttgaaagcacagcgctcaatcttttaaccgaataagatcgagatagatgcagaaaataaactactgaaagtataattaaatatcattgttttaaaaaaatatgtttgttatgacttatgtttaaattaggcacaattaacgctagtttgatatacaccaaactctaatagtcagatataacacaaccttcacttcgagacgtgcgtgcatgtactatatcatttttcaataaggcgccagaaaatggttcctaatgatctagtaggaagaaataccacaattataagtggaaaaaaaggagaaaactccaaacagtccatcatagctgaatcaaattaattatagcagtataacattgatttttttaagtagcaaaaattaacatagttacatctctagcctttgacttcaagcatgcaaccaatgattctatgttaaaagtttaaagaaaacataacgaaattctaacttcctctcacaagccaaaataacgataaaaaatcacaactgcatatatagcatgctaaataccaaatattaccatcgttataaaatttagtaacctaatatcaaatatgatatatcacagtactacaaatttagacagagactgtacaaatttatagttctaatatatatctcatttagtattaggttattatattttgaaatagctagagatggtataattctttttcaggaaacctcacacgattatgtgtgggaaattcaaccataaatatgtcctcacaagaaaaagggcatccatatggtgatcaacatcatcgaattgaagtatttcctgttccagagttgaccggctagtgcagtccaatagtaaacacacatgcatatgcaggtcgcacatatctgcaggtccacatgaggcaaagggacaccaagacacaggaaatctcattatctaaaaaaaaagacacaggaaatcttgccctccacctaagctgggttcctttttgataggactaaaaacccttcctctctcgatatgtaaaacgaaatgacaacgtatggttaattaaaatttttaaaaataaatcaatacaattttctaaagcaatttttctatattattttagaaaaacatattgttcaaccgtttaagaaagatacaagaaagatagtccctccgtccaaaaaaagataacgtttgatgtccgtcttatatgaaatttttttataattagtattttcattgttgttagatgataaaacatgattaatactttatgcatgacttgtctttttaatttttttatatttttttcaaataagacggacggtcaaacgttgaacacggaaacacatggtgtattttttttttatgaaaggagtacgtgcagaaaacaagtgagtagaaattgagaaagtgtcccaacgaacacagctaggctccctcacaagtcacaaatagctcccacctgcacctgcacctgcacctgcagtactggatggccccatgcgtagccaaccattcatcgtcccagacaaaggagctagctatagcctatagctgactgagctgagctgagtgcgccgaggcgtcacacaccgccatgccgcgcgcgcgagcgcgagcgatcgatcaaccgaagtgcgcccggctgggcgccgacccgcccgaaacactcgctgtcaccgatcgcgcgcgcgcgcgccgtccccacgccgccggagggggggggggggggggtcaattcaatcatgcgcgcgcgcacgcacgaatggacagaagaagcagctggatcgatcgagcgagcgagcgacctgcgagctagcgcacatcattcctttgcccccggccggctgccaacatcaccgggttacgtcgcaggagggatacagggtttctggtcggggttacagtgacggggatgtcgaaatgtccgcccaataatatccacattttcgatttcaggatttgcatgaaaacggtcggcacatgattttttttaataatatttagtacaataagaaatgaaattacttctggcctttgcacattaatggtaagggatgcacacgacttggaaaaaaaatactccctctattccaaattgatctacatatagtttttttaggttattcctaaatgatctatatatttgtgttcatttattaagtctattcgttatttgtgtattagagtaaatggacattgatgcatgcatccatgcacacaactatttataatccacatgcaatatcttgatttgctattggctaggaaatattggggatggtgaatgcatagagtttgttgatagagtaaatatagtatgagggagttattaacttttcttggtcttgatgtacttatgaaatatgtagatcaatttgaaatgaagggagtaataaatacaacgtgaatatatcatgttgacttatgctcctacatccagaactataacataatgtctatgacactaaacaatacggactactgcagaaaaggtcataggtgttcggagaccctcataggtgccggtttcgggtccgacatcaatgacccaagtcataatcgtcagaaccaacttaacggtcaccactagattttcatccatagatttctatgtggcaacacattaaataaagaaatgacaaatgaacatcgatatgatattgtcagatccaactaactggatcaaagttaccaatagaacaccatgctaacggccacaaccataaacataagtggtagtaataccaccagcggttgccatcgaccaagaagcaaacatccaaaataaccaatgcatgattattttagcaccaccaagacaccttgaattgtcgctaaacaattttcctgaccataacaaaggtcactacccatgtagcatcctcagtctgatcaccattagttgaaaccctagcgggaccagagacaccatcatcatcggacgaatagttgacctcttcgatatgcctccaccatgtggatggatggcgaaagccttgttgtcatgtatgtacggagcatatataccatcgccacccatcttgaaatcacaatcctagagaaggccctctctttgaagttacagagctatcgacgtcatggagtctatgatccacactcgcaattttctcttgaaaaacggaagctagacgatggtttatcgctcgctagtcacacacaaagagtgcatatgcattaattctcctacaccacttgaactctcgttcatatgacagaagcaccactgtagcaggatgatgcatgcacgatccatcaatctaggcttgcaaaccatgttgagactatgataggagcgccatcgcaaccacttgatgtagatatgtgcacagtccacgtgatgacatgagcgcatcgccaaatctccaatcctcaattgtcgatgagtgcgtctctaggtcacataccatagctagacagccccccccccgggggggtggtggtcggtcattgtgtgatccaacccaaacttccaatcaccttgtcgatctatgtccagttctttttccatctatttggatcttgcaagttggtggacaagagttgccgtgtctatgagaatggcattggcaacggttagggggagggaatattgtgagaggcatcattggggttccgttatcacgtagtgtttgttctacatattttggtctaaattttaccagtctaaaacaattattttattaagagttagatgaattcgatagtagtttttacaacattgtacatatagtccactatgacacattcttattattttttgttttcttggtttaacaatctcagaaagttgattaaataaaatgcaaatatatggtcttaattttagtttttttattgatttaataaataatgtagaatagatgcaaagttactatattttggagtcttagtttagtatttctattatttacttatttttgatattcagagttaaaaagtacccaagtgatattgaatttaaactcttctgttaatatgaaccatagtcacgttaagatggattgataaacgttaagattctttttcctcattctactaagtatgagtatgatgaggacacaactagctcagatatgaccatgactacctcatgtattcatcaaccaaaggtgcatatgttttatattagattcacttgttatatatttgaacaaccgttgctacacaatgagtttcctatgttttctttgcagcggtacatgcttgggtgatgaaaaagagaccaagcataaagaatgcatggatgatcaaagaagttgattggggaccaaatcaagaccttctccaaatccacttctacctcaccacgtcacttttggtccatagaaaacaagagataaagtcctacacgttttggattcggattcaggcctcctaacaacattaacttcgaacggatctaactgctgatctagaatgaatttcggagcccatgagtatttgttggaaagcttatggagtatacttttagatggttttggtccacatctaaattcctaccgagctgttgggaatatgaaaaataagccacgtacctcatccagtctgaatctgatttgggtcttgagccttgtaattgtgtcgtgggataagcccaaaggggtgtgcgccctaaggcaaccctaggacgtctctaatcatatttattcagaagtcgtcatcatttagagttgggttttgcttagattatttttgccattgcagtttcgccgctagatcggtttgtggaagcccaaattcgagtgcttaatcgttcatttgcaattgtgttgctatctatcttgttattgcttgtgttctttgatttgcatgcagtgattagccttatcggtgaggtcaaccgggtttcggcatggttgataaccagaggaaacgtggtgctgcgattgcagggttcgaatcggggttgatcggaagctggatcatgtgtgtcaagtttccaccaaatcgagagttatcaatacctatcggaatatcaggacctagtattctcatcaggtatagaacagagttacaattgaggatcttttaccttataagttgttgccaaaacttaattttagaattgattttgaggcttttttcatcataatagtgttttaattagtgcatgatacaaatatgatagttttttaaccacaaattcttatttagttgcttatatgtcgttttacaacttatcagctgtagactaatgatcatgctataagtacaaagcaacactattatataaaaaagtacaaagaaccattgaatttcaaactagtaatggcgagaaatatagttattgcctccatcttgtagcttagaactatcatgtattatctggcattctgacgcttgatcgattatatttccatcgcacatagggagagtgttatgtcgatctccactatctttttttcgtggattagtgggctctttcagaccccaatattctattgtccttgctcatcaccttgatgaaaaaaaagaacatagggcatatgcccatgcagtatagtttatagatgtccatcagcctcgtcaaccacatatagcacattctatggtccaagctgactcctcaaaaaatctcttacagtcgcaatttaaccattaacccatatttttattttaataattgcctcttgggtcgccttcctgcgactgtgggacacggggaggggagggaggagttacgatggggagattgcactagttgttctagacactgccgtcattggttgtaggttctcatcaccaagtggtagatcagtgctttgccttcatcgcctggtatgaccatgcctattgtaacgtctcgcctcccgcctctcccaggcgggcccgcttacatctgatagctttcataagtcataggttgccctcacagaccaacacaagtcttttctgcacactttgtcctcactcgtgcgcacccgggaagaatttcccgatcggtcacccatccctaaattgctccaagccaagcacgcttaaccctggagttctttggagatcggcttccggaaaaaagttgcaacttgttgatatgagtattctattaatcctattaagccctaggctgggatgtcacatcctcacccccttagaagatcgacgtcctcgtcgatcaaccccaggccaggaacgtcccctcttagccacgtccgacgtcctcgtcgatcaaccccaggccaggaacgtcccctcttagccacgtccgtgtgtccagtgccagcgcatgtgccatgctctgataccactttgtaacgtcccacctctcccaggcgggcccgcttacatatgatagctttcataggtcataggctgccctcatagaccaacacaagtcttttctacacactttgtcctcactcgtgagcacccgggaagaatttcccgatctgtcacccatccctaaattgttccaggccaagcacgcttaaccctggagttctttagagatcggcttccggaaaaaaaagttgcatgttgatatgagtattctattaatcctattaagccctaggctgggatgtcacacctattgaccaaggcagctattggaagagggacaaattaaactagtgggaggaatgcacaattttgtagactggtgttgtggtgcggaggcgcttcaccataatccaaacgaggttggttagcctggtcaatgatggagaatgctcctcataaatcaatgaatgactttctttgattctccaaaactaggagtttgcctttcctaaatcaaaaaaaataggaccttgtcctatatgacaaggttatcctatttgcccaaatggagacaaatagagaagactggtgttttatccatggtctttgcacattgttactgatttgtgtttgttattggtgattagataagggatgatgacttcccttttaatcaggaagattggttagtgacagccgaagttgtttcagcggctaagatcgatcgtgtccatgtaaacctttttcgagatagttttggcgggcaacaatcgatatatatggacatttgttttttctgacttgctagctttaagtagctggacggtagcatggagtactagacgatggctctagggtgaaaacactgatatagttcatctagcatatttgataatgtcaatgcttttctagtcggctcctttgttgaaggtgacatctcgtactttggatggaaagctagtccactgttagaggatagtagcagacaagtgttgggtcattctttaaagtgttgttctatagtaaacgtctagttagtattttttatgttttgtcttagttttatgagtgaattgatgtaagacaatatgatatgtttgtgtttatcttagttttttttccccttttcctttctagtttgtgtacattcatggtagataatacagaggtaggttataatttcattttagtgaaattctttcattgtataaaaatgtattaatatgcttagacacccaataactttagttgtagattcgccactggcattagcctaagttgatatgacaacccattttccttgtaccaacacgcacttccatcctacccttcaactagcacatataatacacacacatagagaaagagatcacaataatgcatatatttatagagaaagcacaacttttgacctctatgccaactaaggatccatacatctctatttgtgaacacattcttacgtacgtatctttctttggcctgtttggggaagtttaagattctgagaagcagctagttggtagccagcttctgagaatctagtaaattttgatcaaaagctgaattatttggagagcttctgattctggaagaaactgttgcagcgagaagctaccccaaacaagccctttatattccgatgaacattacggtttgaatagtagagccatgcacccgtacacccactactccactctcacactatattgcttccctgataatgcagatagatgatagaggaatatgctaatgcccatgcaattaatcactacatatatccatatagtatctaaaatatttgtgcacgttgttgtttgattgagtctcacatcgggtatccccggccgtcccatgcgctgccggccggcaggaggggggtccgcggccatgagcccataactaacgcatatatatgcaactgccaatatatccaccgtccgtcgtcgtcgtggtcgtcgccctcagatttgaggtcacggtggcgcgcggggcgccatttgcatatggtcgatcgcgtcgtcgccgccaatggtggtcgaccgaccggcggtcggatcgacagaccaaataccaacagtcgccatgacagggagatggtgcatgcatatcggattaggattaatcgatctagctagatgacacttctacaaaacgattttccaaacggagaaaactcatttttccaaaccgttgggcctctcgtctgtccgaaaagatctgcaaaaacagtgattattttttcatgcaggtgacgcacccgtatgtaaaaatcggaagtttatgtacggaactcgattcagacacaatcagctatgatccgtttacaatataaaaggagtcttatccagaaagaaattcttttttagtagtgcgataaaatgcaatgctgcacagtggccattgttgtgtagaacagtagtgcctagtcttttgggacgcatgcagtgccgtccattattagctagtcgggcgtgtggtactacgagtttggaataattaacagtagtgtgtgtgccactaattaatccctgttctgattctgacgatcgatcgatatatatcgatccttagctggtgcatgcatgtacgactgactggtcatgatcgatcggggtttaattttctcttcccagcaaaccatcattattccctcggagaaaattggtctatagactttagattccccacgtttttttattttttttctttcttgttatattttgaaaagtagtcatgttgacattgactatattcaagtatatatatgtctatagaagaaacatgagtgttactctcttccaaaaagaataaatctaatacgagatttgacatattctaatactgatatatcacaatttgcactaggtgtatttcttataggacggatgaagtatacatactcatgtgagaagcacttgctagggcagtagtaggggtgcttggatttaatttcaatggaagtgtcgtgtgttcgactccgtggacttaccggtgtctatgtgtttcctcaatattttttgagaatacgtcaacttaatctagttcctctagggcactatgttttttcccaaaagacactccaaatttaattaaacatattagctcaatttaaatatttttaaaatatgtttattttcataatttaaacattttttgaatttaaaaaaaaatatgttgaaattcaacaaatatttgtttaatttaaatcttacatggtggcctaagggtaaattcatcttttataaagttttatctatctaatagaagaagatatattataattaataatggtaagagtgttttttctttagcaaagaaccataaaactaaagtttccttgaacaaagatacaaaattgtagtgtcttagagcatataacgaaatttagaatccctatagcaaatgttgctagaaaattaaaaagtactctctctctctctctctctctctctctctctccgtggctttttctggaatagaagaatttttcaagatttttaatgaatttaatttaatcataaaatacccctgttttacaggagccctaagaatttttaatgtaaaatgttagcaattatctgtccaattatgaagacaaattacctaagcaatttttacactctctcttttttaagaaacacgggataaacgcaagcacctatacacacgctcgcgtatattcaccccatatgataacctccaagagactggatcaatatattttaaaagttctatagttgccgcactatcgatgtggatatcaactagtatagaaattaattacgagtacatatgataggcttaggatttggactcgaatggataggttcatatgtatgataaacaaaccatgcagctcacttcgcgtggcattccctctttcgttatgaagtcaaatcaatactcacttcgtattgcattctcttttgttatgaggtcaaatcatctcaattacttttacctttgtatgatggattacgcatttacgggtgcgaaaatgtataaagcgcataaagtaaaactgtctgactgtaaaagttaatccgctttgcaaatcatatattaacatttttgtcttgcattcttgttgggcaatatatatatatatatattggcggggtttcatctgatatgaccctcgattgtctctcccgttgagggggatcaaaccccactatatatgcttcactgtgatttgttatgtcgcatttgccaaagcaaatcaaaatagccctgtcctgcaacgtgaatataaatggagacgtacactttttttctttcattgcttgtaggcaacgcatttcagatcaggatcaactggccatcatatctcttgcaaattttccatcattcaggtatggtcatatctgaatgcaatgagctataattcagtgcaattacccctttgaactttcatgcaacagagtacttagtgctcaatcatgcattgcacaaaatgaatcacgctgagctatgaaaaagtacaatgcatatctatctcaccgcaggaaataaatactctgccagctgctggctgtctttgtgatacggtgcagagttgtcctgttaaatgtctagtttgccttgtcgattggtcagaaatgtgtatgtacccaaagttgcacacacataatatcgcatcttgtaggcaaagtgcaatgcacacacactttctttctcttgcgtctagtatattgcaacgccaaaagatgacgagactactggatgttaagcttgtctacttgtataattttaatctatccgttcactgttcattttgagaaaacatatctaaatgtgtgtgtacacaaaattagctagcactcttcgatctttagtttcttaatttctttctctttccttctttgtttctatctgaaagaaaaggctagctcgcacaccccccaccatgataaactctttgatcatgaacctacccacgtgcacctaatcttttaagagtctatttgactcacaaatacactattccatccaactcgtgtaagccgtatacatgtattcgtacatgtaaacagggaattaaatttgaaaagatattgttcattcaatttctttttagaatattcgggatgtaaatttttttcagaaatataccgtcggtctcgcccaaccgttgtgtgaaaatgacatgagagtgacgttgcaggcggtatcgcgagatgaaagtgtgagaccgcgtggtcccgctgaaagagacagcgacaccgtcccaacgctaaaacagcgaacgccgaaacagtgactaatgacctagttaactattactccatgcgtcctaaaatataattatttttgaactgacacggtctccgagatgctgctttgaccaacaatatctataaaagtaagatgttttaaataaaaaatagttgcatattatgatagtttgtttaatgataaatctagtaacattaattttacatgattgctcttttttatatttttgttattaatagtcaaaatttaaaatatttgacttgtcactatgctaaaaatgtttatattttgggaccgatggagtaactaataataattagtgattaattatcatgattaccggttaaataataatggctaattatgataattaatcactaattaactattttgaaatccggtatcgctgattggttcagcaagacctcgctcttccattccacgagagcacatggtctcgcactttccccgcgcgataccgcccacgacgtcacgccacgttattttcgcacaaccagtatatttgtgcaaagaaaatttaaatcccgaatatttctaaaaaaaatgaatgaacaatatattttcaaatttaattctgtaaacaggagagtagcttgttattttctcaaaaaaattatattttactgcctcgtactattttagcagagcacttacccaacccactaaattacttttaagttcattgtaggtacaccaggttcgttttacttctaaatggtatttctcttctctctctctgtgcgcgcataaaattgatgttttgcactgaaattcggtagaatgaaaagacacattacaacttatgtcgtggtatttctttttagaatttttattagtgtttgcataggttggaaacacctcagattgatttaacatcgagattttagcttaaaatatttttaaatttgataatagtcacatatggctctaaaatatttcaacttaaaatacaatcataagaaataaaaaaaattattaaggagtaaagtgaatattttcaatagttttggggtaaaatgaacaaagcacgcacagaaccggaagcaccccttgtttcaaagagaggaggacgggttattcacatttaaattgatggtcagaggcgaattgaaaggttaaccgatccagtaaaatagttcgagtggttaaaataaacttatttttctctcatatactctctctgcccccaaaaatataattactacgagttgttcatggagatttaattaggagagaaatgaaaccaaatgaggaatgattgttatcgattcagataaaatagtagatgaagaaattaaaataaagatggttgttattggtttagatgagaaagtaggtagagacattgttattttgagacattctgaacgctagaagttaaatgtattttagggtggagggagtgatggttaatttcctaatcatccgacgtggattcaatggtcgaaacaagctctaacctttcatgatcctaataaaacacatccatgcacctttgacacacagtcatccttctcctacatcctccgtcacatccaccaccgcaattttccgtagcacactttcttcacgtctccatctctaaatccatatcacggatgaggctcctctaacataagtaagagagacatgtgtctttcacttgtgcgcccatgagtacaggccccacctatgaaggagctgctttcctaccacaccatcttcaacttcccaatattaaagagtagtactagcatgtgtccttattgtggcatcctaaccattggaacttcctcaaccaagctattatctctggccaccgcctttccataaatacttatctagtagccacaaccgcaatgctaaataataagacgtcgctagtatgtggatctgaggtgcttgcagtattgtagactataaatagttttgagtaaagtacacgggcggtccttaaacttgtagaggtgtgttatttaggtccctaaactctcaaaatgcatatccaattccgagaacttgtcatagtgtgccatctaggttccaaatcaccacaacccctaaggatcgtacatgtcgctgatgtgacatggcacacgaatatgacgtgacatcattttgacttacaaatggaacccatttaaaattttcatttttcttcttttcttctctttttttctccttcttctattttttttctttcttctcctttttctatgacccgagcaaaagaaagagaaaaaaagaagaatgagaagaaaacgaaaaagaaaaataaaagaagaaaaagaaaaaaaaggacacgtcacgtccatgtggcatgccacatcagcgtcatgtaggttcctcgaggggctgtgtcgttttgggacctatatgacacaaccctacaagtttaaagaccgccaatgcactttactcaatagttttttagtctttgactcattgcggaaagaatcaaaatgaccgcatgatagagataagcctactattttagagggttctatgccttcaatcaacaaaagtgtacttcagaacaatcaaagactcgttcaaaccatatcaaacaccccttcgaaccatcgaacacattgcacttgtagaccacttctttgacccaccaaagatccatattctaccatccaatacctctccagccagcaaaaaccgcacgccacggatcatcatagccctaaaagaatctcaagtagtgatcaataggcaaggaccgtaccaaaaagactccatgaatgtggtcgtactcctagagggcctttatttgtgttacacattgtacatttttttttctaaattttggtacacatccattgagagcacttttcattgtactactgtatcttaacggagtaaggctccgtttgaaagaactgtttggcttagctttttttttggtacgcgaaacaagaaatatcattagtgtatacttaattaagtattaagtattacaattatggaaaatgggtttgtttgattttttattaaaaaaacttctatataaaaagttttgtgcaaaaatacatcatttatattagcagttagaagcgtgctcatgataaacgagaaaaagttgtattgcaatagctaaatgagctttcaagctgagcctaaaatacatgaatcatcttgaaaggcacatccatatgatcacttcggcacgccacgccacgcatgtatagtcttcaccataaactcgatcaaatcgattacatacatatattcgtcccccgaaagctacatgccaccatggagatctatagctaataaaagctatagcagtaggcctctcgcgcatcactagcaacgcaagcacacgcactgcgcccaaaaactaaagaaacccacatggaaaaaacacacacacacatcgatcgatgcatgtacagtcaccgtcacgctcgccggccggcatgcacacgcaggcgatgatatgatccgtcgccgtcgtctacccgccggccgcgccgcatcgaactagctagagctatagctagtgcaaccccgtccaccaccatgatcgatcgatcgagctgatcgatgagagccccgctaagaccaagtttaatagtatagccaactgctagctccaatttatctatagtcaatttaatagctcattcacacaatagttgcatactatactattaatacctagtctcacctatcatacacacattgcgtcttagaatccgtgctacagctggctgcaaatctgtagcccgctgctcttctctctccttatttatctcattaaaatatgtttgcagctagcttatagcctgctattgtacctgctctaagagcaagtttaacagtatagcccactactagctccaattcatctatagccaattcatacaatagttgcttactatactattaatatatggtctcacatgtcatacacacactgtctcttggagttcgtgctgcagctagctacagatttgtagcccgctgcttttctttttcatcttttatatcattaaaatatgtttatagctggctaatagtatgctattgtacctgctctaatagtggtcacgatgtgtgtgttgcacttggaaagaattatgtgggctcttcgtcgatcggtgtcctgttcaggtgttcgtgtgtcgcgtttgtgtctgcactgttgatgtgtgatcgatcaccggccggggctggacccatgcactctcaactgcagattgagactctcgatcggatgagaggtgtactgttgatgtgcgtgtgtgcgtgtgctgccggatggatggatgattgtggtagtattgtgtactgtggtggaatgccatattgaaaggtttacaatgggtcccagcttattggcaggggatgacccccacaacaaatgagtgtatgttaatttatgaattggtatgaaggaaa

SEQ ID NO: 9258 - DNA, 23744 bp, Oryza sativa
agctccagccaccggaacgagagatcgatacagctcgatcagctagccgcattcgccctcgccgccgccgacgatgtcgagccggaggtcgtcgcgctcctccgtgtcggaggaggagatcaacgagctcatctccaagctccagtccctcctccccagctcccgccgccgcggcgccaaccaggtactacatttcaccgttctcatcaccacaagttcacataaccaccatgcacactagcggcatgaacaagctagctacatgagtgatcgacgatgtgtagatttgtcggggttctaaatcttcggctacagctgtttgagaagggtctagctatttaaccactatagagggtctgccgttaaatgtgttagcccgctatttaaaactctctaattaattattgttgttaatggcggatgcaaaataaaatgcaggcgtcgacgacgaagctgctgaaggagacgtgcagctacatcaagagcctgcaccgggaggtggacgacctcagcgacaggctctccgacctcatggccggcatggatcacaacagcccaggcgccgagatcatccgcagcctcctccgctagctcatctcttctcatctgttcttcctcctcgatgatcgatcgatctcgtgttattctacgtacatgaaggatgatatgaatgcagctcgtgccctgtagctacgtataaatatacacatatgtatacatgcatacagtacatgatatgcatatgcctagatctgatctagctcagtagaaaatctactcatctcggtgtactactgatgatgatgatgattaaggcatgcagctggcttgatgatcggtactactactactacttcacttcagttcagtaggggcattagctagctagctagggccggctgcctaattaagtaattaagtaatttattatttgtagtagccagcttgatctcatctctcctcatgagccatatgacatgtggttaagttaattaatccttgatgcagtagagtcgtcccagctgtttcatcgatgatcgtcgtcatatgtgtgtatctcttgatctagctttgctgatctcctcttgtttcatttcctctttgttcttttcatgtgtttttctgtgagcttaattattgttgttttggcggttttggatcgagttgttttcctccagacaaccgaccgaccgctagctacccatcgatacaccgccatcagcgcatgtactactgtgtctgaaactctgaatcaatctaatcgaatttttgtgctgcgtacatgacacattctgagtatcattataccatgtgattagtcattactactgctcgatcgcttgaacacacacattaaaagccaatcgaaatcagaagaattatggtgttcacaccgttacgtttgtcctcgcgcgagtatgacctccagcccagaagatgtggaagctagctatttcttttcgtgccaaataacgacgatgctgattgatcggacactttaatttctatatagattgggttaatttgcaaccgtacggtagatgagatcaagtggctgcctgtgtggaaaagggaagaggaattgaccggccattggtgcaggactgcaggctgccagtgcactagttgtctactgctacatccgtctcgtaatataaagaattttttggctatacgacagagttagtacttgcccgctatatgttacactacggttacggttatttgcacgtgtcgttttgttctggcgaaagaaatgaaccgtttaaaaataagaaagttcgcaacaacggtgaccttttcgcgctggttgttattgttgttattattgttgttgccgttattgttatagtcgttattattgtttagcaatgtgcgtgtggactagactatgccgccttcttctgtacgtgatggggagcaggcacgcatgttatgatgttaccatcttcttttgctctcatctgtactgtatacgtgatggagagcaaagcatatgcatgttaggatgttaccatcaacggccacacaaaacgccagtacgttaattgacaggatggccgacaatgccgtcgtgttttcaactgtcgacgttttcaatttttgggccttttacacaatttttaagggtgttttccgatgatcatgttagagcaagtacaatagcaggctataagtcagctataactacatatcgagaagtaaagagaagagagaggaaaaaacgggttatagatttatagataactattgtatgaatgggctattaaattagctatagatgatttggagctaacatttggctatactattaaacttgctcttaggatatgctcatactgcacacaaaacggaatggctcattagtatatgataactaagtattagcttaacaaactttaaaaataaattaatttgttttttaaaaataacttttctatagactttgttatagaaaacactccattaaacagtttggaaaataagggagcagaagtcggaaatggcagtgtcaaaggaagcgaaagttcagcttaggcacagtaagagatgagtgaagatgagctaatgggaggatgctgactagtgtcacctgctgaaacagagatgaaaagaagaaagggagaaagttcaggtgcttggtgaccgatctgatcgctgacaggttgcagaaatgcagagatttgttcttagcccagacccactggaatcagattcgaatacttgatgaacagcttaccagctgtttatgttgtacaatgtgcacattgtggctctgtttggaaacttcatagggaagtcttaaataaattcaacgcaaattgagaactgtaaatcgggctgagttgaatgcaactgtctgtagtgagcttaacaaccaaacaaaatatgtcagcatccacctgttgtacagagatggaaagctgtgattaacagccaactccgtgtcaccgtcaggcatcaggcaagagttgatctagctgtactcaggtgaacaatgtgctatgtaatgacagagtagactgatcatgcaggggatgtcaacagctcctctgccttgcaagcagtagaatatagatatcaggactatttttgaattctggcccttctccaagaagggaaaaatataactgccaaccaagtccagaggttgtcactaccacgcaaggcagattaacagaattacataacatcatttaagaactaagggatattgtcaacactagcacctatttacaatagttcagccaatgcacaattggttctgggaactgggactgaatgacattcagtggatgcatgatgcatcaaagtacaaatcctgaagtcagatacatggaaagctttatcctcaacccagataagccggcaacctgggaagtagaggtgtaactctgtaagaccacatgtgatcctagattttgccaggtaccacaagtgcaaatactataattggtggtaaacgttatgctaacctgatgagtatgtggtcgtgaacaacagattgttctagcatcgataatttttatcatagaatggattttcgccccatgattctctttcagccctggccatgtgttcagattctacctcctccaagatagattgctttgtgcttcttttggaggttgaaggcctcgtagactgcaacaagagtgaataagcataggttaagaaagaggagcaacgtaaagatgagataaaccaacatgcctaacgaaagtaaaaagtatgatatctgtagcaattatacagtgatggaggaacacctaaaaagcattcctggaaaatactaaggaaagcactcagaagaaaggaaaattgacagcctatgttacaccaaataataattgcttgatgttaccaatgatcagattagaatgttgacaagcagcaagcactagaaaatgagaccatacatagaagtacagctgccttgcattgattagaggtaccgtttagaaatatattgctgcataaaagataatatatgcaccatccctgtacatttgttttccttgaggttgatgcaaactttcaaattcaaatcaacatctcatgttatatttattttaaagtcctcgcatagacctcaaacactttggagggatggaataaagcatgaacatccatatactagagttgcatttccctaatagttgtgatgattttagttttgaacaagaataccttgctgatgagtttctcaaatgcttctggtccattctgttcaatatatctctccgcagctgatagcacatcatcaggtttactcaggttttcttttcttggaacataccagacatttactatttgacgattcacaaacattggccgcacaaagtgatcataaacataagcagcaccatggaagcaaggtaagaccaaccagcagttgaagaacaactttgcataggaccaaaaaggaagcctgcaagcaaccgtcagaagtaagcatatctaatcctttgttatcctcttgatgtgtgaacatgtttatctccagcatcaatagtaaaaaaaaaatcacaaatattaccacaaaaaacaaggaaaacactagaccagggccaatcctgttttattggtcttctatattatgaactccctgctgcaagggactcacaggctatgttgctaaatctgaactttttgagggaaatcaaatgctaaacaaaaggaaatgagtaagacaaaaaaaaaatctcctgacccaggaaaatggtcattaccattcaattactggagcaaaagtaagctcaaacaaagtgataaacgagtacagcacccagtaagtgagccattgctgatcatcaacaggagattttgtttctattgctctcacagaggcatatctgcagaagtgcgaaaagtaaatatatatatatataataacagaaataatcaaacaatcaaaatggcaaaatattgaattacaacaaaataatacttacaatggataagcaagtgaaactaatggcctgcaaaggtaaaacaacagaattgcctcagaaccaatagcttcaaatatataattaacaaaaacaatatgttttaagttttttcataataaagaccacctgctctcgaagttttttcataatctctagataatgcatgtcatgatcactgatcacattgcactatagttaaccaagaggcattttttctattactttctcaaaacaacaaattacaatgcacataaagaccccagcttaccatgataataaaaaaaataacagacaatattgtagttcacatgacagcagagcagatagttcaatgaagctgcttttgcagaaaaataggaattcaaatttcatcttgtctgctacccaacatcaactaatatcactgcagaatttcctgccatgggcaagctaatttttggattttcatgagacccagcagtcgacaaacaattagtaaaaatgtttatcttatacttttttcctcaggaacatccatttctattatccccaactgcatggtagcacagcatgtaagccaccagtttgataactaaccaagttgtgcatatcaaaactactgactcagcaatgcatgatagtactactacacaaataagattatttcatgcttccagaggaagcatcactacaaggatatccattccatgttgatattaggacattgactgttatgatactatgctgaactctgctccattagtcacccataaaaaaatggcctttggattgacttcataataaacaatggagcaatagtatacacacaaaaaaaaatcttataaaacctttaccaatagtgaagtttcattcagcatcgtaaataggaactcagatgagagtagctgttggtaaaatttttgtaacaaaaataagcctaccatttctccaaataatcatattctaacttgctaaagttccacaaatcatacgacaagttctaaagattggtcgctttatgcagtgaagttcatttccattccacgaccaccatgcactgcataatcatacgcagatacgaagaatctttccctcgcaactctcacgcctaataccaatttcacatgtaccataacacctactgccatactgtcctacaaacaaattcaaaggaggatcctcaaatgaataacacgccccatattccatttctccgaaatatatttaggcctattttctagcgccagaaagatccctaaatgagtcaaacgcgtcctcgatcctcccacgacgacccaaaaaccgcccaaagattctccccccaactttccccacatcccccctcgttcttctcccaaatccccacacatcatcaaccaagaaccaccaccaaatcgacatcgacgagccacagccaacgaatcggcggcgaacgaaatcaagaagaggaaggaagaagaaaccccgcccgtacccggcgaggacgtcgaagttgttggccagcagcttgaggaaagatccagaccccatcctctccccttccgccgcctcctcgacctctctccctccccgatggatcgaccagctcaagaaatggcagagattcttgggagctgtgggctagtagtggagagccgttgctcgggagactcactcccccctttcctctttactacttttctcctcctttctctccgctgttcatggccatggctggtcggtcaggtcagctactctgccgctggtggtgtcagtgacagtgagattcgctgggccaaccatggaaggttccaggctgcttcttcttcttcgggaccagatttctcggcccatctaagaagtgggctagttgggccttaggcgacgtgaagcgggtggtccaaaggcccaacgatgatgtgctggacctgcaaatgctagcacaacgctcctcggcttccctccgtgtggcggcggcggcggtggcgccgtggcggtggtggcggcgaagcaccggaagccggcgactagcggagacggcgggcgcggacgatcaagcggcggcggcggcgtcggccggagaaccatggcgcaggtagatgagcgctcttgaattttttatctatatgcttgagtatttttttcccttttttcgtgttaaatatcttaggtcggcctgttgaatgtttgaatattgatttctacgagctagatcagatgtcgtcatctcgatcagattgttcatttggttgatggctgcggcactgccttccaaggcagaggttatctgtatctgacaatctgctacaagtctgaatatttatcgagttttcagacgtgaacagtgacaccccttttgaatttcagagaaactacatatcggctgtgtttagatccaaagtggatccaaacttcagtccttttctatcgcatcaacctgtcatatacacacaaattttcagtcacatcatctccaatttcaaccaaaatccaaactttgcgctgaactaaacacagccgataatgcattggcttggctggttgccgtccaaaaagttgatgacgaccaaaataggcaagaataagttcagaattcagaagcctcaggccagccaattcagccgcaaatctcaacgaacgaactaggaaattaaaccaaacaatgtgaagagcgagaagatgaacaagagccgaagattgtatatatgtcataagtttaattaatttggaagtcttagttagtgctatcaacaacgtgaaagagcgagagacgatgatcattactgaaacttgatggactctcagtaaactaatcgaagacagcctctcttctcactagtcacaagctgcgatgattagcatagcaccagtcgcagctgtgcttaggagatttgataagatatctccccctatccgtaccagaagaaaagggcacaagtcatcatgcacactcattagggcatgcagtatttacctatttaaatcctgcacaaactaagtacctttttcccatcagaacagctgatgcatcattaagttgttgtgctagctagtttttcaatcatttgaatgccatatgctcttgctttaacttacaatattcttgcttggcattttattggggaatatgaattatattccgccctgttgttatatacatcaggattaattacttttcaagctttgagatcatgccatgcatctcaatattatttttagatatatataatcatcactaggaacttaatgctagatcattaaaaatagtaatgctctaatgcacctaattcattagcttgtgcatcagtgctgataattaagcaacttgctgagccgattaaggaagctggtttccgtacatatgtgttggtttagtgagctagctgcagactgtttgcagcaatcatgctgttcaaactttgatagtaatattgttgtcgcacccagcaatattatgctgcaagtggcctttcggggacctaatttaagagagattccttctgaatttctgataatttgtacaggtcaaagatgtgcgggtgaacacttcttacaagtcaaagatggtccacccactcacccacaattcaggtacatgtccaaacctaaaataatgtggcactcagcttacaatattgctgccatttgcttgtagactatgtttttcctttttggaggctttggcaacttgtcttcctaattaagttttttaagcaatgtaatggagtatcaactatgctgctgctgctgctgctgctgctgctactattacagactgatggggtatcaaaagctgagaaactgtacatgtgtagattgcttccctcatcttttcctctttaccacccttttccacaaaagtgatatggaattcaaccctttaaaggctttaaaaattggtggccatgcatcaaatcttcaccccaaaaaaagtggaaaccatgcagtgctgctataagtacaccaaggcttgcacatgttaactattaattgtttacaatgctgagagctctttaatttgtcttaatttgtgactttcttgtttctatgggattaattactgtgatagttccttaattatatgtatctacactcaagctgtttggtttgcattaaacatgtgaagacgataggcagtctgcatgtatgatagattgagcactagtagtgggagaaatagctctgcctacctgtgaggctgtgacaactaacagcttttgctttttatcattcctctccatgttaggtcctatacattcacattaactaatcgatcagtattcatggcaattcaggcatggctaccttgtgtttgtctagttagtttactctccctgcatgtggggccggccattgattagacaagtgaactcccccggttaattttgataagaaatgtcctctcatgcatcaattagtcattgctaacaacttaatcaaactgatattattatacgtagtgtagtgagcaaacaattgattgtccagacaagggtgaagagacaaattgcaaatatatattatgaatgcttgttccagaaggatacatggtctatctatgaagtcatccatatatgaatacatatgcctcaacctaattaatctcatcacaaacaaaatgcagagctttcaagttaattaatctcatcacaaacaaaattcagagctattcaagtggttaaccttcttagtgatactgaaattctagtaatacacaaagatgtgacaagactgatgttttttataaatattcacatgtggcatctgctgatccattagaaattaatatggattatcaccataagcgttatagtgaatgtgaaacaatcacaatatagtaactctggaacatatttgtattactagtgttgtagatcagatgtcggaaattgtttccattatccaaaaggagtgctagctcattaaaggctagaatgtggttagggggcttccttaaatttactctaataagtaagaaaggaacatgtaggaggtttatatatctaacacgatggagactcatggaccacacagcaattcctgtggttcacaggaaacaccagaatcacatggcaccgcctgtttaaaagacagaagtgatttcatatgtctttcatcgtgtcctttttctcctatcgatcaattcttgttccaatttaccacccctctccttggtcctgactcacacggtcacaccttctccttaatttaattaattattttagcggcaatacttttcaatccaatattttggaagagtaatattttctgttaactaactggattttgtacggtcttcaggaggtaccaagaaattacgctttgattaatcaacaatatatatctatatccaggtatgtcaaaggattaacactaattagcgctactagttacaagtgattgtgaaaaatctatgtttgaaaagtatgtttatggcatgagtacacatatatagcatatctatttgccactcctcttgggcgcctaaaaatgtgcattggcccctggttcttgcttttggtggacatgtagttaaattgtttggcctcttcccctccatatatatagctactcctagatgtgtacaaggccaagaaaacatgtgaggattcacatagctactactccataaatcagcaaagacatcatggatcgatttgatggccggtaacacgagacacgcaaagaggatatactgacgctgcacacatgaaaagcttaccagttgggctcacggcatcgaccgaccagctttcttacaggtaaaggcaaatctacaattagctactatacgaggaaatatatatcggaaacaaaaacttgggtgcaaacttgaaaatcatcgcatacaagtttttaattttttttaaagagtctcatgtatagctaaggttgtattagacaaccatataaaatgtgcctttgattaatggggattttgaaccacctcatggacttgtgcctagtacgtagtcttatgatacattttaatctatttctatttactagcaatccatatccttgataaagagagagaaaactagaaaaaaataacttatctatagtaaaacagtgggatctttgtagtagaatactcgtttttttttagaaaatgggataaacccggcctctacatccgatcggatgtacacagccaagaatactcgtttttatacgccgacatgccaccacgacatcatagaaactgactatggaaggatccttctagtcttccctaaccattcaaaccaatctaaggttggagatcccgcacatggcacacctatcaggtaggctatcatccttgtgctacgttagattcggaagtcgattagcattgattctcgttcgccctaactccacatccatcctcgccttggtgcctatgagagagctgagctatactataagtctagccattatccacactgacttatggtaagtacaataatttctcacaagagttttcgtgaattgtggtaagtgagatagtatctcaaggccattccctatgagtcttaggtagcccggcgttgcctccccctcaatggatgccataaatcccctttaatgcacaataattcgatttagggttttttgtttataataaaaaaatagtgaatattctaaaaatcatgactaaattcatatgaactccagtaaattctaaaaatgccaaaagtccaactaattataaattggtttcatgtgttgtttcattatattctaacgtttccgaagcgccattgtacttcgagatcatcgcaaaggtccaagtgtagagcaaggcaagttatactattgttcttgactctattctacgtgaattaagcaaatgttttgcttacttgaagtaagcattcattgtttcacaatttcacatgggatgtcaatgacctatatgtagttgtaagctatagttcgaatactatcatttcctcgatgacttgggtaacatgtgactagatgtttgcctaggatggttagatcaactagctcactattgggataattacctctctattttatacctaggaattaattaatggtgacactttgcacatggttcatgaggatgactaatccaactaaaagatgactaaatggtgagttttcggtgcatggttttgttgacgcatctatagcaattaaggactaattcgtcagaaacccttgtaaaatattattgtacttagcacgccagcgtgatcaatggttgggcttataatacagctcgctcctctcccaggcaccaaggtgagggtgggcatgatggagttgcgttggaccagggaacaagtcctgtcaatttctatgttcggcaatataatttatagggtgcacaagatcaaagagagatggtgacacagatttatactggttcaggccctcgagtgaggtaataccctagtgcagttggtgtagattggatctatgtcgagaggtgcggagatcagcaatggagtggctgatggcacgtgtaatggagtgtgtgagtaactcttcagggttcttgccgaagccctttatataacgttagggcttccggcggcatgcatgtcacaatatcccttataatctgggtacgtgcaatctatttacatgggattggataatatttcttatctcttatcccttcctatacatttttttttgtggggacccttcctatacattaaggatagccgcatggacctggctactcggcctgctctatgtgacacggcacaaaggccttccgtgaggtacccgggtatcgtgccctccacaggtgttgatcgacttttaagtccacagtggtgcaagggatatttcatttactttgagtcgttatatgcatgtggtagcttgatagctacttagttaaagcagtttttatccatatcatctcggaacctccggagaattgactgaaacctaaggttccaaacaattgaccggagactttgagaaataatttaatccgctacaaaagtttgtttaaatttcagttttcgcctattcactcctctctaggctttacaagggactttcagcatccacacaataaaaggtagagttgagcctatcggttatatggagaaaacattaaaaaattgaggatgatgtagagaatataaacaaaagacaaggtagaaactaactgcaagtttatatgcaaatatagcatgtctaattccctcctcatatgtgcaccacacattataatcaacatccaacttggtatgatcatccaatcttggttcgcaaacaccagaagagattgtgcatacatgagcgttttataagtttgtacactaaattacatccaactaacaaattcatatgccatcaatgcaatttgctaacaatgagtttaatagcaaaatgctatactttctatgggtaaattgacactcattttgatgtttgtccattgacaatacaggaaactattctaaactctcgagagaatatcctctcattgtttgcatgtcatccaaatgattataattttctttttaaaaaataagcaagataaattaatatgtgataaatcactccacaagcatgcaaggttaaatttaacttcaacatgttgcaatgagaaaaaaaacaaatttgactatgaatatatgttaactagcttttttttttgcagattgtggaagttaaaatttaacttacatgtttatgcagtgatatatcatatattaatcaattttcttaatttttcataactatttgtatgacatgcaaacaataatgggatatcctttggagagtttaaaatccactccattgacgatatattgtaatactagcataatgctcatgctttgctccatgtaaaggaatatatattatgacagtattatagataaaacatattttttatcgaaaatatatcagtatcacttgtttgcttattatttacatatatggtattcacttatttaaaacgagaaccctagccctagcaaaaccgggccgggctgggccgggcttcactgctttacaagagccagcttagtgaacctaataattctgctcctgtcctccttatcctgatcagtcctcggtcggcttttcctctctctctctctctctctcataaaacagagacctttaatgcgtcgtgatctctcccctccaatcccgacaaagtacacacaccatcgtctccccctcctgcctcgatgctagctctcccattcccatctctccactctccctcctatcatatgctcctcccttctccactcttcttctcaaatcctctctcttcctcttcgtcctcctcctcttgcaaccaaaaaacaccataaaatagtaatcccaatccacaagctcacctctctcttgcacacacacacacctgacacaacacttacacatcataccagaagaaaaaccaattcgattttgccaaattacctagctatagcatataggtaggtagctaggtagcttggttttccctaatagctctagcttgatctctttctagctctaccggcggcgtggcggcggcggcggcggccgcaccactctacatcatcacgtacacctgaccagcttagcgggaagccccacaagaagagtttgtaggtcaccaatcagatcatcagttcatctttgtggttgtgtgggtgtgtgtgtatatatataccatggcgtgagagtagccatggatgtcaccggagacggcggaggaggagggcaacggcccaatttccccctgcagctcctcgggaagaaggaggagcagacgtgctcgacgtcgcagactgccggggcgggcggcggcggcgtcgtgggcgcgaatgggtcggcggcggcggcgccgccgaagcggacgtcgacgaaggaccggcacacgaaggtggacgggcgggggcggcgcatccggatgccggcgatctgcgccgcgcgggtgttccagctgacgcgggagctcgggcacaagaccgacggcgagaccatcgagtggctgctgcagcaggcggagccggcggtgatcgcggcgaccgggacgggcaccatcccggccaacttcacctccctcaacatctccctccgctcctccggctcgtcgctctccatcccttctcacctccgccttgccggcttggctggccctcgcttcggcggcggcgcgcgggcggcggacgcgtgggaccgcgtcgtcggcctcgggttcggcggtgcggccgacgccccgtcctccgccacctcctcctcctcgtcgccgcttctgctgagcttccactccggtagcgtcggccttgacgtgtcgccgccgtcggcgtcgacctccccggccgccgccgacctctcccggaagcggcggtgggagcaagaaatgcagcagcagcagcagtaccagcagcagatggccgggtacacgcagagccaaattcctgcgggcacggtgtggatggtgccgagcagcaacgcgcaggccgccggtggcggcgctccgccgggaggcggcggcgagtcgatttggacgttcccgcagtcagggagcggcggcggcggcggcgcggcgacagtgtaccgtggcgtgccaagcggactacatttcatgaacttcccggcgacaccaatggcgctgctccccggcgggcagcagctcggcctcgccggcgccggcgggggtggcgaggggcacccggggatcctcgccgcgctcaatgcctaccgcgcacaggccgcgcagccggacgccggcgcggcggcgcagaatggagcgcaaggctcaagtcagcatcgtcagcatcagcatcacggcggcggcggcggcggcggcgacgagcggcatgagagcatgagcgccagcgactcgtagggcttccgttccgtccggtgtgtgccccgcattttctctggttttgatctgttcttctttaattttctccgtttttgtttgagttgttgtctactaatgtctatggctttcttcctcgacccatcatatattcatgcaaggatcatacagttgcattccatgccatctgcataaaaatatcttattgtgtgctcttaagaatggatcaccaatttcaccatgataaagctcttgcaagttgcaagtggtagggtttggttagaatgctagagaaccttttttttaaaaaaaatgaaaatgagaatgctagagaacctagaatcattaatcaataaatcattgctttggtatattgatcgatcgatgaggattatccaccaactaatcctcatccaatgcatgcatgcaagctagctagcatccattcgatctgccactctaaataatttcttgttggttatctattgcgtacacatttcatacatcttttctctgtcaccgtatatagcttttgcaagacaaaagtttttcattcgaattgtactaccggcatgcatgcatataacctcgacaaagttcctttcatttgaatgcatatgcagtgcacggttctactagctagctagcggttggccgggcggcaaaggttgccaaaaaccaagacaaggtagcacggtagcaatcagggattgcattgggttaatccgagggtaagcatcgacgacgaacttcatcaatcaaatataatttttaaaatagtttaacagtgaagaaaaatagatctactttctacaatccagctactaccagtggcccactcctttacagtcgtgggaacacacgttttcaaatgtgggggcactcttactaatttgcagaatatgcttatatttatagtcacgtgtcaaagttccagtgggcataacactattagtatcataggagttagatagtgattttatgaagaaaaacatagccttaagttaaatagtactacctctactagcggtgacaattagtcaattagtcatccgctggtcagaggatgggttaatccatcgagagctaggaatatccttgacttgtttttaatcacctgtcaaacttgatacaaatagttaaaaaagttcaaaaacaacattgaaatatagacttcagcaaaattcaagtttacacttaatctacctacacatcaagaaaaatttgaacaaatttctgtgtgaatagcagctaggtattgttcatatatatgatgtatttgtttttttccttcctcggtgtgtcatcagtctagtttagacttgatatttttgttgctagcatgcatgtatatcttttccgaaagggcgccaaccctttttttaattttttggggaggggcgcccccatttttctccacttctgtcatgtacaatagagtttgaaccgggggtaaattaatgccccccacgggctttccgtgccacaccaggggtcgcccccaccataaggaaatatggtgtgtttcctccgccgtcacacaatgtaagtcattataattttttctacatttatattgatgccaataaatttagatagatatatatatatgtctagatttattagcatcaatataaatatggaaaatgctagaatgacttacatttgtaaacggaggggagtaccaaatatttcaaaaacatgtggaaattgtccgcgcgtcgtatctttggagtggaggaacgtacgtaggtgggtggggattttgtaatatggagagctagcttaggttatatatccagtacccccgatcgaggcaccaaccaccaacaccaagccatccatccgactatccgtgagcacaccgaggcccccaacgccgactgatccccaccccccaccgcgaggcggcgcgcgtacgtctcaccgatcgagcgaaacgaaacgaaacgctgcctgccacggtgcatgcgcgcccggcggcccgtgcgcccgcgggatggatgggtagatgcgggcggccccgcgcgtacgtacgggacgggaggaagagatcgtacatcgcgcgagcgagcgcgaccggcccacgcgcgcctactggcgctggctggctgcaaaccgatctcgcgatcgatagcgcgcggggagatggagcgggaagcgcgtggtccacgcctttctccgccagcgcgcaagcgcaaacggagcccctgtgcccgcccgcctgcaggtgcaggggggcactgtcgcgccggtctcccccgcggctagctagcttcatcaatacaatcgcccgcctgcgcggacgtacactgcaggtggagggccggagcatgtaccccgcatcgcatcgcgcatgcatgctatgctatgctccaccaaagggtacgttacgtatatatatcagccgggcgagacacgtacgtttgcatatattttgcggacaattattacccctttggatcgatggaatttaattagtactgttttcatctcagaataaattaatatatttatagaagattggagatagattagcaacacacacacaaatgatcacaatgaacctatttaataaccacactgcattttctataatatatatacgtaaacttcttttattaggcgatgggaacggaaagatggtgggtaggagggagtatatcttcatctaattaatttgttgggttccacactttattaaaaaaataacttttttttataaattcgaatggtagaattcaattattccgggatggagctagtagggaatatgaaggaattgaatctgttggtaaaaaaaattctttgagaggcttttggatggtagggttccctcatagaaaattttgagaaactattactatatacatatatacgactcaaaccgtccaactggatttgatcaatggttgcagtgtatataaacatatgtttctttgttatttgcatatccctaattgtacatgagttatacaactaggttgtacatatagcagtactcgaaattttatatgttaggaaaaattctttcacattttgtataaattcttctagcaaattaattgctttgaaagtttcaatatacctatctctcccttctctctctctgataaatgaacacataatcttatattttctccacttttcgatcgtacgaggcatccaaataactattttgtgtaatacttgcggttttgtttcctgctacaagaaacaagttataacattttaatcatatatctttttatactaattcctgtattttaaggaacccggtttcttcgactagtgtggttggcactagcttgaccagctaattgaattggtgacacgtttgtgcatggatgcggtcattgatgaacatgaagacgatcgatcgagagactacgcgtcgttgcctcgttggggttggccacataatgagctacaatgtggtgactgcacaagtgcacagtttatgtgcgtgcaggtgggagggaggaaagaggggagagaggtgagaggatgaggccaataacgtgcgtgctggagctgtcggttgttctctgcgccaaattggagccgtcacatgtccggctgattggccgcattgagtggccttgcctagctagtggccgcagcacgtagcagcagcagctgctgcagcgccctaaacacaccagtgaagcacatgtgtcgtgcctcgccttgtctccctaatactgccactcgtttcgagctagcagcttagagctaacacatctctggaaaagtattagttcaaaaaaaaactctagaaaagtgattatgatcccatcaattaaccaagagttggttataaatcaaaacgggtggacggtgatggcaacacacccagggacatctaggaaaggagtccacactactaccctaatgttcctacttcctagtgacatgggagatctagaaaaaaaaacaaagggtatttcagctcaacgaactctcaatgctatccctctctgtgaagataaaagaagaggctagcccagatcatcccttagagcatctctagcagggacactaaatatagcccctaaacagattttgggtgttgaggctaaaaaactcaatccagcagagcccctatcaaggatcctaaattaggtaggcacccaaataacctttcctagcccctagtctcaggggctctactgcacagcccccatccacggttggaaaagcgcgggagccgcccgacgtggtcttggtccaccggcacctcccctgcccagtgctcatccccggccggtgcggctcctccctgcctaccatgtcatccctcaggtgcattcctctacccaacgctccttcccggccgacgcgtctgctgtacctggagtctcctctagcctgcaccctctacctgaactcgatgaaaaacatggcccagtggccgagtcatgcgatggcgtcgaggcactggatgattcaagtgttgttgcaggctgcgaaattgagaaagtagtagcagggtagcactagcagctgcgattgtgggacttagaagaatggggaaagtgatacatgcgatgtgctatgcagcttttttgttgctttgcttggttgttgcttcgtgagagaagtagctggtctattggtggatgagaagacgggaaaaatcaacacatgtgagaaaatgcatggaagcgccacagcagcagaagctcgtttcacccgagctatgaatacatgctactaggatttgtatttccattttattttttttaaaagaatcgaatttgaattgtaaatttaaatatggttggattattatggttttatactaggagtagcgtagagtatagaactatagatttgtactttaaagtatatgttaaaatagaagatgaaatgaaataaggggcgagaaaagggactgctgctggagttaaaggtattttttaggtacttagaaaatggggaaagcccccattaaatttttaggggctataaaataggagctattgctggagatgctcttagtcttctccatgtgaatttacaattctttactttcgtacggttccttttcttccgctatgtttaatatgaaatatgcacattcgggtgccgatttgttaaaaataaataaatcaatacggtgtgtttacgatataaaataatttgtgagtaaaatatttacatatatactcttacccacctaacagtccaaattaattttataattaaattttaaaatttaaattttgactgcggttgatttctttaaggtaaacgacgagtcacatagcttagacgagatgagtgcactgtttgacgcaaattaatgcgcatgcaatcgtacacccgtacgagagggagagcatgtcatgtgatttcgagaggcctaggaacatgttggttcatcagtcatgccggggcgcatgcagaattagtactgctcggtaatttgtgcgactttatggtaatttagagagcagcagtactgcagtagtagtacgacattactacacttatttaatcgtctgactaattaaactagtgtcagtttattcagtatcagtatgatactaatgatagtatctgatctcaaggtcggcattactatgttgggagcatactccctccgtactcgtaaagaaaatcgtttagaacagcgacacggtctccaaaacacaactttgacttcttgtttctataaaaatatttattaaaaagtgatatatgtatacttttatgaaagtatttttcaagacaaatctattcatatattttttacattttcaaactcaataacttgagagttattcatgatttatatttccaaggtttgacttaaacattgtcctaaatgactttctttacgagtacagagggagtatatactttctccatcccatatactatatctatatatcctaaaaaagttatttctaacatgacagtttgtttcaaaataaaactatttctccatagcctctcctttcacccaactataaccattatttacttaatttcttcatctactttttttcttaacgaatcacaatgtttattcattattttaacttctttttaatatccgtgtttatctttaaaaaaaatacgtatattttaaaacagagttgtatatatatttttggagttcttcctaggacgtaagcatttctaaagtttgtcatggtacatgactaacgaggagagatgtgaagttaaattaagatcaatattgtagttagttaaaataggagatacagggagaaataaatgaaaaatgattgtgatcgattaaaatgagaaattaagttgatgaatatattacatagtactatatatttttttgataaaatttaaacgctagccgtagctatattttggaacgggcgagagtatttcactcactctgaatttgacctcctcatgttgcactaggtggcttttgtcaggactagctgtggcgcgcattcctcttttgaaaagataggcagggtcgacgcaggcaggcaggcgcatgtgtgcgtctctaccgaggtgacaacaaaatcacagggaaaattctcccctttcatagggatcaatgagcttaagcacacagctctcatgccgttgctgcgtccagtccttttcctctcctctgcatcatttcctttctctctgtctgcgtgagtgtgtgtgtgtgtgagagagagaggggaatctgcagagaggccacggttgggtttgcaaaacgcagacacggctgcttgctccctgatctctactgcatgcagtagctagcactgcactgcatgctggaggaacaggatgggagtaggaggagctagctagccgaggaggagggagagagaggagggcacagctttccctctactcccgtcgcttttgtggccagctgatcgatgagctgagctgagctgagcttaagccgggaagaagaacagctttatgtgcgtggtgaaatacggagcattcacacacacacacagtgtacatgtgcatgtcagtgtgagatactgagggcatgtttagatcagtttgttgtggaaaaattattttggtaaaagttttggtggtaaaagatttggtattgaagtttttctagttggtgtttagatgcatggtaaagttttatcattttactagtaaagagagatagcacggctcccaacatattttttggtaaaatttactactctagacacccaaataacaaatgttaaattgctaaattttctactagtgtttagatccattttaacaaaaagtactccaaaacagtaaaacttttgccattttagaggaactaaacaagacctaagggttgtgtgtattgtgttattgcgtggtggcagtagtacaacttctactcttacctcccctttccagtgcgtgagagagagtagagatggatactaccccacccattcatattataagttgttttgttttttctaattagaatttctaaagtttgattaagcttatagaaaaatatataatcatttttaacataaaacaaacatattatccaaatatattaaatattagttttaacaaaactaatttgatattataaatattgctaatttttatatatatatatagactaattaaaataacttataatgtaaaaaattataacggaggtggtactacactagtactcctatgttgcttgctcctgagctagctttcgacttgtcggccgctctgatcgatgctgccctttatccctctcctttctgcctcgatccgggccatcgcatgatttgcgtttgatgcaccggtgatgaccgtccaacagcaaattctggcgggcatgcatcacaccaatcgtccatggatcacttcccccctcttgcatgtcttgactgctgttcgccggtcacaagagctcccatgctggccctgttttagggaactttaaatagctacagttacttcgagaatctctaactccgtaaacaatctaagaacctgtttggtacagcttcaactcctgaatttagctccatgagttgagtctggagtggagt

SEQ ID NO: 9259 - DNA, 1650 bp, Oryza sativa
caacatcgcaggagtggccggaggaggtctatccaccctatgcaaatggtcctggatatgttatatcttctgatattgctggtgccatcgtgtcggaattcagagaccaaaaactgagggtactatcttatagttttctgtaataaaatttccgtcactctgcgcattaactgtcctccttttattagtacatcagtaggggcctgccctcctgttttcccctaaaaaggagaataccttaactatcactttgaacagttggtttagaaacataaaaaaatatataggatgaaagagacaatagattaacttcaccaaacgaactatatatgattcttacatgacaatttagtaatgaaaaataagaaccttcccttatttggtatcttgttttcgcactggtttaaactggtagattgattactacataagtctggcagaaatttcctaatcataatccacgttgaagaagaaacttatttaatttataattgctttctgtgcagctcttcaaaatggaagatgtgagcatgggtttgtgggttgagcagttcaacagaacaaggcctgttgaatttgttcacagtaccaagttttgtcagtttggatgcgtagatgattattatactgcacattatcaatcaccaaggctgatgttatgtctgtggcagaagttgctagatggaaaaccacaatgttgcaatatgagatgacaatagtttaactggtagcaattgaatcataccgtactggcaatcttcatttaatcaacaaaagggatggatttgctgatgtccttcagtagccatttatcactaactatatctttgatggtaaattaagactgcttgagactgacatgtagaaattgatttcctagattacttgagagtagccagcttagtttcaacatttgataagccagtgcactattactctcttttcttaaaaaaaatgggtacaagtttttaggtactgtagaaatgaatgagcatcattcctgaacatgaagaagtggcaattcagttaagttacttctacttctaatacgactcactacaacgtggcggttgttcacagcttatctggtgtggtgagagcttgaagtataggttgattttgtcctgcaacctgtcatgtaatttagtcgctacctgaatgaactagtctttttctccttgactaatcaaatatgtactcttaactcttctattttttatgtctacaacaaagtatggtctgggaaatttcatgtgatgcgacatctttaaaactgcaagctttcgctgttgctttagttcttacatgaaagtcgtaccttcacaaatcgaaggtgcttatgtaatggtttgctgtttctgatgcctttaataaatatacttttttccactatatccttcatgcgtgcaaatcattcatcatagttttgtctagtaaaagaaaaccttgtatttcggttgttcatgtattctagttgtctgctcgatgaatgtgctgttatcatcataacgatttccctattgatttatgtgcaaaatgcttgctactgaacacttgcgatgaaggaaatgttgtatttttttccccttcccaaacagcaaggctcctattgtgaatttgtgattgctgaataattgaaaatgccactaa

SEQ ID NO: 9260 - DNA, 15061 bp, Oryza sativa
aataggatgtccatcttgagacaacacagccccaataccagtggcacaagcatctatttccaacaaaaaaaggccgagaaaaatcagggagagccagtacaggagttgtacacatggcagccttcaactgttggaaagctgcttcagctgcagcagaccattcatacttcacatgcttatgtaagagcaaggtgagaggttttgctataatgccatagtgctgcacaaacttgcgataatagccagttaatcccaaaaaacctctcaactcagtggtgttagtaggagtgggccactactgcatgatcttagttttgtccggatcagtagcaaccccttctgctgaaatgatatggcccaaatattccaaagatgtggcagcaaaagagcatttactcaacttagcgtataactgatgttgttggagcaattgcaacactaattccatatggtggacatgagagtctaaatcagggctataaaccaatatatcatccataaaaacgagcacaaatttcctcaaataaggagcaaagatggaattcatcaaacattgaaaggtggttggtgcattagttaagccaaagggcatcaccttaaagtgaaaatgcccatggtgtgttttgaatgcagtcttctcttcatccccttctttcatacgaatttggtggtagccactgcgaagatccagtttagagaaaaatttggtgccagcaagttcatctagtaactcatccacaataggaaggggaaacttgttctttactgtcaaagaattaagccttctataatccacacaaaacctccaagtattgtccttctttttaactaacaaaactggagaagcaaatggactacagctgtgaacaatcaatcctgaggccaacatctcagtgacctgcctctcaatctcatccttctgggcaggtgagtatctataagggcgaatgttaactggggaaactccagacagtaaagggatagaatgatcaaattgtctctggggaggtagagaagaaggggtctgaaaaatctgatcatactgatgaagtaacttggtgacagcaggtggcagtggagaaacagatgaaggtgcaggaacagtttcaaccacagccaaggcccaaatatcattaccagcttgccacttacacggtttatcagaagtaacagcagtgagttgctgaagggagtgagagacaataccttgcaacttaaccgtttgtgcctgataagcaaaagagagacacttctcagcccaattacactgcatagggctatactgagacagccaatccatccccaacactgcatcataacctcccagatccaagaccttcatagaagagacaaaagtgtaaccctgtatccaccaagtaaatgcaggaacttgagcagaacaggtgagcagagtgccatcagcaattttcacggtggcaggatcacaggataccaaaggcagctgcaaacgatgacagagatctgcattgataaaactgtgagaactgcccgaatcaaccaagattaacaccacctgatttcccaccaaagctctcaactgcaaagaattagcagaactggtaccagccaaagcctggacagatagtaacataccatcatcaggaggagtatccaggttggtaagagcatccagcacactatcatcaagaatttcagtagtgtcagtcaattccatggccttcaactgaaccccttcaactttgccacacacatgagtaggactatacttctcaccacatttgaaacataaaccattggcacgacgataatccttcagttgttgagctttccacaattccctcagagtagatttccctttatccccaaatttaccaaccccagtatccttcttgacaaaggatttatttaactgttgagcaccttcaaaagccagggctgccatataagcttgagtgactatgacaggttgctgagcatgtacattatatctcaattcctctttaagaccccgaataaactgagacaccaaaacagagccctgagtaatagcaggattatacaagcgaatgtggtaaaccaactgattgaactaggagcgatattcagtaacagtactagtctgagtcagaagcaacaactcatccattttggttttctcaatgtgcagctcaaattcagcagctatagcagtgcgcaattgatcccaagtcggccaccccatctcctgtttccaagcttggtaccagtgcgccgcatcccccactaaattaagagcagccgcagacacccgaaattcatccacaatattatagaaacggaaataagtctcacagttgtctaaccacacgcgaacatcagacccatcgaatttaggaaaatccatctttggtgtccagtgacgacgcccccccgactcatcagaaggacgaacaggtggagtaggcgcggtagtgaatacctgatgagacggtgcagagtgcacatgggtaggggacggtggcgccgaagatgaagaagaggccccatccttagtaggcggcttcggaggtggaggaagaagtggaggcggttgcgacggcagaggtggagtcggcggtggagttggtgacgaagaagcagacgtcaccgccttgagagcccgcgcgacctgagcttgctcatgctgaacttgcccgagagaagacatggacaaatccaccttgctttggaccgaatccagccgcttcccttgagtttcaagcttgaggtcgatctgcttaagctgcttgcagagattgtcgaccctctccaccttcgtcaccaacactgcaatcgcttgagtgatgtgttcctccatcgcatccatagccgccacaacttgacgcacctggacgccttgcttcgccggagccgtggtgactacgtcgaagaaccagatcgaaccaagcacgagattaacagagaaatccccgaagataaatcccaaactctgatgcgaggatttaccgagctgaacaacgaagcagaaccccccacgccacgaacgaatccaaatctgataccaagttgtcacaacctcgtcgccggcgagaatctcgccgccgcaatgaggatgaacacaagatggattcgaatttcagagaacagaagagaggcagaggaaagagagtttggggagaggttttgatttcatttcttcagacttgttttccaactacagttcacggggattatatactactccctcgcgtttccgccctcagggccacacaccgaactcacgctacacatttacttaagtcgctttctttacacaaaaacgcctcagcgtgattacgcttccttctcctgttcctcgtccgttgtcatagcctgcgatatgacacgccgccgccgctaggtcgatgtgccgccggcgccggcagggagatcggagatggcgcagcgcggagggcggagggcgacgccggtggggagtgtgacgtgttcgtcgtgttcttgagttgccactatgtttatatgggcttttcatgggccgggcctaaacgaggcccaaaaggaagagcagaatggtcagttacagtcaggtttacaatttcaacaaaaagagaccggtcagttttcacgagatctcgtgatttcgaggaggctggatttcgaatgattttctagaaatataaatttggtcattaaaatgaattgaaattcaaccgatatttcgtcaaattttctaggtttctgtgcaatttttattcgtagctcactgcatattctccatcattgttttattgttttagaacagtactagcagtaacaactatcgagctcaacttaaagccgaatcgtagtgtaattaaaactaattcggatccgaatcgtataagcaaattcatattcgaatcgtacattcctatatattcaatcatgttgcccgcctcgcctgcatcaacctgtagctagctagcttccataaattaagcacgtaacggcacaagcctagactcgggcagctactctcttcgttccaaaataaacaaaactaacaaagaaccaaggaagtagcttcttgatctagtcagaactcgatctacgcatctgatctatgcaacgtacagtggcagccaactggcggtatgggtggagtggttttgtctgacatggaggtgagcatgatggagcaggggaagacaacaacactgccgcagaaagtgagtgtcacgcccgagcatgagaggccagaagctttgttggacgccaacttgaagatattgctaatggtaagcttgtgttctatatatatacactccctcctctccgttttttgtttgacgccgttgattttctaaaattttaaatttgatcaaccaattttcttgtaaaaaaattatgtaattattgtttattttgttgtagcttgttttgttgttacaagcactttaaccatgacttgtgtttgtacgaaacttttggatcagacaattaaccaaacgtatgtgcaaaagctaatgttgtcaaatataaaaaaacagagggagtatagtatgccttgatctggaaaatatctagtatattaaaaaaacatcattaattattaataggaaaaagtccatattgctccctcagctatggtcatagtccgattatctcttaactaatctctctactcttgaaactattcgtatttcatcattggcctaaaccagggtgtttttcgaagacatagcgtcacttgatatccttattagaaatttaaaatatataaatatataatgtctatgatagaaagagaaaacggaggtgagcatgacacatagataagcagtatttttatttttattgttattatttattattgattggtatgttgatgccatcactaattgcctatatggactccatgtagaagccacatcgttgaaagtactctatttttgaaatataaaaagaaaatcaatgtaactgataatttttttctttacaactcaaatctttttgactgaaagtacaaattttcccgtatatacggtgatctatgcatatatatattcttctaatcactctcttttctgtcctcattttcagataatcgttacgggcgtatcgctgggggtattcgtcacttgccttgtgttggcttttgtattggacttaactgtggagggtagggcaatggtagtgtttacggcgctagttggtgttgtctacggagtggcaggctataacatcattcgagcatgctaagcgaagccaaacaaacttttttttctctctttttaagtttagtttagtttgacgaacggtacaaaaatttccaagatttccaactgtcatttccactttccactttccgactgtcggtatcggtaattatcggtgtcggaaatagaaacggtaatagcttttggaaatggtaacgaaaataggatggaggtttttccgaccgttttgtcggtaaccatatttgtctagtaatttccgtcaaaattcgaaaagttccctagtgatctagctagcctaaccaaccagaagcctataaatgaaggaagtctggtaggcttgcagcctgttaggaatgggaagtggccaggggaaaaggttgttaagacgtgacatgtggactttgctaaactttggtctcctcaacttatcgatgctgaattattattgaagtttgtttatattgttcgtcgaagttattatcatatcattaatcatcatataatagtgttatgtggagtgtgatgatgcacgaatgaagttataaagttatcttcatgtatagttaaatgtgtgattatgccacgccccattgtttccgatatgaattttcgacttccaactaatatcgatagattccattccgacagtcccatttctaatataccaatattatcgatatcgttaccgttttcgggcctatcattccgattccgctttcgataaaaaaaatatagaaatgaaaatggtagagggtcggttttcatccattcctaggtgaagccaaaaaagggggttcgttttccataaatttcatgatttgggggggtggctggatttcaaatggttttcaggaaatccgaatttggaaagtaaattatgttgaagtttattcgatatttggtcaaattttcatgttttcgagaactagcggggcacggaaccctggtattctgaacagaagaagctcctctaacttaaaattagtggaacataggtcctgacaggtgaggcacacccacatgagcccacgtatcaacaacacgtctctcttacttaagttagaggagcctgcctagatcatccaagatatccaaatcagcataacaataccacaagcacacaaagatattggcacaaaccgatacaactgattatgtatatttatatatatttcgcagggctgtgaaagagagatcgctggccgatttcgttcatcagaaaggaaataaggagttgcagagatttgatcaaccacagggttcagaaggttgtaagctagaacagcttgcacatgaaagaattcgcacttcctcagatcatcttgcgatagtttacctaatctgataaagcagaatactctccattgatcgacagcttccatgcaacaacgtcaaccaacacacaaagttcagatacctattcaaggcctgaagagaaagttcagatacttgccaccgtccatttctccggtttgacagaagtggagacgattggcaccaggttagcaactgcaccactgtctgggaaccaatcatctacccagaaagatgttcctccatcccccaacttgatccttgtgggcgtggcagttctaaaacagtcgtcgatcgccttgtcccgcactggcttcagtccgcaccatggatgctcgagggtgcttccattgcagcagcggccaacgcaattgcaaggctgtgccgagcatctggagatcttcaaaccctgcattcatatattgttaactgatggggtatttaacatccgaacactggatacaacagatagtgtttaactgtctatactttcatgatttctcctaaccgtttatactttcatgattgtgccctctgatacccttaggaagatatccccaaggtctgatatttaattgattattgttatcattcatatatatatgcctgcagcataattatcgacatttcagcatgacagaaattgtccaaaagaataaattgcataactgctcctttcatatagcctaagttagtactcaattctgatatgttgagctttcagactttcagtcctaaatagcagttctacattagtgtaagcaacactaccagatagtacttgatatcctacaggtttgggatcaatctagataaccaactaaagtgatatatgcttaagtactatgaatgtttgtgcgatttctgtaaactcttttatgcttacgcttctattatccttacctgtggtgtcctcttgcttccccttctccttgggcagcacctccttatgttatctgcatcatgactgtgagccacgacatctaactagttacactcgaggcccaaggcctatgtctcagatttccgtacagcataacagcaagaattttgaagtccgattcatctaattggagtggactagctgggacatattgctacttagctcttgttatatactttcttctcatatcaaaagcatccatatccaatcattgattcctagtatagtatgtactctttccttctgtagagctgtcttatatatcttcatgtgacagaaatatggtgtttatagtttgggtatggttgtgctcggaattttgggaagcacccaagaaatttattgcaacatttgacttatcaagggaccacgatatgacaattaagaaaattctggattcatgacctttagcaccaacaagaacagaagaataaaacatagtttccctcattaaggtggcattttcttgcttgaaagcttccctgcaagcaagactaacaacgcaggaagtctaccagatactaattgattatcagacttctagttccctatcaacaaactacaatgcacttctattagattaactatgggattcataagcttggtactctagtaaggattgcttctccaattcattatcatgaatagtatctgagtttgagtaaactaaaaatcatatattgcattaccacgaatttggtaaatttgtccaaaattgactatgcttgcatgaaagcaaagttcattaagaatcccaacatgcacaaccttttaaagttcaaatgtggcataagatgaagggagcactaagatgagttgtgcttcaagagtcaagaggtacaatgagtggcttagtaactaactagtaaccgtgcacgtgcattgcacgtagtaacaaatgtaaattaaaaccattgtgggagaaaaataagaataacagcaagcaagttatacatgcatggtagcaccaaagaatccatcaccagaataaatatatactgtatataaataagtgaaagtgctaagcctattttatgtgaaactatacttgtttattacagtgtattccgcacgacttaacttcactacctccctcttatgacaaaatcaggatcatgcacacacccagttgctcacatctcatacatccacagcctcatatgtgttgtcaagtgtcacaccgagaaggtctgtccaacttctttcgccttcagcacttcatccgtcaagtaaaacacaaaacaatgtatgccaagataaaggatcagtattgatagtaaaatattttcttatgcacagtgtatgtcaagtcaaattaacattgaccaaagaaaatccagattccaatcataaagataaaggatatctcatcagaaatagtaaaggctaatattttcaaggtcaatttgatgatcaaaagattattgaattacaataagcacaagattcaactgctaaacaactttgcaagtaattcatgaagcaattccgatgacatcactttatatcgaaagaaccatcgtaatttcttaagttatgtgccaccaacatttttaggtgataattgtaatttactacaagcattttttggaccgggtagttggaaacataaatgcagagtccactttgagtctaatttcagtaccaaatgcgcaaattttcaagtatctgatgatcacatgatcaagaaccagttcatctggagtatgaacattttagtgtcaaacttaaagtgtaaaccatcaaaagcaaacgtggagatgaaaaattcaaaacatgagacgacaaggattaacctgttggaaatcaaagatgccatggcctctgtgaaccatgtgatgctcaatggggatgaccatcattgataggtcacgaatgattctgccagtgacgctggatacatcacttggtgttgctactgcttggtgtagttccaatttttggagaacttgaaaagaaaagaacaagatcataactcataggctcatagcatgtcactgtaaagttgatatactctgcagtaattttaactgcatgaatctcaaatctattactgaaaaagaaaatcttaggaagatgatatctaggatatgaatagctgttcagattctcacgtcggaccacaaccctgtttcacatcaatcaaatattacaattaggtggcagtaagaaagaaaaatgaattcaggcatgcatgctgaactggttaacagggctagcagtccttactaaatcttaacattacgccttatgccttgatttgacaaccctgattgattttacatttctattatatatagcaatatttctgaaagcaaacacccagaaatattttagcaggcattttgatatggaacttcttggcagaaaacattagagagttgtaaactaaagtgcatgttgtaagttctaattatatgtgcatactaatagtgctcaacatttcccatctactttgcccaaattgccagctcaatgccttcatttaatttccaaagtatctagtcaacatacatcaccatttactgccctcctaactgccatgattagatcaccatggtaagctgctatggtgatgtgtagtatttggaaagaagtgttgcttcaggatgacatgtatagcaaccaaaatgatccaaaattgtaagggttagccctacaacacttgtattttgcataggtgctctgcaatttatagaacgaatcaaatagcctacaaatatcctttaccaacaaataaacctcaatttatcggcatcaactctagggtatccttctaaaagactcaaaaaaatatcagtaattcacaagaatagagaattgtatagaataattagaattatcaaatctcaccaaacaatcaaaaaagaataatcatccccaacaattcacactcggctatgttgccaacatggttgaagagcactggattttattttattttataacgaaagtgagacaacacaacttttgattgaagtgttcccatctattgaaacaatggtacagtaattctaatatgtgagttgcggtacaaatattatgtttggagaacaggttgggtatgataaataccagaaacaagccgagagagtgagttggtgtgatatccccttgtggttcagataattgtctgcaagcgtgtagtaaacaaatcgttagagaaaaaacatgaatccagtagaaaacaagtttcttaaccacattctaataccaatataatataaagaactgttgatttgtttattcggcaaactgcaacacattaattaatctgaaagtttcatattcaccccttccagcccatatggcagaagaatacatgcaaaagagtagccagattgcaaaatagaagatgattttgggcattttcaccttacctgttggtacttctgcttttttgtccagaagacggtggtcgagggaaggtagaggccaatcattgcattggcggagcctgtggacgacagcgagaagggaaacatggatgtactccggcggcagggacgggaggggccgacctcggcggcggcggatggggctgaggtcggatctggccgcgacggtagggaagaagccggatttggcggcggcagcagaagatgtcggcgtgggcagcggctccggtgaggatgcggcagcagtacgcgcggggaggagctccggcgacggcgaggatgcggcggcgctacatgcggggaggaggaggagcgagcgaggaggagaagcgaagtccgtgcgtggaggaggagcgaagtcttcgcgtgtggaggaggaggagtgaagtttgggcgtggaatcgtgcggtggtgaattcgtgcgcgcggatggacggtagggattaatccgagtgatttggctcgtaggattggaggggtacaactcctttttatattagtatagatatagatatagatggtggtaatcaatacaaattgtactctgtttgcaaaacactatatcattattgttacttcactgtcttcctttaccatccttttaaatctgctgctacacttattcctgagtaaggcaggttatatagaagtaaaggccctatcttttcatatactctttcaaataaacaaaaatcatgggaaaccagctatcaggcaaacgtaaactacaatgcatagatagttgctgtgcgaaatactgcgggattttgaagtcatgtcaggaataacgaacacttgaacattcatactctgtacaatttacaatcatgaaagcctggttacctgactgtcatagcctcttcgcttcaagaagcaagagatgataattcaagtttgtaaaaaaaaaaattaatcctaccaacataatgaactatggcaactggtgcccttgtaggcatttcactagcaatccggaccaaacgtgatcaaattgatcaaacatatagcaattcaacaaagaagctaaacttttatctccgaatcgtttgtttcatagtgccaattcacactaagattccaactgtacatatagcaattaacaacaacacatttactcacttcgaaattactcatcgaatagataatatatatatatatacccctttcacttccatcatctaagaaaatatagatagctgtatacatacaagaagaagcagaagcagcaatggtggtcaagccgcggcggcggtgccttcctcctccttcttcttcttggcctcctctccctcctcctccttggccacatcgtcctccatctccgcggcgagggactcgagcagcacggacttagggttcaccatgggcgggcccttctccctcccctcgagctcgtcgagatcgaaggtgatgagcctgtcccagatccccccctcgaacagcaccccgaccttgccgtcggtgacgcgctgcacgatgccgcagtacatgtggtaggcgttgttggggttcttgacgagcaccaccatcccggggaggaacagcggcagctccggcgccctcggccgctccaccgtggcggcggcggcgagacctttcctgtgcgccggcttggggggaggcgggttcttggcgacgaagtccttgaggccgacctcgccgccggggaatccgccggtgaggcccatcatctccttgtcgaacgcgtccgggtccaccccggacgcagccggcggcggcggtggcgactccgcgggctcgtcggaagaagtggtggtggatggcggcgcggcgggggagtcggaggcgagctccttgcggatgccgacctcgccgttgcagagaccccggccgccgaggaggtcagcgacgcggaaggtcgccgagggagggggcaggcggacgatgcgggggtggtggtggtggggcagcggcggcgggcggaggaaggaggcgggggtggtgggcgccattggtggagcagagcggagcagaggatgtgtggaagtgacgaagcctttaaagcctaggtggatgaggaccgggggtggctaatgggcgactggtactgctatacggagtacagtatatacttaaagtactactagtactactaccactgtactactttaaactactactccctccgtttcataatataaattattctagcatttattacacgttaacatcaatatgaatatgaaaaatactagaatgacttacattgtaaaacggaggaagtagtagtaactggagtactactaactactactactaaggctgtgtttagatccaaagtttggatctaaacttcagtccttttctatcacatcaatctatcatacacacataacttttcagtcacatcatcttcaatttcaaccaaaatctaaactttactctagaataaacacagctaactagaactagtactagtactactagtactggtaactaggaccactacaccactactactgttattatatactactagtactatttaaaaaatatattttatatgtaaatatatacgcatatacaaaagtttatatataacgtataacaaagtttatgatatatatacaaactttatatatgttcattttaaaaaataaaaaaaaatagaggaaaaccatcacgtatataaattttatatatacactatacgcatatatataaactttatatacgtatgtatataaactttgtatactgtatatacaaactttatatatgtgatgttttttttttaaaaaaacaaagaaccgaagaaaacaaccataaaaaccggcgaaaaaaaaagaacgcgggcctcccactgtgcgcggccgccgcgccccctccccctcctacgcgcgccacgcgtccatccgcgcggggtgagggggcacgcgaccagtcgccaattaggaatttcggatgaggacctcgtgtttttcgactgaaaattttacatttaagcccctttttattttttttcataaataggcccctaaagttactatccgtaagaaatacttcctccgtaaaaaaaaacccaacctaagaggagatgtagtgtccagattcgttgtactgggaggggtcaaatcccctcttaggttggtttctttgggatggagagaatcacaaaataactcaatctagattcgttgtcttagaatatgtaacatcctatcctatattgagttattttgggacggagggagtagacgacgagcccaaatcacgtcaaatgtggtataagatcttcacagtctacctctcagccaactcatgtagtagttagctcttaactataaactatatggttcccatgtttctctcacatattttcttggttcctatgcctaagctagttttaagcataccactcgctttccctctctctctcctctctcatccacgttagcattcaaccttctaacggccttttattatacttgctcttacagtgaaaggtactactaaggctgtgttccctcacctctcgcacagaaaacagagcgatggattagtgcgtgattaattaagtattagctaaaaaaattaaaaataggttagtatgattttttaaagaagctttcctatagaaaatattttttaaaaaataccgattagcaatttggaaagtgtgcgcgcggaaaacgaggaggagaggatgggaataggcagtgccaaacacagcctaagaggaatctagtatgtcatatcggatgaggcttctttaaagattccagcaccacaagctaggccatcctcacaacgctgcttcccgccagattccaactctcttcctagctgctttttcatataggttccatcttcccacctgctttttttagctttttttcagaggaagcactcgtgtccatgcaaagcaccgagtatctatgccaaggtccgagggcccacaccttctcttctccacggcatcatacggcttagatggagcggcgaatccactcgacatcaaggcgcactggaacagcctcatgggaagagagatcgacattagtcttattggcgccgagccatttaacctaggggccagcctctaaaaagggctccagaaaaggattcatttctgaaaatagttttttaagatctatttatgaaaatagtctaaaagaaaagctaaattgtaaaaatttcagtgttcctcgagctcctctgctttatggtctttcatgggccagccccaaacacactaatcaaat

SEQ ID NO: 9261 - DNA, 4293 bp, Oryza sativa
acaggccccttaccaaattttggcattaccaaaattttggcatagttgccaaaattttggcatgattttttatatagttaccaaaatttggcagcaaactaaatgtagccacttttttggcaactttaccaaaatttggtaaggttgaaaatggcatcaaagtgaacaggccattgccccagttaactttgttccaaacatcaatttgttcataaacttcgaggaaattagtttttttaatggtaaacgatcaaagtagcatcatttgtgaggaaattagtttttataaatggtaaacgatcaaagtagcatcatttgtatggaaaagatcggtttccacccatcgtctcaaagttcatcaagttggtctgtaccaggattcacaatatatgtaaaccggcaaaaaccaatgtaattcggacgctttttctttgttaaaaaaataattaaattctagtttgaatttttttaacttgaccggaaaaactgagtggttttgtgttatcgagccgtcccaggaaatcaggttttcgttgggtttgtgaaccctggtctgtacgcacatgtgttctcctttcctgatgctaaatattgaatgcttgtaggctttggagatggccatgaggtgttcttccccactaaccgaacaggccaggaagatgcatgattcctcaaattctggcatcctccctttggacgtgctgttcgacgtcctggtgcggctcccagccaaggagctctgctgcctccgtgttatctgccaggcatggcggtccctgacctccgatccccttttcatcaaggcacacgcagctcaccacagacagccgctcctcttggccacatttagagacgacgaggcacatgttcatatcatggatttggtaggcaatgtgcttaagacgataggaatcccggttggccacaaggtgttgtgcacacacctcgatctggtctgtgtagccacaaattggaacagctgccgtgtgcttaatccggccaccggagctgtatacgatttgcctgaaaatccagcagaggagcacatgtaccatgcccacctatgcaaaccttacacctcatttgcatttgggcgtatcaccttattgttcaatttggggaatttttctagggttagccttctcagctcaccccttcctcatttattctattagcataacactttacagataggtccttggtacaatacatatttacaccaacactccccctcaagatgggcaaaagatatcaatcatacccatcttgttacatattgattgaatctcactaggacctaacccctttgttagacaatcagctagttgttcacatgacttaatatactccaaactaagcaccccgctatcaatcttctccttaatgaagaacctatcaatctccacatgtttagtgcgatcatgctgaacagggttgtttgcaatgctgatggctgatttattgtcacaatgaagcatcacaatgtcacttcttagcactcgcaattcagtcaacaagctcctcatccacaacatctcactcaagctcaaagccatagctctgtattctgcttctgcggtagaccgagccaccactgcctgctttttgcttcgccaagaaacaagattaccaccaacaaacacacaataacctgatgtagatcttctatcatccatactactcgcccaatcagcatcacaatatccttccacatttagatgctcattcttcctaaaccacaatccctttccaggagtccctttcagatatctgagaatcttatgaacaacatccaagtgaccagttcgaggatcatgcatatacctactcacaacactaaccgcataggaaatatcaggtcttgtatggcaaagatagatcaagcgtcccaccagtctttggtatgcttccttatcaacgggatcacctgattgagcacacaattggtgattcctatcaataggcgtagtacttgcacgacacccaagcattcctgtatctgtcaatagatccaaaacatacttcctctgagatagaacaatcccctttgatgaacgagcaatttcaattccaaggaagtagcgaagaggaccaagatccttcacctcaaatgcctttcccagcctttcctttagacacctgatttcttctacatcatcaccagtgatcactatatcatcaacatacacagccaagatggtgatgtgtgtccccctatgtttgtaaaagacagtgtgatctccattacactgagaataccccatatcacacactgcatgcctgaacctatcaaaccatgcacgtggagactgcttcaacccatacaaggatttcttgagtttacatacttttccaactgtctggctattcccaaatcctggagggatctccatgtagacctcctcatgtaaatcaccatggagaaatgcatttttcacatcaagctgatgaaggggccacccaaagttcaccgcacaagataccaaagctctcactgtacccatttttgccaccggtgcaaatgtctcatcatagtcaattccatatgtttgactgtagccttttgcgactaaccttgctttatacctatccaccttcccttcaggggtttgcttcactgtaaagacccacttacatcccactgcccttttttctggtggaagttttacaagctcccaagtcttattcttcacaaggtcattcaactcttctttcattgcatctttccactttggatcctgctttgcacacttccaatcctttggtataggcattgtctgtaatgatgcaataaatgttttgtatgctggtgaaacatgagaatatgtgatatagtttgcaatgtcatgcatagaactaagatgctcaaaaccaagacgtataggaggtctaccagcattggatctagtctctctacgttgtgcaagaggtaattctacatgttcaagagttggagaagtattaccaattgtctcaagagaagccaaggaggctggaggagagagactctgggaggattcagggactggacattttgggtgtggtaactcttcaatttgactttgcactaacccttttcttttctccccctgactatcaaaccgcctcctttggtaaaccagcacatccttttgtttcaccctttcggctccctccataggacatggaattgtcccaacaactacttctccttcttctccatcctcttcatgagggaccatttctctatcctcatcttgtgtatcttcaatgacttccactactttactcgcatcatcaatagagcatggtattgatccaatcactactgcctctccattcttgtcaccaacatttttttcatgtatgtcacctctctctctctccccctctcgactatcaacctccatgacagtcgagaattcctcaagaaattggtcaagatctcctttacttttataatagggctcaaactcacgaaatgtcacatccatactcacaaacagtcttctcccaatgggatcccaacatttataccccttctgactcgaagcatagccaacaaacacacactttactgcatgaggatctaacttgccaacagaaggtcggtgatctcgcacaaaacaaacacagccaaacacctttggggaaccttgaactctcgcttacccaataactgttcggcaggagacttcataccaagtattctggaaggcatgcgattgataagatatgctgctgtcatcacagcctcactccatagatactttggtacattcatctggaacatcagagatcttgccacttctagcaaatgccgattctttctctcagctacaccattttgaggaggggtgccaggacaagtagtctggtgaataatcccctcatctgagacatatgacacaaattcattattgatatattctgttccattatcagtccgaataatcttaacttttgcatcaaactgagttgtcactaatttatgaaagtcttggaagcaacgaaggacctcacttttgtgtttaagcatataaatccaagtcatacgagtgtgacaatcaataaaggtgacaaaccacttgaaaccactcacagaagtaactgggcatggtccccaaacatcagaatgtattaatattaagggctcacagttacgaagaccgattccaacatatgtagagcgagtatgtttgccaagctcacaagcatcacacaccaatctatgcttatccactctactaaagaggtctagatacaacttactcaaaatctcaaaagatggatgtcctaactgacagtgaagca

SEQ ID NO: 9262 - DNA, 3272 bp, Oryza sativa
aaaaaaaaactcaaacaagacagcctaaatgcctaactgattgcaaaacaattctactggacaacacagataactaaggatgttaataataatcaacaaagattgatatctcagatcttcgattatgtacaccttgaaaggacctttcatcacttgcaggaagtaattgttcttcacactggtttgtataaaacagtgaaaaaaaacttatgcaaagaatgaatcaagttattaatcagattttgatatctacaaaggcatggtttcagtcttcaaaactttaaacataacaggaagttctgagacagcacacagcaaaaacagagaaaaaaagttgcatatatcaattgcaactataataagcatccataaaacacatattttcagcttttttactgtgaacaatgtttggacttcgagagtaacattagtagtacatatccataaccaagttcttctaatggagtctatcactcatgactaaagtaattagcttgctcacttcaagcaaatagaagaaacgatgacaaaaggtgcatacgcaatattatctaacaaccaccatcaaacaaaatacatatgctttacctcataagttacagcccatttcccatggcgtagcggcctgtgatggatgttgatattccctatgtagaagcttctgccactttgtaccttgttgacttcagttattattgaatcaagtctgacaaaagtatcatcatcgcacttcattacatacctagcagagacaacatgaacctgagcagacaagtcaaccagtcagaaaatacgaaaataacagctacagtttatagatcattaaataagaatcagtttgagcaagaaaattgttggcataccccatattcacatattgcaagagtcttcaaaacaactaaatcatagttgtccaggaacggcacaaaaacgatgtccccaaaaaattctgcttcctttttcaactccacattcacttcctttctgccatgctggaataaagaaagttcatcagctcaggtttacggaagacatgaagcaaggaaatctatcaagttaattctcaagaattaccagtgcaacaaagaaacgagctaccacatttggtgagtttctgacagcagacatccatgtcttcctcacacccatacgctcagcaaaatgattgccagatgacaggatgccaatgaaaatgtcaacaggttcgttaggcagaggagacgactgccaaacagttgacatatccaggtaactctgtggtgaaaagcttgggtgtgttgtgggtaaagaccccgcaaacactgattgcacatcaaggtccccactcaatgctaaacctgtagcatcctcaagaacaaatccctgcaggagccaaagcaaaacaaaaataaacttaaggcaactgttgcccagcactgatgtttgaactaccgtaaatcatagtgttctatcattcattatgcaagtcattcaccacaatttcgatcttggacacaagataaatggaggaacaaatgtacttacaggacggtatggaaaagaagtcacatgtcgcccgtcgacgttcacatggtacccctccaacccagcgctgatagtaagaacaaacaatcggccctccacaaaaggataaggccaatcaaaattcatctccttcttctgtccgatcagccggttcagccaggttgtcgtcgattccttggaccgttcatccgcgttcagaatccagttctcacacttcacgaacccatccactgcacaaaaaattattcactcgatcaacaaatttccacagaattcacctgaactaacataatcaaaatggaattgcaggggtccccaaccggtctcctcatcagagttggacttccagccctcacagcggagcggggtgccccactgcattcggtagcaggtgttctgctcaatcaccggcttgccgctccagtcgccgcggaggcgtgggttgaagtggaggatgcgcggcgggtcctcgccgtcgacggtctttagcccctgaagctccatcatgaactgcgacaccatgatcggctgctccccctccttcagcacggcgatcttagggtcaccctcggcgtgcgccggccgtggcgtcgcgaccacggtgatgtgggaccccagcgtcagcccgcacgggagctccaccacgcggcccctcccatggaactcgtcggcggagcgcatgaccgactgcgggcacttggccgcctccgcctccccctcggcggacggcgactcgaaggcggcggtgtcgaggtcctcgagttccgcgaacacgcgggcgcccgtctcgacggcgccggcaatcgggcggcggagcgggccggcgcgggacgagttgaggaggccgaggtcgagaccagagaccatccccgagaggcgccgccctcgtgcggagggccccgagaccgacgcggacgccgccaggcggggctccttcgccgggcgcgccggggccgcccgcaccccgcccccgccagccgcagatacctcgcgccaccaccacctccccctccacctcccccaccacccgacagagacgtcgacacgagcggcgactcgaggacgaacacgagcaccgcgtacaggacgagcaccgcggcgagcacctcgatcgcgcgccggcggcacgacgcccccgccgccgccgacgccgacgccgacgaaggcctccgcattgcgccgcctcccaccctaggcctaccccgacgcagcgcgcgggcgcgggcgcggcggaagtgggccgtgcactggcttcgcaggaggaggaggaggaggcgagggccaatggcgatatgggggaagaagaggaagaagaggagcgcctcgagtaattaattaacaccctaatccgttaattaacataatctaaatcacattcctttggccaaaaggttgagattactttttgaaaaaaaaaaagaaaaaacacaatttgtttactactgcggtggcgcagagcgcgtgaagggaatgtaattaggaatgtaattagcgggggatttccggactcgtccgtagactcggtgcatgaggattccggagaagatgcggaagtggggcccacgtgtcagtgggtagtcctcgtacacccggtccatggagggcgcggagagagaggcggggggacacgtggatcgagatgggccaggtggtgtcagtctgactgttgtttcagggggtgacgtggatcctctgtggtgggggacggtgtggtccaatttggaggtggtttgaccataggtaaactc

SEQ ID NO: 9263 - DNA, 32916 bp, Oryza sativa
  unsure (1)..(32916): unsure at all n locations
cgaatctaacgaggtatattaatccatgatttgctaccgtgatgctacagtaatcagccgctaattatggattaatatacatcattagattcgtctcgcaaaatagcctaggggttatggaatcggttttgtcggtaatatacgtttaataatcctaaatagtaagattcttgagggctatttaatagcccgaaggatccaaacaaggccattgtgttgcgtgtgcagtgacatgtaatcgggaaaaaaaatttaagactaaaattttgaactagtagtatgaagctacagtgccttcttcctgcagctagctactacctccgttccaaaataagtgcagtcatggatatccatgcccagcgtttaaccatccatcttatttcaaaaaattgtgaaaaatttgaaaatatttagtcacatataaagtatcattcatgttttatcatctaatagcaataaaaatactaatcataaaaaaattttaaataagacgaatggtcaaatgttgaatgtgaatagtgtaaaactgcacttattttgggacagagggagtagatgcaatggcagagatgatctcgcattaactaacttcccccctccatggatcgatctcatctaccccctcttcccctcccatttattgcaaccccatgtcgatcgccatggcagcagcagcagcaacgaaccacttgctcccgccattaatcgcttcctccaactccccatcgtctctcctcctcccctttaaaccccctctcctctcgcctcccgctccaccaccatcgatcgatctccacctcgccggagttgagagagacgacgctgcagggatcgagatcgagatcagagaggttggcaatggcggcgcgcgtggcggttgtcctcctgctactgttcggcctcgccgccgtggcggtgacggcggcgaggatcatgcccgacgacgactgcggcgacacggcgaacgccgccggcgccgccggcgtgggggaagccaagacggcgttcggcgggagcgacggccgcggggggctcttcggcgggtacaccggcccgctcggcggcggcgccgccgggttcggccccttcggcgggttcggcgccggcggcgggccgttcggcgggttcggcggcggagttggcctcggcggcggcggcggaggattccggccgtaagacgatgactcgtaggacgacgtgtgcgcatgcgtatagtagtatagtgcaattaatgtgattccacgtgtataacgttgtgggttaattgtgccacgtcagatatatgtactaatgtacggtgagatgtatctaccgtacgctggagtttgtacggctatcgttgattagagatttctcttgtgttgcttaagtgtttgtgtgtgtgttcattgagttgttttgtgttgtaatttgctaaactttcaagtgcttatctatgattgacagaggtaagattcatgtggctgactatttgggcccaccagtcagccagtggaagggctgatggttgggctcagccaattgaatgttgacacgtaagcagatgcagcctcctaagtcatacctccgtgttcaacttatatgcaaaatttgccacgggacacgcaaaaaatgtgtaattggctggaagacaccacgaaaacgttatacggctgatggacactaaaaaaatgtgaaatttgctgtagaacaccggtcgcattattttattatttccggtcaaaagaggtgagatatttttctaagtgtccagattacccttctctttccttccttttctcctactctttccttcttttccccttcttgttgatttcgctgggaacggcatagcaacctcaaagcagcagtggggcgaggtcggcgcggcgtggtgtggcatcaccagcggccggggcggtcaacggcatgggcgaccatggaggcgcggtgttcgaccagatcgatagcgggcaggcgacgacactgctggtgcagcggggcgcggccgggaggcagcaccaagcgcaggcggggaggctacgattggtcccggcgtcaccactgctacgatggccagtgccctcgctcccttcggtgcgcttgatgagtgccgacgacggcggcgggttcagatcggcgccgacgaagaaggggtgtgatctccctctccggtgcaccatttttcggggtccttgaggggagatggagaggaggatgaagcgaagatgctggtgcaacagcttggcccggcttggtccagataagtgggaacggcgataatgttgctgcgcggtgcacagagcgcgctccagagctccggtgggcacgacagcgttcccgtcgattggctacacgaatcgagaggttgtcaaagcaagatttgattggcatggagagaagataatagaacatgaattagataggaacggagacggctcgttggtgatcggcagtgtcctccttctcagcggctgacaacgaaagataggtggagagggagagctggagctctcttcctaggttcgctctgtgtggaaatgaagtggagtagatggcgatgcagcagggacgagatgaagacttgcctcggcattttgaggcattgacacgtcgtgcacacgcgtcgaactcagccgacgccgatctctctctcggttgtctctggtcgatctctctcacgtcgcgtgctagctcatgtcgcttggcccaacctcccccaaacacgacgagctgaggaggctattctccaggttcggcaagatcgagagggaaaagaagataagggcaaaactatcattttacgttgtttctctctcatcaattgaccgagtattatattttaatgtgtccagtgttctgcagcaaattatcacatttttggagtgtctttgggcaaattcacgtctttagggtgttccagctaattacacattttttttgagtgtcctgtagcaaattttaccaacttatatatacatcatctgtgccataaaaaatcaatatgtgtagattcattatactaaaatgtgttaaattacatatactgtgccataaaaaactaacatgtcaagattcgttatagaatgtgtcacgtccgatcctaagttgttattttgggacgaagggagtacatcacagtaatgtataaaatttactgcaagtaccgtgtatgacatgactttagatgagatgtttgatattttaacatttcataaagcgggtttcgattatttaacatagtaggcatagataaaaggagacaatctaaattgataaatcctgacggatttaattagtatatatttgtataagttcatctcatagtgttatatgtatttttctttaatttttccctctcatacatgctagcttttcctttcactaaaaacaaaaggaaaagagggataacctaatatttcctcagattatttcttccttggaggagactgttaatttctaccgcctcagttaattgctctcaacttggagcttaactctgagcatatgttgaggtattgaagctgtgggccagaaagcctcttcagatccatcaggtaattcccttccccttctgacttgtacagctacaataagcacaagaggtaaaatttttatcatgggtaaaaaaaaattaaaggaacggttaaacacatgtttttttttgcaagtattaagatttggagggagtaataattgtcaaggggagaaacactatcagtctcattgtttggcttattcgaggaacaagccaaatgatatatttaaaaatgaaaaatatttttttaataaagttcttatatacatgttcttaacgatataaatgaaaagactaaaaaataaactacgatgaaaaactttaaaatcacctctaaatttaaagttaaatatttaaactttaactgataaatataaatataagcgaaaagatgaggttacgagagtgtatgaatgatgcgcttgaggagaatacctgaatttcaaagaacacagccgcagacaagctctcgaggacagcatcatcgacgggagctccaccgccatggccagcctcacctctgccactgccaccaccggcggaggaggaagaggagggcgcgtcgtcggtggcggcgaggtagctgcggatgatgcggcggacgccggcggcgccggcgaagcgtgcgcagagcagcttgccgtagcggccgcggtcgtcgtcgtcgtgcgcgtagacgacgccggtctcgcgcagcgccgccgcgatggcgcgcatcgcctcgcgggggcactcgtggaactccacccctcccagcgcccatccgttgttgcgtccgtcgtcttctccggcgacggcgaccggcggctctccggcagcactgctgccagttgcttctgctgctccctgtccagagcaaataggtgtatgatggtgttgaatcagttgatccaatacagtgttagattttttaaaaaaaaggaaaatccactttgtttagtacaaagaaatttcttgatcattattgtgcaaataaaacatttttgtctataaacattactccaggttgattatacttattgttttggataagagtattgtcaaactttaaaaacttttaattataaataacatctaaaatgtttgtcttagaaatgtggtgaccatatatatagattggtcttaaaagtgctccaacaaaatcatatatttatctatacatattttaatagaaaatagtggtcaatgttgttttttttgaagaccgtatactttttaaaacgataggtattatcagtctagatggatggagtactgaattagaaattattcaacattaattctagattggtaaaattgaacatcgtgaatatacttttatgtgctcaaataagaattttatggaaaacttttactgtcatactcaaaagaaaacaatccaccagagtcatatgtttgaactttgaagtgcatgtccaattgcacatatccaagatatttgtccttggacatgggaattttagtattgccatgaatgaagatttattttctgcagaactagttagtttctatacgtaccgtggtgttactttgtccagcttcttgatagacgtcaattgtccaaacataacgtgttggggcatcgaacttcttattgaggatcaggttgtaggcgaccgtcgcctacaaacaaatccatacatgcatattttgaaccacaagtgaattgcaattgcatcgatccatctgtatgtatatgttgccaacatgtcatgagtggcatgtcattaacctttctatgtaccaatactcttatagttgttactttcaaaatgtatgatgacgttgacttttcacaaagtttgaccattcatcttattcatttatttttgttatgatttgttttattatcaaataaaatacaatcataacatataattttatatatgcatactaaatttgtgaataaaacgaatggttaaacgttatgcgaaaagttaatggcgtcatatattttaaaaatgaggtagtacattacatacctcgttttcgactctgttctcaagtgattcaaccaagtacctcctttcaaagccatggccgactaccttgtcgacagtctcagcatcaatctagcacaagatataaacacaattaatcaaaaaaatgcgtaatcaattaaaattaagcacccaaatagcacataattaatcaaaagtaattaattaagcaacacttgccctggtgatctgtgtgcgagcgttgagaggaggcattgcgaggtagcgagggatggagtgctgcagccaacggtgcgtcctgacctcggtgatggtgaggcgcttgtcaggtctcacgatcagcatgctggagatgagatccctcgcgtcgtcaggcacgtacggtgggatactgaactctcctctctgcaacgcaatacgaagagaggaagaagaaaaaaacagatcagctgtttctcaatctcattgggattttcagttttgaccactgataacttcttcttccatttgcttgtctacagttgttcagcagctgaataatatatttttttgtcatatgttttacagttggaattttataccttcttttatttgctggtctagagtaattcagctgaataatatatttttttcagatgttttacaattcacagtttataacttcttattataccgtatttgttggccggtctacagtcattcggtcgaataatttattgtcagctgttttacaattgacattttagtatccatgatgttgaacttctaattcagatttttttttagataagggtatttttttacccggcctctatatccaaccggatatatacggccattgaaatagggaacttagccccgaaaacaacccaatctgaaattcgctccatagaagatttgaactcaggaccttggggtactactcaggtcactgtaactactaggctatatactacaagatttgaactcaggaacttctaattcagataacttcatatacgttgtttatgtttatatcaaagtcattctttttgttaatattaacacggttaattagatattgtaactattgtgattagaattcgaagagtaatttcctaccttgatgatcctgtgcagctctgatacatcggcgctgtcaaagggcaagcgtccacagaagaggatgtaaaggattactccacagctccaaacatccacaggtggaccaacatattttctacccgcgagtagctacaatacaaattacaataagcaacataaacatctcacatatgaatttcaatacattccccaagttactatatgatcgacgacgacatgtaactccttttttttaacacttaaatttcttctaattactaggcgtattgacattgaactatgtattctctccggtccgttccaaaatataagcatttccgtctatgtattttggaatggttaggaatatttcatatgagaaaaagaatatttgtgaatttgtggctgacctcgggagcggcatattctcggcttccgcatgacgcgctgagcaccttgttgtgcctgaagaacttgctgaaaccgaagtcgacgatcttgacgttcatctctgaatccatcaggatgttctccagtttcaggtcacggtggacgaccatgttgtggtggcagtattcggcgcctgatataatctgcctccatcgaattgaccaattaaaaaaaatgcattcgttgttgcatcatcaaattaacaacatttcattaaaatgtttatgtcgtctgactttctttctcctctttctcagagtaaaatttttcaaagtttggaacatggaaatcggcgttcatcaaaccataaaaaaatctcgtagactaacacaaatcattgtcgaaatttcagttcaaaatggggagcaataaatcggtgcaaaaatgcagagttcttcttcttttttgttaactctgaacttgtgaagagctgaagaaagcagggttttcaacctgctggaagatcctgcgagcgtcatcctcgcggaggcggccgagctgggtgacgtaatcgtagagctgcccctgcgtcgcgagctccatcacgatgtacacgtggccgccgccgtcgccgccggcgatcgcctcgtggaaccgcacgatgtgcgggtggttcagcagcctcatcaccgcgatctccctctccactgccgccgccgccgccgatcgaaaattcaggagagaaagaaaatcaagaattcaagatgagagacggatcgctcgagctcgacgatcggagaggaagaagaagaagaagacgaaggcggtggctgcttgcctttgcggatggggatgccgctggcgagaagtccggcgaggttgaggatcttgacggcgacgctgaggccggtgcggcggtggcgagcctcccacacctgcgcgaagctaccgcgcccccgcacccgcaccagctcgtaccgctcgagcagctcccggtgctgctgcgtcgccgccgccgccgccgccgccgccgccgacgccgcgccgccgccgccctgcatcctcgatcgcctcactgagcgtgtgtgtgtgtcaagtagtagtagtaattagtatgtgaaactatgggtagcttaagctactagtactaggattatggatgtattagtaaagctaattaggtagtgattattgcgagattaagaacgagattatatgcaaagtagtactccctccgtctcataaaaaataaatctacaactagatgtaacatattctagtacgatgaatctgtacatatatatctagattcgtaatattaggatgtgtcatacccggtattaggttggttttttatgggacggatggagtacgtagcatcactatgtggcgtctacattatgtgcattggaatcaccggaggaagaatcaattctaagacggtgaaatcaacaaggtaataaggtaattaaaattgaaattaaacttgccagtgaaagcaacacactaagctgggggacaagggggtgcatatagccagacaggcaaataaacatctttcgatgtcatagaaccaaatggttttctcaaatatgtcgacagtattgtgagacaggttttaccttattcgtcgatgtcatttacgccggcctaaatttaactcggtaatttgttgcaagccagccaatcttaatattttttaaagaaaatatatacagcaatttggctgtgcttctttggtttctcatgggtgatgttggctagctagcttgatagccccatgtatgctgctttgctttctcatggctgacgttagctagcttgtccagcttcaagtacttggaactttcaaactttcagttcagtttcagcttagttttttttctcttttttttttgcgggtaccacatgtatatactttgcatctgcatcacaatatattgcactttcatatattcacatagttacacatgtgcaaccatatatggccgggccggggtatcatcgattgttgaaattgacattttagggctccttcggaacaaaggatcaccagaggatttcgatcctatggaaaattcttcctatatggttacctgaatcaaaggaatagctatcaaaaaatcttatgaattttctttggattagctcaaaacataggaattttaaaggaattctaacatgagttccaacctcttaaaaaaaatcttggtgtctatctatcttatataattcctgtattttttcctatgctacatccaaacggccattcttgcagttttcttgtgttttttcaattcatggaatttgaggtgttagagcacttcaatccaatattatttccttccctagtgtattgagaatcatgcgttcatttccacctggaactgttatagtactgcaaggatcatcatatttatgtcaaaaaaatacgaatatattggttttttttaacgaaaggcaaagcttacctattcattgaatatagagggtaaatttagagctaacgaaaaaatatttacagcatcacggttggggtctacggtaacatctctgctaggcgtttggctcccgccatagcccaagattttgcctcttccttaatcttcgagattagggccaccatggttagttccttgtttcggaaaattcgttggtttcgctcctttcaaatttcccaagagattagaaggattaggaatcgagtcccatgcttgggtgcaccttgacgtgttgcaagcgattcccaccagtagtgtaccgtggttgattgcgcccagtttatcggcttgatgggttcacaggcaacccaggtagcaattgcatcctagattttccttgaatatattggtataatttgtatgcactaagcttattttaaatttcgcttattattggcaaaactctacagtgtttaccatttcggaatcacagttagctagctgagtttgagagaggggagatagagaagattagggagatacgcaaaacgaagtaaaccattagtgtataattaattgagtattaactattttaaatttcaaaaatggactaatatgattttttaaagcaatttttctatagaaaattttaaaaaaccgtaccgtttaatagtttgggaagcgtgcgcgtggaaaacgagttagagtctccccaatctctccccaatggcctttgaaagaacgccgccagtattccttgctccttaatactgctccctataactaggataccttcgcagccaaaatagcatctacacactagagagtcacaatccctggggttaagtgcttgaccattttcaaaacgtacagtcagcactcagcatctaaataattggacagctagtaagcagcaccgaccttttgcagctggagcttgcgaagaaatagaatgtgatcctaccactgaatcgtggaaagcagtagcaaaagagcaaatccgagtcacaaggagggttttagatgctagtgttggcatatactggtagaaaggttaaattaaaggttgccatctctctaaacttggacggcagctgcaaggggaagagaatgacatgaagaaaggtaatgcaacgcagagtttacgattcctgatcaatttcgtgaaacggctagagaagtaccctctccgcaaaaaaaaaaaaaacaaaacaaaacaaaaacaaacaaacaaaccaacctaggacaagaacatcaaatctcgttttatgtagagtacgttggtttggttttttatgaaatggaaggagtagtctaacggaaggagtagtctgttttcctatgtttacacttcgaaaaacgtaaaggttacgccctttgcaacgtcagtgtcactaactcaccatagcgtacgcgtgttgccatattagcttaatgtgatcaaaggcatctcttgttctctactggtgtcgtctaatggaaatcctgtaaaccaggggcaaattcacaaaaccagccacgaattctagatgcaaaagaactgcctggccttaaaataagttagacaaatcaagaaagtggtccatcttcagaagcaatttccttgatggacctgcaaccagaactaccatcgatcttcaaggtcatcgagtaataatctctccaaaatcaaaattatttatgaagatcacaggtttgaaaatgcaagttgttccttcttactaagatttagctgtggagtaagagaagatataaagtgggggaacaaacgtagtaacacctactactcatatagcagagcgaaaagagggtagcatacaggctatacatgaatagcgtccaaaaatacacgggactccgacccataaacccagtcactatccgacaccaatcaagcgcgacatcagggacactcgaacacccaagaatcggggcaggactcatgactaacagaacaaaaaaaaacatatggtcttttttttcgccaggaataggcggtattatggggggcaaggtgaatgtggaggactgggaagccaacaccctcacttgcacttgaagccatggcacacggacaggatgatgatgaggatgagcgcgatgatgatgcccaggacgatcagcttgatcttcatgttttgtaaccacatctttcgccgcacctttgtaccctgctgtctgaaatcttgtgcctgcaacccatagttttgatttaagaacgaagaaagctatgtgcatttccaaaatgccaagacagaataaagtgcataatccataagtgccaccattcattggttttctttaacagtatcatccaaagcatctatattgtgtctcacactgtttaatccagttaatttcaacagctgctacttcccatcgctcataggagctaaataagcaaagctcagatagttgcatatcattacaagcatctccaaccactacaagcatctcattgtgcatcaaattattcagcttgaacagtataatagatggtaagaaggaatctatatgcttgttgtagcatagtaataatgtattatacatcaaaagttgctgagttaattaatgagttaaaatagttcataatttccttctgcctagccgggtgcacatcagttataacagcagatggtgtggaggattactacatgtcagtcgcagcacagtaataatgctataccatatcaacagtaagccagatcacctttggaaccataatgcggtacttctacatatgtacaccagcatcgacatggaagctttctagtcagctcaaaacagaaatacataggctaaaacagaccacgagatatcttgttctttagggcaatcttgtatcttggcatatatgttccaaaaattctgaaaaattattctagagatgataacatttcaactaccatagaagtccagtaatattgatgtttcaattaatgaaaccatcccttccctactaacaatgatgcttcaactaacaaagccatcaaaattctagtaacaatgctttggatgcattgagtaaaagagactagatttgtcctacttaaatcttattcagaatgtttttattataatgcactaaattctagaacataccattaccatactccatactctcatgcgatctacactaacatgtatcagtaatttctccatagcaatccattgtataaagattcctgagttctataagatgatttgcagttctaaattctctgtgttacacaacagtaacttcaaagataaagaaactagtacagcacatcatgaaggaaaacgttaatacctgagatctcaggttttcagtcttgtcgacaagcagttcaatcttctcaccacggtcaagaacctgaatttcataattgtaatatagaatcagcaacaacctttgaagagcatcatggtttttaaagaacataatgtgcagaccattggatgatttaagaatgaaccttctcaatgttttccatcataactcctttgacctctgagacttgtgctttgacctttgcaagcttgctgatttcctcagggtggtccacacaatactgcatgtgctccttaagttttgatctttaaatagtagagacaaacaaatatcagtcaaaagaaagaaagcccacaccatgctcgaatatcacataaaagcaaaatgaacatacccgaattctcggttgaggctgtttgctgcagcagtagctgctttcccaccaccatatcttttggtgaaatcttccttgactctgtcaaggaaagcaatggggatttgtcgcccaactgattcaacagcaactacacagtatgctgcacaaagggggggaaatggaaatgataattaatctcaatgcacatcatgagtttgtgttagaaagtgaaaacatcaaagtaccaaaagatcaaaataatgaaaatagttgttttagggtgaccaagcaatttagaatggttccaaaaaatagatgacgcaagtttgcaaaccaatttagactgtttaaattgtgtaacatattcaatttaccataaaagggtgggtgctaccttaacagtttgcctgtgggggaaaaaaaaactttctaaccacccatcttcctgctttttttgttatccttcataaccttccactaattactcaatcatgcacgccacagcctaatacaagataacagttatgaatcttcccttgactacgtaatgttagccccacatccaattcctcttgcactatgaaaccatgtcttgccttaattgtttatttgttcaaaaacaatgcaaacaattggattgggaacttgcatcctacctaaaactaaacagcatttattccataataatatactgcaacctattcaatgaagtaccaaatgaaatttgaagtagccttttgatgtcattttcacattaccataataatggaaatatggtcacccagtttgaacataagaaaaggcaaaatatgctagactgccccgatacaatacttgtgcccgcaagaatgacacaattttaatgcctattctgatcatcacaaagtagaatatgaaagataagtatcacaccattttgatttgataagttagttagatatgtccatgaatcgtccagaaatgcaaaatcgaaaaacgcaccaatcacctaatccctgaatccccagtatgccgatgcggttagagcctaaaaaatatttgatatagtcaaataacacattcaaaacgcaaacacgtctataaatttcctgattctagcatgcaatcacacatggaaacacccgagcctcctctaaatatagccaattcccaacacctagcctccctctctagcattcgtcaactcaaaccgaagcacaagcagcacacgctagatagcactagcacgccccgcaagtcagctcggagtccaagcggatccaaccactcgaggccccaggcctaccgaaacagatcgaacaaaccccgcgagatctacacgcatggagaaccccaaatcgagcacgcaacgttgcggatccgaggcagatcggcgtccgcgcggcctcgccgaggagggagaccgatcgatcattggatcgaggaggaggaggaggaactcactgaatccgtcctcgacgaggtagttgaaggtgtggccgtcgcagttgtaggtgaacttgttgttgctcgcggggagcttctggaggcactgcgccgcgatggtggtgaagttgccggtgaactccgtgtactcggcgagcaccaccgtgcccctcgccacgaacgcgtagatcagcgactgctgccccatcgctggcggtcaacctccccgctttncttcctcgcgctctccgccgccgccgcaacctccctcgctggtgaatccgacggcgccgacgaggatgaggtcgtcggcggtgaggtggttggggggggggggtggaggagaagggaaaaggggatgaggatggtgagcgagcgaaggtgggcgtggaaaaaggggagaaagaaatcgaattcgaggtggggttttgcactttggtccttgggagggggtatatttatgtactgtataactgttgctttgactggtgtccctaatctttgacgacaaatcagggctatttgatttgaagaaaaaaacatataaattttgaaggatttctagttttatagaaacttttttatgaatgtcttttgaaacaaaggattgggtcattttatatcctttgaaattcctatggaatggaaaattctatagagattttggagaaaaattagcaagagcttcaatcttttgaaaatcttcctttgagtataactctctcatacgattcttatattttttttcatgcggtccaatcaaacgtttttcatgtgttctgtaattctttgtttacacttgcatttctatcataatcctaattttccctattttttgtttttttattcctacgaatcaaggggctcttgaagttttagcatattggaacatttcaatgctgcttagggtctgatttttaatctccaacttaatttagattttcaggggcacataaaataagataaaccattagcacataaatcattagtgttaattattacaaaccttaaataatgggtttatttgaattttaaagaaactttatataaaaagcttttgtaaaaaatacgtcatttaaccatttgaaaaatgtgctaacaaaaaataaggatggagttgacaaaaagaacaaggcataaggtaatgctctttttaattatgcaccgaattattgaaatgtattattctgctctctaattaaaaatacatttaagaaaatcttctgttgtattgcttagatagcttgttttgaagtttactttttaaatatttaatttatccatataataataaagataatatatgataataatccgttcgataatctaaatcaaacggaagcttgtgtcatggttgcgaggacgtctctacctctgtcttgataattatatttttttaatggagttatttttgtgcgaactgaataattgtttgactcggtacaaaattataatagtgaaataatgatacaaactacaaactctcaagtaggcattaattttccattcattttaagatactttatactttatatactaagatattgaagattagttataacaaccatgttgcctacatcagtatctaggtgttttaaaacaatactagtagtattattcaagtgataacataattagtagagctttagacgggttgtcccttgtggtttctactttctagttgcaccaactgatgctcaaccttggagggtacctgtttgtgatggagccataattgcagggtgttaggtcccatctggagccaacaaattggattgccggatcatgaagcaagatgatcagaaaaacgagcagatgactcgtcaatttaaatcgcaaaggaattcacacagtgacacagaagggaacacacatcgctggtcggtaccaacttaattaattttttatgggaaaggaaaaagggtataatggaaaaatgagatactggtgttcttttaattctgaacctccgcatactgtgatattgcagatgacaccttgatgatgggattttggggttaatctcgctagctctctctgcgatgattcctacgattcgggaatagaaacgaggcttaaacacgggtgctaaatagtttgataagattggcattggtgccagcaaatttttggtggtgtttgaatctcctaaggatgaagattaagtatttcacgcaaaacgaggtggtaataacaagtgattaattgagttttaattattacaaacttaaaaaatgaattaatctgatattttagaacaactttcatatagaaagttttcgcacgaaacgcaccgtttagcaatttgaaaagcgtgccattttaatccaaaatttaatccactctttccagtggattcgaacggggtacatgtaccgttctcttttttttaaagaattacgcagtacatgtaccgttattgttaaaaattcgtttgaccaagattttaaaattaaaattaaattaaattttgcaaggaaacttcaaattgattgagcttccatgatccatcttgtttgggactacttctagattctctttttgcaatgtaagatactcatctccctccgtttcaccattataagatggtttgatctattcatctatcgtctggatttacttagatcaatataactttggacatatttgtatataaatctagtcaaaaccgaaaacttctcacaacataaaacataggaagtagtaatatgctcaagacaatacctaagaggtcctttgttgcatgaactgttattatttacatactgaatattctataaaaattcatgccttccaaaaaagctaaaaaagataatacagttggcaaacactggttaatagtgatttttttcattgtttataataagacaaattttgctacataacattcaaaacttgtgtaatttgctaatgcacattgaataatgtgtcacgactgaaagacatcctaaaaattggtaatttgctagagaacactttcggctcaattggagaaattcttaagaacgacgagaatgctcttaacatacatgcttcaaacataacgttagagtaaaatttagaaattatgcaaatataaatttaccatcaccccagtacatcactatacatcataatccatcttcactctagcctagctcaaaagctttttgaccggcattcttttttttaataatttctctctacaatgacgagtgtcctccagcaaattatcaattttgtaattgtctttcagccctaacatgtttttatgatgtctcccaacaaattatataaatttttgagtatcttgtagcaaattttgccttatatttaaggttagatccatgtttcatccttaaacctttgataaaatccattttcatccggaactatatatagaactgatttccttttcatccttgcttttcaacaccggttatatcgggtctgtttggcacagctccagctccagctccacccctcctggagctagagctcagccaaacagtttcagctccaccaaaactggaagtggagttgggtggagctctctcacaagatgtactagagttgtgtagctaggtttaggcagctccacaactccactccagactcaactcctggagtaatatttaggagctggagctgtaccaaacagccccatcgtctagagtaaaaatggaatccgtgaaaagtttcgagggtgaaaataaaagactactgctttagaactgcaagcaggagaggaataatagattgggcaaacaaatgctagggctagtgatattagaattagtatagagataatgtattatatagattatcttaaaattatgagtatgtgatatggataaaattagaggtagcaaccgtaaaagtagctcttggaattataccttgattcacgagactaatcaaagactggccggccgaccttagcaaactttagggtagtgtttggttggtgggatggaacgggatgagttgggtcgatcccatttttccagttgtttggatggagggatgggtgggatggaatgattctagatgggaatattctctccagatccgggatgaagtgatccgccaaaatcggccggaccaatcgatcccacttggatggagagaacggcgtcactcgctccagccacctcccgctcggttctgtcgtggcgccgcccgtaccctgccgccgctcgtcccccagcgccgctcctccgcctggacgccggtcgtctacctcgacgtcggtcgcgctcctccgcctggacgccggtcgtctacctcaacgtcggtcgccgccgctactccgcacgctgctcctccgccgagtcgccgccggtgaagctgcgcatgctcgtgcccgctgaatcgcctatcggcgacgctccttcgcccgctcgccgagtcgccgtccgctcgccgagtcgcgccgcccactcgcgaagctctgcgtgctcgcccctgccgagtcgcttgccggcgctgctccttcgccggcccgccgagtcaccggctcctctacctgctcgctgccgtcctgctcgtcgaggcgagctccttcgtcggcctgctcctccgtccgggctcagcagcggcggatccggggatggggagtgctgcggcggcggatccggagatggggagggctgcggcgacggatccggcctctccctctccgccgcggacctcgccgatgccgtcgtcgccgagccacggctgctcgcagtgaaggccgacaccattgcccgccgcagatcggcagctccctcctgtctggcggcgcgacgcatctcggtggtggagagggaggtgagggcagaggcggaggtggccatggttattgcaaacggcgtcgtcagtggttgcaaacggtattcatcccattcctccctcgtcccttcaaccaaacaaaaaactgggatcgtcctattcaacaaaccaaacacacaggtggaatcgtcccaaccccaaaatcaggaatggtttcatcccatcccaccttgtcctagaaccaaacacacgctaggagaacgaacgcgtttcagactcttcgatccagtgttgtttcctcctgtagaatgtacgacggtcacagtaaatacgaatggatcaacaagcaagcgcgtgccggcgtgcgtacatgtgtacaccacttgtgcgagtcgtagtacgatttctaataagtcgcgcaagtgtacatgcgccgtgagaggatgatgagatgagaggaggcgagcgaggcgacgggttgctttcgccgcccgcgtaaatcgtatgacgccgttcactttttatttaacgtttgaccattcgttttattcaaaaaatttatgtaattatcatttattttattatgacttgattcgtcatcaaatgttttttaagcatgacataaatatttatatttacataaaaattttaaataaaatgaatggtcaaacgttggtcgaaaagtcaacggcgtcattaaaatatgtgagggagtgtaattaattaaagctagacatcttgctaaatacggcacctgcctcagaatcagataattaaacacgctcgtgaatcagaacagagacagtatgatacttcctctatttcatattattagtcattttaacctcttttattgaacttattaagtttaattaaatttatagaaaaatagagtgatatttttttacataaacgaaactaatttactattttatatgtgactatttttttctataaatataattaaaatttaaacaatttaattagaaaaacacagagaaaatatcacgtactccctccatacttgtaaaagaagtcgtttaggacaatatttaagttaaacattgggaatataaattataaataactctcaatttaatcattttttaataaatatttttatataaataagaagccaaagctgtgttttggaccgtgtcactgtataaaacgactttcgtaagtacagagggagtatacgtacgctggccaagccatttctcgtctgggtcggtcaatcgaaagagatggagacaaccgggaaatgcatgagcacgctttccgtgctcggccgcttgatagccggcgaccaacaggggtggctgtcccatttgctctctctagatggaacggcatgtcagtttacttttactactccctaggttccataattcgtgatgttttagataataacacggacttaaaaatacatacttaactataattttttaatataatatatatacaataaataaataaatttttatttttgttatagtactttgtaagataaaacaatatgtatgttgttataggttttttaaattaaatatttttaaagttattaatagtcaaagttataaaagtttaacctcaatcttatctaaaatattaagaattatggaaccagagagagtactccttttcatattttaattatttgtgagaaacacgcggggttttttggctagctccataagatagtgggctaaacgatctgggtttgaagcctcacctcttataattatttgatattaggtcatttcctaatattcacgtttttatattttaactagcatggtgacccgtgcagattgcgcggctagcatcattatattttctctcatataatagcatatatgttttctcattatattattcaaatatattaaaatgacaacataattttaaattttgcaataactttacaaaattacaaatgtgtaatattcatattgtattttatatacgtgttagttattaattatttttaatatcaaattttagttatttgtaaattatatatattcctatatagactctatgatcttcttccaatattatttatttttatttctgaatttttattatttataattgtatttttatgtggactctaaactcatatttcaatattctttaatttttaatttcgaatttcagttacttctaaattatattcctatattaactttaaactcttcttcccatttttttttcttaattttaaattttagttatttgtaaattattttttatacggactctaaactctacttttaattttattatgtttattccaaattttagttagatttaaactcttatatggactctatactctacttctaatattccttatttttttaattcccaatttctatttttttttcttaattgtatttctttatggaatctatactctacttctaatattccttatttttaattcccaattatagttatttcctaattgtatttatatatggattctatactctacttctaatattccttatttttaattctgaatttcagttgtttcctaattgtagttctatatggactctatactctactgctaatattccttatttttaattccgaatttcagttatttcctaattgtatttctatatggactctagtctcctcttctaatattccttattttttagttccgaatttcatctatttctaaattatatttccatatggactctagtctcatcttctaatattccttatattttaattccgaatttcagctattcctaaattgtatttctatatggactctactttttcttttttctccgattaatgtgagaatttctaggccatgagagtgaacgtggaggttacttataaattgtattcctatattgactttaaactcttcttcccatttttttcttaatttcaaatattagttatttgtaaattgtatttttatacggactctaatatctagttttaattttattatgtttattccaaattttagttagttttaaactcctatatggactctatactctacttttaatattccttattttttaattcccaatttctattttttttcttaattgtatttctatacggactctatactctacttctaatattccttatttttaatttcaaatttcagttatttcctaagtgtatttctatatggactctagtctcctcttctaatattccttattttttaattctgaatttcatctatttctaaattgtatttccatttggactctagtctcctcttttaatatttattattttttaattccgaatttcagatatttctaaattgtatttctatatggactctgctttttcttttttctccgattaatgtgagaatttctaggccatgagagtgaacgtggaggctcatttttctattcctttaataatataatagattacttgtgatatgctcatgtgttacaacgagatttaagaagtttgatttcatccgaaaaatatttatagccatgttttttttcttgattttgatcaaatatttatagccctgtttttttttctcgatttttctcacaatgttttcttataggtggggatgaaagtgtttttatagagaaggaatgttttttttaatacgtggagggtgggataaaaaagggaaggaaaacgaatctgcttttatactaaacgtctactttaaaaagaactttattatcttaaataatgagtaaagtatgttggcggttcttaaacttgtagggttgtgtcatatatgtccctaaactctcaaaatgcatatccaggtcccagaacttgtcaaagtgtatcatctaggtcccaaattgatacatcccctctaggatcctacgtggcgctgatgtggcaatgccacatggatgtgacgtatccttttcttttttttcttcttcttttctttttcttttccgttttcttctcattcttctttttttttcgaatcttctgcacggatcacagagaaaggagaagaaatgggaaaaaagagaagaaaaaaagaaaaaaaagaaaaaattaaatgggtcccatttgtcagtcaaaataatgccgcgtcatgtccgtgtggcatgccatatcagcgccacgtaggatcctgtaggggttatggcgatttgggacctagatgacacactatgacaagttctaggatttggatatgtattttgagagtttagggacctagatgacacacccttacaagtttaaggaccgccagtacactttactcttaaataattatactaagatgatacggttaatctaagattacttcctacctacgtaattataatgcacacatcgtatcatcattaaaaagcgaaaaaaaaaggagaacgacataataacaaatactttaggcagtaatgagctacaaccacaaacgatcttcatcctcatgctttaccgtagtgacgcttggataactgatgtaacatactcttcatgctttgatgttttatttttgttttgtttgtagtatatgagttagaaattatggtataatgtgatacttatttttgtacatactccctccgcactcacgtaaaggaagtcatttaggacaatgtttaagtcaaaccttggaaatataaatcatgaataactctaaatttgttgagttttaaaatgtaaaaattatatgaatatatttgttttgaataatactttcataaaagtatacatatatcacttttcaataaatatttttatagaaacaagaagtcaaagttgtgttttggagaccgtgtcactgttctaaacgacttcctttacgagtacgaagggattacttccataaagtagtgcacagtttggaatacttctaaacccataatagtggtcaaagtttgtactacaactcatgatatttgtttttggtttttaatatgcagcgagagtgcacggtgaaattgatttttaaggatgtttaattaaagtcttcaggatcaaaagtaggttaccttgaaagcagacatactgtgtgtgagtaatactaagagcaagtttaataatatagcccactactagctccaatttatctatagccaatctaatagctaattcatataatagttgtttactatactattaatatatggtcacacttgtcatacacacactgtgttttggagtccatgctgcagctagctacagatttatagtccgcttctcttctctctcatcttttatctcattaaaatatgtttatagctggctaatagtctgctattgtacctgctctaaagcagtagggtgcaatagtgcagatccaagcgtgcaaagccgctactttcctactatacccggtccctcctttcttttttagggtgtgtttagtgcacgctaaaattggaagtttggttaaaattgaaacgatgtgatggaaaagttgaaagtttgtgtatagaaaaattttgatgtgatgaaaaagttagaagtttaaagaaaaagttttaactaaactcggcctttgtccatgtagacaccaagtccctaattactccatgcaaattaagcgatccctaattactccatgcaaattaagtgactttttcatcatgatagtacattttccgttcaatagccataagcttattaagccgctattatagaattattagctaataacttccctaccaatattgctcctgtttgataactgcagccagtaactggttttattcagctgcaatagagttgtgcggcttttctgcagctgcactgctgcagccagcacaaacgatgaaggcccttctcgttttcttttctccatggcatagtgacatgcattttcctagtgcaatgttttctcgggtaggtgagtaaaatcgaaaatagatggttcctcggtcaccgcgttgttcatggatggttgcgcattgcatttcgaggagactctcaacaactatatttagcttaatcctacagtccagcccttgaaattggaattccttgttataaaaaagcactatcatattaatcaaagcaaatgggttttatacaatactccattcgttttttaatagatgacaccattgacttttaaacacatatttgaccattcatcttattcaaaaaattaagacgaatggtcaaacatgtaataaaaaatcaacagtatcctatgttaaaaggtgaaaagcaatcgatcttacagcatataataaggtggtgataaatagatttcgagcaaagttcatagtaccaaaaaatgactttaccctaaaatttaaaccggcccacaggtccagcccatcaaagtgctgggcccaacccccaataacctccaccaatctctttccaaatccaaaaggccccactatttttaaattattatttttcctcttctctctcatcacagctcttcttctcccccgtgcacttcactgaccgaccacctccgcctcgccgccacatcgccgccgccgccgccgccgcaggcgagctcgcgaaaccctaggcccctcccctctcctcccgcgccgcccaggcggcgaatggacccggccccctcgctcgcggcggagctctggcggccgcatcaccaccgccaccacttcgaggcgtcgtccgtcgtcaccgaccaggggagcggaagccgcggcggaggaggaagcgggcgcaggaggccgcggagcgacgcggggcccgaggacgacgacttgtccaaggtcgtctccacctccgccgcctccggcggcggcggcggcggcgggcaggactcggtaaggccgtgggggaaccgcattgggcgcgatctgtgttggggttggtgggtttcggggttgggggttgcaaagcaaggggggaagctgtggaatcgtggtttttgatggccctgttcgccgtgatctgcttgtccatgtggatgcacatgcgctgctgctactgtagctatggcagtagcagcgtggggagcagtttagcttcagtgcttgagcagcgccaaacctagttaacacagatcaaaatcttccaaatgccaagtccatgccagtgtccaatactgataaatgattttgaaatgctcaatactggtcagtgccttgtagagtgggaatcagatatgcgggcatgtcagttcatttgggttcattggcatcctagccttagtctaggatgttgctaactttctgaagctgtagcatgacagttgaagtatgaatttattttgttggtgcttgagcctttgcatattcaaagctgtcatatattgatggcaccatcactccatcagaccttgggtaattcaagcatattgttagtttagttgagacactgtatttgctggactgttccgttgttccttgggttagtcacacatcaccaaaacgatttcgggagtatatgtgatgttgttctttttgtcatttcaagaacttgtagttgacccgcaaattagtgctgcttaatttataaaaccttgaattctttgtactgtacaaatcctccgtttcttatttatgattgaatttcatttgtattttaaaaatgtaaagtaaatttataggtggttcacttcagtgtggatgatatatctggatacttgtgtttatacttcatcgactatctacatggatattcaaatcaactgaaagtcaccaccctactttccaggatgctccagaagcaaaacgtttgaaaccaatgaaatctagtgataagaatgatagtttaaggacagaagctggaaccgattcaggaaacagcagtaaggctgctgataaaaatgctacaccaccagagccaccaaaacaagactacattcatgtgagggcaagaagaggtcaagcaaccgatagccatagccttgcggagcgggtaagctcttacacaatattttttttccctaattttcggttttcattttaactatacaagttataatattctctcacaagattataacagagtgacaaccaactcatcacagaaaatgtaatgttcagatattgctcaaggtggattgcgggtagtaacatgataatcatatcagcttaatatttgtttattgacaggcacggcgagagaagataagtgaacggatgaaaattcttcaagatcttgtccctggatgcaataaggtgcactttgaataccatcatgttttcaagtttttgttactttaaagctctttgttctctcaaaattctattatgagtaaatggttctcttttataatatttacttttcaattcctcaggtcattgggaaagcatcagtccttgatgaaataataaattacatccagtctttacagcatcaagttgaggtattacattttctcaatcatgcttggcatggagttgtcttctagtttatgtttaagtacctaattgagctgtttctgcagtttttgtccatgaagcttgaagcagttaatagtcacatgattaacggaattgttgcttttccatctaaagatgtaagtttagttttgaacaactatttattgagcttacaagattcttgattattatctcagcttcagctcttaacatttcaaattgacctgacttgtttgctgagcttattattttactcagtgtgtatttgtttcctgaatctccattttacgctctacatttacattattttcaattcattggacatggagcaattaaaatgttatggattaagtctacttttcatccttaaactcttattttgtccaattttcatccctcaactctaaatgaaagtagacaataccatcctttggaaacaaatggcttgagagatcagtattttctactgatgtttcagttacatagatgattgcacaggaatcttgttttgcacatagatataactttcaacatgcaaaacaattcatagacttttaaaacggctttgctaagttactggatcttttctaatggtgatgaataatatctatacttgcaaataatgacaggtcacctcctgtctaggccaaatgacacattgtttatgtagcatttgttcctcctgaaatgaggtcttaaaatgttcatacagggttcaaaaagattaactagtgcctgtggtcttgcagtttggtgctcagccatataacacagctgctggtttgacatttgatccacaaacaacaagggaatttgcccagggttcaacatcagagtggcttcacatgcagattggaaatgcatatgaaagagtgacatgaataaagcaagcaaaaccataaaacataattccttgtagtggcaataaagtgtactgggatcgatcaagcctgtggtcctaggattatttttttttctcaacaatttcttctcattatcatgtcaccaagttatttttttgttcctaatttggtccatgatgccatagatacattcatcttgacctgttgatactcaacggtctatctgctttgcttgtatcccatggtctttgtagctcggatttgaatagggaaagaagaggatgaaaaaaaaaaacagttgtattgcatagcttgagcctacagttgtactaagagctgccatcctggcgtgtcgggggggaacaacttttatttctttgcaaggactggcttgtcgatttttcggaatatgtcctataatatgcttttggttttattgcgggagttgcatatgaatattcgacacctaactacctaagttttctgccaggttcatacgaaagatcaaaatcatgacaggattgcaaagtaaagtcccttttctccatattggtttcctttctttttgactaaaatgaaatgggcatctatacatgtcattttcgttggcgctgcacgcctgcacctgtttttcctgatggaaattcaaaggaagagacagccatgatggatccaatatctgaatttcgtggaccttgcaacgatattgtgcccatgtacagtccaaatcttgatgtggcgaactgcaggttcaggacccctaaactgatgcttttatagctgtgttaccactttgcagctcagaagatcagagttgcagcttgtgattctggggcagttctctgtaccctttgaaccaaccagcgttttatttgggttgacacactgcaaaggcaaaatgttaattaccaactgatataaggaaacatatactgtgcacacacatttctcatacacatcaactaattaaatgtcaccgaaaaatctataaaattttatgcatatactttcgatggtattacacatgcgtgtaaaatcttaacctcaaattctttatattttagccgtaaaataaaaaaagcaatctggctgctttaaggctataactctattagaattttgtatttttttctctttatgtaggatgaatttgaataagatactttacacgtagatgtactattgttgaagtacatatacaattttttctagaatttttagtgatattgtttgttaattggtgtgtatggtgtgtacgcgtgaagatttaagtgcacaggatacattccctacataattttggatgtgtgtatgcaggagactactttttgaggctacgagcttttcctgagacaaagttaggttagaataagcattagaggctaagactagagaaactgacattaagttagttattagtctatcgatcgagagggttagatgcaatactaatttgtttgtgatacggagaatatagaaactactatctttgttctaaaataagtttatttttcattcatgctatacatataataaaaaatagaatatccacactttattaaatttcaattattatttctctatttatctactcttaacatatttatttatcctctacttttacacgctctgatgtaatgataacttagaaataaacttattttatgatagatgagagtagctaaaagtaaacttattatgatatgaagggagtacaaataatgttagcattgggactaaggtggaaaataactcaaaactcatgagctaactcgacgtgcgtacttagcttgcttgactggacttggttgcttaagtgcttaaccagccagctcaagcttactcgcgaattaattgcttcatttgtgttagtatcacctctatcctaaaatataatatattttgattagatgggacacgtcctaataccacaaatctgaatagtactaggatgtgtcatgtttaacaaaaatcccttatattttggaacggatggactaatgtgttgaattacaaaccattgtttatatgctgcaaatgtaccataaggtcatgatttcctatcataagttcataattgtccatggcaactcaattttgtgagtcatgatacataacatgagccatagctcttaatatatgagcctacgggggggtgattggttggttgcctcactttgctacaccacactttaatcatatcatagtttcttatgtatgtgtttgtttcgctactacaattgtgttatgccatacttttttactcttgggatccacatgttatactctcaaatttataaccgaaccatatcacacttatggccaattatttcttagccacactatgtccctatcctacaactcgcctaatcttagttacgataagtttaggcatcaaccaaacagcccctaaatataccacataaaaatttaaaaccatgtaataatgagttcaacggcctatgaggttgtgtatttaaaatgtgaaaggtaccattttttttccttttaacagctgcgtgaggttgtgcatattatcggtttggtccatcaaaggagggatgagggagccatgcctagatagatgggtttatttgcttcttgggttaatttcgacctctttttcatatttttttttgtcatacccatgcgttgcatatactttttttaaaaaaaagtcttgagtttctttttaacttgttacattaacaagtcaagtactcaagtggagaagctcattaacttaattgagtttctacgagtcaaaggctcttttcaaatctactccctccgtccaaaaaaaaactctcgtactgtatgttgacatattctagtactacaaatctatacctgagtatgagtatgtcaacatctagtatgcggtttagttttttagggtagagagagtaagggtgtgtttaaatcaatggttaaaaactccttttctccatggaaaataaggtagctcattaacgcatgattaattaagtattagttaaaaaacttaaaaaatagattactatgatttttttaaagcaatttttctatatttttttaaaaaataaacacattatttagcagcgggaaacatgcacgtagaagatgatggagtagaagttgaaaaagtgtaattccaaacacaactcacataggatttagctactagcctactatcttattatcttatttttgcatgctatgttcccttgactggtattattttgtaatttttttataaaagtttttttaaaaaacaaattgaataaatatattttttatatctgttggtgatatgacatgagacccttcgaccagacctgccgaaaccatgcaaccagtgagggttcaagcccgagacgtcaagatcgttggggcgaagcccccacagcgaagactatgaagcaaagagggcgaagggcggagaatcgcgctagtacttcacaaggataaaggcatcttgggcgaatactataaggcgaagagtatatgacgaaggagggtgacttcgccataacgagttcggcttcgagaaggctcaggaggctatcccagcctctcaagcctggtggccattgggccaacattcgccagacggcccattagaaacccatgtacctcaattaaactgtatacccatgtaaatgtccctttcataaggcaactatgtaaattcacatgtataacctaaaccctagtagtaagaacctgtaatggggctataaatagccccctagggccatgtaatagggggaaccgaagaaaatttctcaatttaatacactttactattttccaaccactgttgagtaaccacgtcttccgatgtatgcggttgtcgtttcgacaacaatatctataataataaatactttattaaccgtacgttaataaatttctatagttaaacgtaatatctttagttgagttaatttgttagctactcattccgtcacataaaaaaccaacatagtactggaagtgacatatttcagtactacgaatctagacataactttttttagattcgttgtatgtaccacatccaattctaagtttatttttttggatggagggagtatcatgtacgtacaatcatacatatgcattaccacattagtatccaaatccctgcctaggaataattaactatttgtcacttttgcaagtggtgataaatgatttgccagttgatctacatatcatagatacatgaggactcacgagccatagactactagtggtaataaatcattaattaccaattctaaaaagtgacaaaaaaaaaaggttaaatgtcccccttgcccaacctgaccgggggagacacgcccggacgcccgcggtggccggtgccgtccgagtccggttcgggcgcttgctttccacgagtctagtctacgacggcgacccgcccgaccccgtggttgcgaattttaccgtattgcccctctccctctccatcccctacgcggaatcccacttttacccctcctcctccactccccct

SEQ ID NO: 9264 - DNA, 2860 bp, Oryza sativa
attcctgcagcccagcagaaggggttgctactgatccggacaaaactaagatcatgcagtagtggcccactcctactaacaccactgagttgagaggttttttgggattaactggctattatcgcaagtttgtgcagcactatggcattatagcaaaacctctcaccttgctcttacataagcatgtgaagtatgaatggtctgctgcagctgaagcagctttccaacagttgaaggctgccatgtgtacaactcctgtactggctctccctgatttttctcggcctttttttgttggaaatagatgcttgtgccactggtattggggctgtgttgtctcaagatggacatcctattgctttttatagcaaggctttgggtattcaaaatcagaagctctctatctatgagaaggaatttttagccattatgatggtaattgataagtggcgctcttatttgatccggggtccattcactattaaaattgatcaccagtccctttgtcatttggatgatcaagtattggggagtgaattacaaaagaaagccatgactaaattgattggtcttcaatataagtttcagtacaagaagggggttgataataagttagctgatgcattgtctcgggtggggcatttctttgctgtgcaatctgtttcagtgactcaacctcagtgggttcaggaggtcattaactcctatgtggtggatcctgcagctcagcaactcttgactgaattagcagttgtcaatcctaatgctaaaggattttccttgtccaatggtctcattaagaaagagggcagaatatgggttggggctaattcggggttgcagaccaaattgattacaacctttcattcttctccagtagggggacattccgggattcaggctacttatcagcgtttgaagaaactttttctttggcctggtatgaaaactgccgtggcggaatttgtgcaacaatgtgccacttgtcaggctgctaaacatgagcattgcaagtaccctggactattgcaaccgttgcctattcttgctggggcttggcaggatatttcgatggatttcatcgaaggtttacctctctctaagggcaagaataccattttggtcgtggtcgatcatttcactaagtatgctcactttctaccactgaaacatccattttcggctcttcaagtggctgaagtcttcctggatcaggtggcaaagttgtatgggatgtccaagtcaattgtctctgatcgtgatcgagtgtttactagtaacttttggaagacactgtttggcagatttcatattcctcttaatttgagcactacctatcaccctcaatctgatggacaaactgagcgtgttaatcaatgtctcgagatgtatctcaggtgtgcagtttctaacactcctagcaagtgggcagtctggcttcctttggcacaattttggtacaacacttgttttcacacatctctacagtgttcacctcataaagccttatatggtgctgatccttcttatggattgttgccgtctttatctgagggagattctgaaggtcaatcggctgatgctgctgaaatactcaaaacacgcaccttctattctagcattcttcagcatcatttagcccgtgctcagaatcatatgaagcaaattgctgattctaaacgcacttttcgcacttttgctgtgggggattctgtttatctgaagctacaaccatacgctcaacattcggtggtgaatcgtccttgccacaaattggctatgaagtattttggtccctttgtgatcttggagcgtattgggtcagttgcttatcgtctggaattaccggaggcaagtcaggtgcacccagtgtttcatgtgtcccagcttaagcaatttgttccttcgtcagtccctgtcttttcggagctaccggacattgtggcgctggatgaggtggagctgcttcctactgcgattttggaccggcaaatggttaagaaagggaatgcagctgtggtgcaagtcaaggttctttggggtactttgcaagatcactttgctacgtgggaggattatgaagttctttgcaccagatttcctttggcgccggcttggggacaagcctgtgctccagcgggcggcaatgtcatatcacaggctatgacaacggacgaggaacaggagaaggaagcgtaatcacgctgaggtgtttttgtgtaaagaaagcgacttaagtaaatgtgtagtgtgagttcagtgtgtggccgtgagggcggaaacgcgaaggagtagtatataatccccgtgaactgtagttggaaaacaagtctgaagaaatgaaatcaaaacctctccccaaactctgtttcctctgcctctcttctcttctctgaaattcgaatccatcttgtgttcatcctcgttgtggcagcgagattctcgccggcgacgaggttgtgacacggcggaggccctcgcggccggcccgacctggtgagcgctctctctctggaacacgaaatttcagctgctcagcctctattagggcatcgatctgatgaggccatcacacctccactttgccgagttgggatttatttcagattctacacttacctagccctttgtgttagagagacagagagtatatagaatgaaaccctagaatatgtagaatcgaaccttttgtgttagagaacatatataattgaaagtttgatatttacaacctgtttcactttgatgcaaaaaaaccttgggcctgttcactttgatgccaaaaaaaaccttaccaaattttggcattgccgaagttttggcaggatttcttatatagttattaaaatttggcagcgaa

SEQ ID NO: 9265 - DNA, 34073 bp, Oryza sativa
ccactcgacatcaaggcgcactgtgaacagcctcatgggaagagagatcgacattagtcttattggcgccgagccatttaacctaggggccagcctctaaaaagggctccagaaaaggattcatttctgaaaatagttttttaagatctatttatgaaaatagtctaaaagaaaagctaaattgtaaaaatttcagtgttcctcgagctcctctgctttatggtctttcatgggccagccccaaacacactaatcaaatggaccgttctcctttgtgggtttccatgggccctacccaaacgaaacctccagatgggccgtactctcggctgcccatgggccgggccccaacggaacgcacggataggttgggcttgggctggattggacatgacgccatttgaaggcccatccagacagcgagagcggcgccgcggccgctacttctacccgccgccgcctctccactccactccactcctcatccactccctctcgccgccgcctgcgacctcgccgccgcgcccgcctcacctcacctcgccggagttcccccacggtacgctccctttcccttctctcgcgccgccgtccggatccgccgtgtcgtaatcaccgcgttctataagaggaggatttctcacgatttggtggttttacgtagatcggggggcatccggggtgggcgatggcgccgcccgggacgagcaggaggagggggcggcgtggtcgtcgggcggcgggccggtgcgcggggctgcccctcgacgcgctgttcgagatcatgctgcggctgccggcgagggacgtctgccgcctccgcgccgtctgccggtcgtggcgcgccgtggcctccgaccgggccttcgtcgacgcgcacgcctcccgccacccgggcccgtacgtcgccgcgtgcttctccgatgaagccgacggcggcgacggcgacgagtcctgcggcggcgtcgacatcgtcgacctgtcctccggcgacatcgtcaagactatttacaccgaagtcagtggatccagagtgcagcgcacgcgcctcgacctcgtctgcctcgttgaagggcctagccccttggatgtcaccgtgctggatccggtcaccggtgctacctacatcccggcaaagagtatctctgcggataataaggatttgctgagttcaggccgtctcataatggaatcctgtgcttttgggaaggtcccctctacaggagagtacaaggtggtccgtctccttggttctggtaatccatgtgagctatacgagtgcgagatcatgaccgtgaacagtgctggcgctttgcaatggagggcgatacaaggacctcagttgcctgtttgttcaagtaacaatatgagaagtgtggtcatcaatggggttgcgtatttcctgttagattattcgaggctctattgctcaaatgatggcttgcttattcgaccaggtaacatagttccatttgaccttgagacggaggaatggatgggtattctaaacggaccgaaaccagtcgccaggggacgggatatgattgttatctcctcaaccttggaaattatggagcccctctcgctagccgacttgaatgggtccttagtgatggtgcatgctgtatacggttcccccatggacctgtggtttctgtcagatcttgagcaaggactctgggttaagaagtacagcatagatttcgaatactataataacaatgcttatcctttgctgctgttagacgatgagaagattgtcttcctactgcggggaactaatgttctacaaagttatgatctaaaggatgacacatacactgatatattggtggtgccagatttcagatccgttggcatttatactggagatctattgagcttggagggtggtctgaactgattatgtaagtattatttgctgatgttttctttatatcgcattgcaatggtagctgcttttcaatggtggtactatattttttaaggcatttggtgcgtggaacaactctccttgatttaagccttttaacaattagagcttctcaatgaatgaaaatatacattagaaagaatcaaagcatactagtttcatggttaaaacggacaaaaaaaattgtaactaaattccatgatttcttcagatttgtttcggcatgcttattgtatgtacaaagtggacactagaaaaggtggtaaaatatagcgcattgcatagatacccacacctttcattatgcttttcttttgtgctacatgggtctgtatttaacagctagtgattctccctgcaaatgtagcaattaatgttaaatgttagactatactaggatcagtacatgaaaattggagtataattgctgctgatcgttgtttctgggtgaggaaggatcatgattgtaaaccagttttatcttgatccatgtctcatcccttccacctccttttgttcctctcatgttagcattacaatgtaacaatgtgtccattggttttaaggtcttaaaatttgaatgtgattgcttcagtgttctaaaaatcagcgttaggtggcaagtcccgctgcgatttgcacttagtcggggggctacctgccgaggcgggattaggtggcatttggcgctgctaggcagggtttggcggggctcagcggaggtggcacatggaggtgggagggctcggctctgctcggaggagctcacgaggcacggagctgctcggagttggagtttgtcacatcctgatttttgtttcaggatttataaattatttaataaattattattagaatttatattaaatgttcattaatttacaagtgaagttaaatgtcggaaataaaatttcctaaatttaaagcatggatggatttaatttttattaaattctccatgattaattacactctctgaaattttctcggatttttcagagctcaattcctaaatgatacaaagaacagttcagtaattatttgatcattaatgatctaattataattgttaagagcttttcttgtttaaaaatccttaaattataaattgttgtctaaaagggaattattagaaatgatcttaaaagcctagaagagaagatctaattttaattaataaattccaatataaaatggggccagataaaatttcattaaatactttacttgattctatagttcttagattttttctgggatttatttgagccaaggaagtatttttaatcaatggaatatcatttcatgaataatttaaattgaaaaaggtttttgaaagtctcttttggctttgggccgaaagccggcccaaagccttctctctccccggcccagtcggcccagcccgccgtcgcttccttctctctctcggtgccgctgataggtgggtcccacctgtcaggcccgtcttcctcctcgcgccgctgccggccgaaaccctagccgccgccgctttccaatccggtcgatcctttccgtttccggtgaagtcgtttgaggggaaataatctcctcgatctcctcttccttttctcttatggaatcgtcggctaatttcggtttggaaatccgtggattcgatctcgaatcggattcgtctctctcctccgaaccctaatctttccttctcgtcgctggtcgccgtgggccttcgtcgccgccttccaacccctataaaaggacccccaagcccgccgctacccgccgccactctcgtcttcgactgccatcgcccgtagagccctagccccgtgagacctcgtgccgccgtcgccgccgcagctccagccatgcgccgccgtcgctccggtcgtcgtcgctgctcgggaaggttgccgtcgtggtcgccgtcgcgtcgccgtcctcgtccgcccctccgccgttgctgtcgaccgccggaacaccatcgccatcgtcaagccaaatgtcgtcgccgcttcttcctcgtcgccgttgccgtccgttgatcttccgccgctgttttggtcaccggtgagttcgccgcgtcgcccgcatcgttttggtgctctcctttcgcgctgtcgcgccgttgttcgccggcgagcttgcgcgcccgagccgctgccggtggtgatgtcaccgctgacgtcatcgtcgtcgtctcccgtggtccggccgtggaccagtcgatcttggccgtccgttgtggataggatcgatctcggccgttcgtttccttagaccgtcccgtgcacccggtttaccgtggatcgcctttgatgacgcaataatcctcttttccttttcaaaaataattcattattgcgtcataattcaattaaaatctatataaatgctttaatccgatttaatctttgaaaattcataactaattctttgtaactcagtttaatgtggttcaagttgcaaaagttatataaaataaagatctacatattaaaattatccataaatagaattaaatttatttaattctttttaaatgggctttaattagatttaatcttgtaaaattcgtaataaattcatttgaagtcagaatgaggccgttcaagtctcataattcatctaaaatcatgatctacatgtttgtttactttatatgtattgtttatttggagtttcttagtgttttccttgttttgcgtgttagcttgtcgtttccgtcgtttcgaaggttcgcgagtgcgccggaagtattcaagaagattaattgaagaccgattattgtaaggcaagtcacacagatcctaaacacaattcctttgagcatgttgatcctatatttaaattctctatttatttcaactgtgcatttattttcgaatgtcaccgggtggtgtgaacttattcctttgttatggccaatttgcattgattactctattccttgataccttgggttattataacttgactagttgagctttatatattggttcagctagatattagatatgattgcttagccatgcttagaaacattagcacactattgggataacttatgactcactattatttaatgatggcttaataatagttcacgatggccaatcgtgattggttaattaattatttgccaactaaaacttgataatggtgggttgtgagcacatggttttgagagtcgtgctcatgacaattaaggaccggttcgcgagctactgttgtgaaacattaaccgtgccaaccacaagccagcgtgggcaacggctttaccttttgtatagcatggttcattgcggagcaccagactgagaagtggcggagataagcccacgagggtcgctggggagtccatgccttgttttataagggggtgattatgatccaggaatggtgcactgtggtgagttgtgttgtgcagagggtattgtcacagcctctattcgggtactttccagtatcgcgacgcatggtagacatgatgttgaggctgtgtcttgtgggtacagtggtacacctctggccagagtaaaactattcgaatagccgtgcccgcggttatgggcgggttgagcaatgtttttcgtgattagtctcacacctctcacaataattatggatgttatacctggtaataatttgcttagctcctggtttggagttagatctgtacagccgggtatggttgttcaggatggttgggcctgtgcagcatgggtgtgttgttcagtgttgattaaaatttctgattaattactccactgttttacttctcctaaatgttttgctaaatgctgcttttgcaaatgagcatatattatgccatcctttggtatccttgtgcacttgcatatttgctgtgtggcttgttgagtatgtcatatgctcattcttgcaataatcaatcaacctcagttgaagaaaaaggatccagaaggagaagacgtttggcttataccccagttgagctgcctgtgggagtggagctgaagccatcgctagaccgttaattccgctgctgtttttcttttttttcgtaagtatgtaacgttattattatgatggatttgtatattaaattgtcagtttgggtacctcggctgattcctggacgaggattttatgcataaataagttcggaaattactagtgaatttccgggcgtgacagagttgctgctcgctggctcgatgctgctgtgctgtgtttctttcgggcgacagtgtgtgcattatgcagccaggaggaggggtagacgatggggtagttgggttacataacttgcatccaacggctgtgatttttcagggcccacttggcccatgagtgtactaggatttcctatattcattccattcccacagctgccgccttcatcgttctctctctgtccacatcaaccatgggatacattggcgctgcggctgacatggacgagagcaactgtacgagcaccgtaagcagcttcttctccttcagattggtctctttccctccttgcgttcttcccatctccttttcctccatctccctcctccctccctccatttccctccatttcaatggccaacgcggtgccgcgacaagcaagcgctcctcctaccttgcttctccgtagctttgcttcagtgcttgtcttgcactgcttatactttcacctgatcgaaactcttgcctccgctctaatacatggttttgcccctcttgtggtggaatacctaggcgtcgcctcggcgtgtctagtcgctagtcggtagtcgctgggtagctgcttgactagcgccttcttgaacactgtgagccatgcctttcttattgctccattgtatgcattgaaattcttattatatattgacacaattaggtgcccaaactggcaggtatcgatgcactgactatgcattgtgctggcagtagggctaagctagggggatcatattgctggactggtgacaagttaaatgtttgttaaggtacaagtcattttattgagttcgcagtattgggtgctacactccggagtctgcgggtcggacattctaggtccctgtccgtagtgccctttggtcgcttggcatgcctattttgaagtgacactgtgttgtcatgcactgtcggttcttctttctttaaacgaaagccatgcaactctcctgccagggaaaaaatggtattgggtgctacagaacacgtttcttgatcttttgtgcaatttaacttctgctgacttagtgaacacgtttcaagtaattcatcatcctgtggtttgacatgataattttgcattattggtaataaaagataatatttgtccccaaaaggccttactgtgggcaactctagaaccttttccatagtatcatagccatgaccatgagtttttatgtactccatggtccaccatgcttatatttatctttggtttttactgtctgtttcctttaccatatgtgacgtttgctgttttggttcttgcaggtagaccattgcgcctcttgtattctccaaagacaaagatgttgctgctttcgcttgctgaggctacttgagctacttcgtctcttaatttgctccccagatggagcaaatgatgctatctcattcagttacaataatgaaatactcctatatcagatacctgtttgtattccgacggtacaagctgatgttatcagcctggtttaccgtctttttaaaatgtcgacaaacctgtggtggtgtgatctgtatgcatggtacttgtcctttaagactatgggaaaaccgtgtatcactgtcagtttagcttgggcacatgattaccaatgggaattttctgaacaatttcatcctcgtttgtcttttttttcctgttgagctgagcttgatctgaagctactcgtctgtttctaattctttttaggatgcagtttgaattacagaacctgcaggatctggtattccaagaaaaactgaattatcgattgctgccggaaggaatttctgattttgaatgaacatttggcagaaacatctgaatttcaactgattctgactgaaaatttggtagcaaattagaatcacggcggttactacttattagcgggcccgtaattgtgggcttgtggccaagctgggtaatttgaagccgggtaaaacgccgttttccttggtgcttaattagtttagccttgctttgctgaattttgtgttctgtcactcgaagcaactcatatttgtgcatgcagtttgttcgtacttgaactacatattatggtttgcacaatacacttttgacatacaaaggattcaagaatccagtaagcaaataactcaagtaggactagtattcaaatattcaattcaatcaagaatcaagtacgcttcagttcaaccaattaacaattaattaattttacatacactcgttttaaatttacatttagttaaaccaatcaatagtgatctcaactaaaacacttgtttctgcatacatctggcattcagaaagaagttgacacagttacttgacgtgtacagtccatgaacaagaaacactcaagagaagttcagtcttagggagtctgaacttgatccgcacatgcagagaacacttttggcataagcaaataattattgcaacctaagcatatttaatccaaacaatcaatgactaatgatctcagctcaattagctcagtccatgacacatactctcaagtctgaactccatcccatctcagggaaagcatgtctgaacacaatccagctcataacacgaatgtttcaccattcttgaactataactttcagaagttgatacttttgatgcgctgcaatacttggtgatcacaagtccagacatttcaaaccgaatatgtacatttcatactcgatttattcagagaatgcagtcaactcttgtcagcgcgtttgcagctaccgattgttctgatgatcacagatcaaccaatggccatgtattgtaccttggaccccaacttaatttcctggtgctcatgtagagttgttttggtgcagcccctgatcaaggagcttagtgtttaccagcttgcagaaatgtgtactctgacactgaaaatgccatttgagaagctttggtgcaatcagaaccttgttgatctcggttaaaattgaagggagctgttaaacaaaaatgtgcatacaaaacaaaaaacagtagcatagccagctagctgttgctgtaattctgttccaaaattacccgcatcagcttcaacatcacaactagccaatgcaagtctgaacttttctgaaaaataaatgaccaactcaagtttgaacttctctgaaaaataaacaacaacctcaactctgaacttctctgaaattcagacttgagaatctgaactgaatcaaactcatgcagagtacttttgcacaaacaaaagaatcaagtaaatattttattcccatgaataaatattacaaaaatttctacttcagcacatttggttcaaccaatcaataactaatgatctcagcctattaccaatacctgaacttctgaaagattttatccatgctgagtaaaactgacgaatcgaaacatgctagagttgcttgtattcaattcaaacaggacaatgttgtgccaccagaacaatgtgacaattaattgacatgtacagaccatgaaacagaaactgtcaacccaagtctgaacttttctgaaattcacagacttgagagtctgaaatgaatccaactcgtgcagagtacagtcttggcataaataaatgaatcaggcaaatattttattaccatgaataaagattacaattagtgttacttaagcatattttatccaacctatcaacaactaataatctcagctttgctaataaatacaagccatcagaggactaagctcctatacatctctgcttctatatctacagaagaatctctttccttcaacaaatgacaatgtcactgctaatccatctctagctccatagatcgaacagctcatcatcaatggtgaagtcgatgcagctcaggtcgtccattgtctcggcgaagtcgatgcagctcaggctatccatgctgtctggaactccaaaaccaatagcctccacgtccatgacgcccgatgaggagtgctccttctgcttgtccggcgacgacatcatggaccctgcaccattgctggcgtcaacttcggcttcattgccgccttttgcgggagagtcgaccggattgcgcgcggcgtactcaagtggaaccttcagctcagcctcatagtacccggagcagctctgatcagagtcattggggaggtccaccactgctgaaggaggaggaacggagccggagcagccatgatcggcgatgtcagagacagagtcatcgtgatggttcaccattgctgcaggaggaagaacgagctcctcgatcagagcagtctctgacacggcgctagtgcagctctggccatccatggcggcaaagtcaaagcagccaaccatgtcatccaggctctctggaagctcgaagaacattggcgcctcatcattttggttgtgctgcgatgacacccaagacgatgccggtgctgcacggccaccgccgccaccggcttctgctggaaagttcaacgggtacatcatggaagaatcatccatgctctctgaacctccaaattcagcaaactgcgccggcgctacgccaccaccgctgtcagcttcagcatcagcttcacagcttccttgtggcagagagacgaacaggttgctcgcggcgaactcaggcacaaaactctgcagctcatcctcatcgattgacccggtaacatcagaaaacaacagggtagagttgtcccccacgccagagcagctctgatcggcgccgtcagtctcattgggaaggtccaccactgctgcaggaagaggaaaggcgccggagcaaccttgatcggcgttgttagaggcatagccatcgtcatggttcaccattgcagcaggaggaagaaagggctcctctggtatggcgctagtgcagctctggttgtccatggcggcgaagtcaaagcagccaacaatgtcatccatgctctctggaaactcaaagaacactggcgcctcgtcgttttgattgtccagcgatggcgccgatggcaagacgatcagctcgggaagattagcaaacaccacgccggagcagctctgatcatccatgttctctggacctccaacatcagctaacgacgacacagattgcgccggttcagcttcatggcttccttctggcaaagagacgaacaggttgcgagcggggaactcaggcacaaagctctgcaactcatcctcatagattgacccgggttgatcagagaacaccagggaagagtatcgatcggtgacgtcagagtcattggtatggtgcaccaccggtgcaggaggaggaacggcaccggagaagccctgatcggtgtcgtcagagacacagttcaccatcgctgcaggaggatgaaccggctgtggcggcggcgcgctgtcctcgagcatagcagtctccgccactgcgatctggtggttgtcgctctgagattccggttccctcttgcgcttcttgccgtggccgctgaaccggatgcgatacagccgcgtcgtcgacgacgcgaggtcagccggcgccgtgatggcgtactcgtgcatcacccaccccgagctccccttctcgccatccgcgaagtagctgagcacgtacttgcgccacgcgatctccacgccgccgccgccgccaccatcggggacgaccagcctctcaccatcgacgcacatcctctgcccctgccagtaccctccgccctcgaccgtgcgcttctgccggctccccttgccgttcttggcccgcgcctcggcgaagaagaacgcgtcgtcgcccctgccatgatccgcaagaagcctccatggcggcgcgcagaggggatcggcgtcgaggatgacgccatggagagggaggggcttaccctggatgcgcgcgaggaggaagcgggcgacgagctcgtcgtccttgggctcgaacctgagccccggcgggagcccatctccagccgccgccgccatggatcgatccgcaggagaggagaggaatttctagggtttgggaggagggtttggttgggaagagaggagaggcgattcgaatcgaggaggggatggggatgtgagcaacggataggaggctatttaaaggcggcggcttcgcgggatcagctcgcgctcgcgcgcggaaagatcaggtgtggtttcccatttttgggaaagtttgatgaaatatcttgtctttgcgattcgatatgaaagttatttagaaaaaaaatagcttcaaaattcgaggtgagattggtttgaattttgcagttctgctcaagctatacatgcgtattactgaaggtgacactgaacaaatgatctttgcagcctactagctattgcagtattgccaattgctgaaggcctgaagctgacactgaagaatggagccataagaaagattcagggtgaatatcacaaaatttttttttttgacgtattgagcaaatccagctgttgacgaagttcgaagtctgttgatttgtcttttgtcttgaggaacactgatgaggttaccgcccgttgacacagttctatgttcttaactcctctgaagttcagactttagagcctgcactcaatccaaatgatgcagagtaaacttttggcacaaacaaaagaatcaagtatttttactgccttcattggagataatcagacaagagcctaaaataattaatgcaacataagcacattcaattcaaccaaatcaaccattaataattcattaatggttggctgtcaaacggattttgtgatatctgaaattctgaatgtggatgctacagttttgcactgagcttaaaattcggacgccgactgagcaagttgttgtgatgatggcagatcaactaatggttgatttcctggtgcttgtggggggtgatttgaactctgaagagattgttttggtgcagtacctgccttaagaaactactaggtgcttatcaggttcagagttcagacccctcatctcctccttgggcaagttcttcagaaatttttacaaagccatttgagggacggccgtttgagaagcttgggtgcaatctgaaattttggactttgttaatgctactccctccgtttcacaatgtaaaactttctagattcattaacatctatatgaatgtgggcaatgctagaaagtcttacattgtgaaacaaaggaaatagttaacaacttaagattgaggggagatagccctcctctgctagcaagaagaacggattcaggagctgaagattcagaattagcatatgtacagtccaaaattgattggccactcttcaattttttttaattaaacttccctaaaaaaaatgaactaaacaaaattttgttcaaatttcaacttttttctaaccgaaatttcagcaatgtccccccccccaacccccggcaaaaaaaaaatatttctgatttccaccatatagaaccctatagtctttcccttaaaaaaacctacagtccaagaaaccgatttttttttaggcaaaggtttgaagccaatgatctttcataaataaaagaaaaagaaaaagtctgaactcaatgagataacgtgttggcgtgaaatatacaaaactcatatacatctcttcactctctgctctacagaaggcactcaaatcaattcctacacgcgacaatgtgccaatgtcagtcttgatctcactccaaatcggatccaaattacatcgtgttcggacttcggattcgaactaattaagcgtcccagcatataaatcggatccaaaataaattgtgttcgggctcaaattcggattcgaaccaagcgttcgcgccatattaagcgcgcgcgccaccgtcgccctcgataactcgtacaacgtgatcagtgcgcctccggaactagattcacaagccgtctcgaccagctcgccgtggcgtcatcaatggcggcgccgccgagaaaccgcacgacggaggagaaggcccatgttgacaacgacgcgttgcagaggttttgcggcgcgtggcgggatatgcagtgctctcgccgcggcggcggcggcggggacgcgttcgtcgtcggcgcggtgtaccacatcgccgaggacctcaccgacatcaccctcatggacgcgtactccggcgaggtcgtcaggcggatggacgggctgagcaggccaggcctcagggtctgcgccggcggcgacatgatctgcgtcgtgagccccggcgacgggctgctccgcgtagtcgacgtggccaccggcgacctgaccgacctctcgatgggctgctcggcggcgacggggaggaacgtctcctccgggtacacgctggggaaggttcccgccaccggcgagcacaagctgctccacgtttacgccgccgccaacgggtcccagtcaagcgaggtcctcaccatcaccaccggcggcggcggcggcggctgccagtggagggcgacgcggagccacccgccgatgaggatcgagcacgggatcagccggagcagcgcgaccgtcggcggcgtggtccacttcctctccccggccaccacctccgccccgcgcgaccgcggcgtcgagtgcgacaccatcgcggcgttcgacctcgcgacggagcagtggaggccggcactgatggacggcccgctccccgcagaccagcgccaccgcgggcagcgccccaacctcggcctcgccgcgctcgacggccgcctcgtcgccgtccaccacgactaccccggcaggaccatcaacctctggtccctaacgccgaacgacacgacatggacaaagctccactcgctcccgatcaggaacgtcctccgcgggtgggaagaagaaccgacgagccacccggcggcggcagcggaggcgaagcgcggcgggcgaagcaagaagaggaagaagaagaaggaggaggaggtgaggtggttgtgcagggagaaggtggcgcagccgctggcgatggtgggagacgggaggatggcggtgtgggcgagggggtgcgagggggcggtgcggctgcacgacccgaggacgggggcgtgcgaggaggtggcgcaggtggagaagtgcggctgcgtcctgggcttttactccggggctctctcgccgtctcacgctgttgagatggaggagtaacgtgcgtgtgcagggggaagagttttaggtagcacttcggtgtgtaggtgtagctagacgaaaccttacgtgctactgcgaaagaattgtatggtaaaatagtaaatatgtgtctcctgcgccgctgatatgtaactggcagatgtgcgtagggagagatattctttttctctttaagaaaaaggaaaaagtttatttagtataagttttaattactctattgttaattaatttggtgtacttacctttattttgtaattagaaaatatgtccgtgcgttgtaataggtgaaggctatcttaatcgtattattgttatatagtttttgtctaaaaagtatgtccggcgctctctcgctgctgagaatgagatggaggagtacgtgcgtgtgtgcagggaagagttctaggtagcacttcggtgtgtagctagacagaatcgtatgatgaaataagacaatcaaacagaggggaaaaaacagagtttcagttggaaactaattgactactcgtacactctgccatgctctgcttacctggaggtgaatggttcagtttgaatttttttttttgagattttccactaaaatggagctgggaccttacttgaatgtataccactcagaaaaggattataagttagcataatctacgtacaatgtacagtctatgtcatatgtatttttgaggggaagaaaaaaatacatatgttaaagatgggttctacaagacagcagtttgaggcaatccttaccttctatttatattgttggagataatagtattagtacaggtctagttaacaagataacaatcttatcgattactagttttaactgatgcaattgtatgtaaactatacacgagatcataagatcactttgtttaacacatttcttcagtctcagttgctggatgctgaaaccataaaaacttcagactgaaaagggctttgtgaaaaaaatctggatcctgaccctgagtgaaaaaatgaattgaatatcctaaacgtaactgaagtctaatgaattaatttatggaagatttgtgatattccactcagaaagaattaccactaaaaaagatattagcagttaataaggttcccttagttgtaagtcaaacaaaggttcccttttgttatgagcattgtcaaacatcaatagtgatccgaaactgatactcgtctcttcttttcattcaatctggcgtcaacctaggatgagatatgacccatcttatgccaacgaatctggacataggtcacatctactcctaagctgagttattttgggacggagggattattgttcaagatgacactgcaaactgctcttatgcagcctgctgctgtatcgccacttgctgttgatgcagctcaatgtccctttgtcttttgtttggaggaaactgatgatgttattgatcatttacacagctatatgtgattaactactggataaattagcttgctaaaaccgggccatgaaaaagaaccaccaactcaagtatgaactcctctgaagttcacaacttcagatttcagagtctacgctcaatccagctcatgcggagtgaacttttgggaataaataaaagaatcaatcaacaattaatttagtttatcagattaatgaaacataagcaccgtgaattcaaccaatcaacaattagtgatatcagctttggatacacttcattatttgaagttcagaattcagctaaggattgtggtttcagtctttcagaagctgaaatgttaaaaataccagagcattgttggtgcgctgcaatacttgaggatcacaagatgttatttcacaatccgttaacaaggtgcaccggttggctgtgaaacggattatgtgatatctgaaggctagagctttgcactgagcttacaattcagaaaattcagtcagctcttgtcaggcgtccttggacattggctgggcagattattctgatgatggcagatcaactaatggttgatttcgtggtgctcgtgaaaactctgaacttgaggggtgatccgagctctagagagatggtttgggtgcagatctgaacaatggtgatatgataccggttaagattgaggctttttttttttggttctcctcaaaaaaaaaaaaagattgaggtttttttttcctccgtgcagtgtactctgacattctctgtaaaacagaaatagtagattgagagcatgagagagggcttccaacttacatgacacatgtactctcaagtctaaactcaatcccatcttggggaaataaggtctgaactcataacgcacatgctgttttgctaaacaaaagctcaatccaactcataagtcattcaagaataattttggcataaacaaacaaatcaagactctagtatttaactgtcttgactcttcagtatatataagatcctagaacaatttatgatacttaagcacattcgattcaaccaatcaacaattaatgttctcagttgcatacacctagtcaatcaacgtattttcagggcatcaataagctacctggaggtgaagtgatatctatgatgagtgacatgggacaaagtatgtcgggaataccgacttacaagttaagcattgagaaaagaacaccaaaacagtccagaacttacatactagtaccgaagatatgacaatctagtactacctccgcttcaagttataaaactttctagcattgcccacattcatatagatgttaatgaatctaggcacatatatatgtctagattcattagcatatactccctccatttcataatgtaagactttctagcattgtccacattcatatagatgttaataaatctagatatgtacaggcaatgctagaaagtcttacattatgaaacggagggagtatatgaatgtgggtaatgctaaaaagtcttataatatgaaacggagaaagtatttgcgataagaggttgatagcctgttagaaccacactataacaattcaacccaacaaagcaaagtatcacaataagatgctaactgccactttatagcactcagaaaatatctatccagtcatcttcatcatcatcactatcaggacagcagtcccggtagatggcaccatcctgcacgccatgtacccaatctacctctaaatcgctatttgtgatgagcttatcattggtgtaagaaccgtttgatccatagaataacttctcgaactcatcacgcccatggaaactctccatggttggatgcagaattctgttcccttgatactcacaataaatacaacgaacttgtcctgccattcataacaaaaacacatttcgacacaaattagtgggatcagaaatcatggcagcatgcatacccttgaaataggcgcacattgttccatatgactatgagagcatacttcattaggatgaatcgtaacaaatttggagctgtcaaaggatcaattgaatctaaggctaagcaactactctctccgtcccaaaaaaactcaacttaggaggagattatccagatttgttgtcctatgaggggtcacatcccctcctaggttgagtttttttgggacggagggagtaagtgctacgtgactataacagcaaaagggggggggggggggggttcaagcaccataaactaaacttgcatcataacaaaaggggcaataacatgcaataagtctatgttctatcttattccatcccaatttataccaacagatttctatctaaactattatgtgataatttcttttgattcccagtagagccaacatcacccaagccatcataattgctcatcaagcaccagtccaattaccactttcattagggagtcacctaaaagaacaatttttcagtctgctataaagactataaattctttcaaggtcatcatggttgctatttagaacagtgatttaatgttgtcttgaagcgtaatagaaaaagatagaccatatggtgagcagtccacgaaatattttcaaatcaagatattccatgatcttagtgtaatgtataactgatctccaacaaacaatattaccatgcaacagtaaatgatgtattactgaaaattctttgtaagacacaataatcaggtgggacaatggctactgcatgatgccccatgatggcattgcattgggctacggatcaaaatgtgaaaagtacccaccatgtagcaactaaactctatagttaagcataagaaagcactgacgatagcatacatgcagtattattttgatgatatttggatgaattataggcaaccaaacattgcagattgtgaagttgataaaaaaaagaaagagctcaatctactagatagaaaaatatcaagatggaaattgcaaggtcaaggctatagcataccagcttctggtttctgtggaatcacagggacacaccaacatgtatcagcaccatctttgccacattcagcaaagaagagtgttggaggatcatataagcgggctttgcaaactgctagaaagttgatatgggtgtgataatatttgtcacgagtccatggattgtagtctccaactttctcacccaagctgcgcaccgggccagataccagctcattgacaccacagatgaaatgaagttcaaacgggtgatcctccttcaaccacgagtatgaagagtgttagattggaaacacggcatagcacaaatacacagaatacacaaagtgaaaactatggaatgagtaaaggagtgtagggggagaaaccaaccatggtattgttgaatttgtccaatgcatctctcaccatgctggtgactcgggcatgctgaccccagaacctattcctgcattgacatatgtgattatagtctctcttttttacctttctacatgctacatcctgttgttggtgcagcttgccagtagaggagggacaccgttgtaatatcgtgcgaagcaaactaagcttctgtggggagagtgggccatccgaggcagactgtgatcctgggacgcaaacctggatatgcagaacctctgagacaagctcaagtttactcagtaaaccagttggcgacgcaaggaactcttgctgcgcaagagggtagccatgaaacccggcggtggccgcggcaatatatgattcatcaacaccggcagaaggggtgctttcttcaaccacagagtgctgaatatgagaagtgtcaggattgtcaagaacttgagcacaatctgaaaagtccagacgcttttttctactagtagcactaggcgtaggagaaaggttgggatcagcagctttcaagttaaccccggtcaccagcaggcgctgcatggctaggtcaggtgtgaggcctcggtatcgagtgcacaggaaggacacgaggccgtagagcgatcgagctacaatgcacgacagcatcgtggtgctaatcatggcccactggaaactgtttgcttgccgggaagttgtgctcgtaccagatggtgttgacaatgatgttggagacagggtccagtggaccgtagcagtggccacccatgagcatgctgcggtgaaacgaatcgcacagctccgaggttggcagcctgcccatcgcctgcaggtagaatccatggattgttgcaagcagcactcgcttcatgtgtgcccgggcaggaggcagccatttgggccctgcataaattcccatcaatctttctcgcttaagccgcctcttggcgagttcccacgatccttccagccgaaggacaggatcagctgccgcattatccttgtgtaggcgacgtagtacgcgacgcgctacgtcgccgtgcatcgtcgtctcgcgtggtgacgatggcgcagagccgaagagcgcctccacgacaggcgagagcagcttccaccctagcacgaggctccgcggatcggggtgcttggcggcgaccgcggcgcatctgagggcgacctcaaccgctgcctcggtgggctgggagctgaggtcgaactcccggattccgcgccttctgatgatgagaagcgaggccacaattgggtcagcgtccgcggcgtcgaggtatagccgtgcctcggcatccgggaggtaggggaagaggcaggtgaggaaggcggtgagaccgtcaagcgaacgctggctcagatcagcagcattgtctcctcttcgtcgtcgttttcttgatcctcctcctgcttccacccgcggagcagcattgttgttcaggtccttagctttctctcctcctcctcctactaccgcctgagctgcagtagcaggagacaattcagagatggcgctgttgatgaggatgttggttacgggatccaaaaggccaaagcaaaatccgttcttcttctccaatgaacccttgtcaagctgcaggtggctgtagatcttgtcgatcgtggcaacaactgctgcaatctcatctttcagtctgtatatgtggaattggtcctcaacttctctcggactaaaagtgcgcatgagattgctgctgctgctgctgccaggggcggatccaactggggacacgggagttcttcagttgaacccccaaactttttggggaacaaaaaacaaactgtgaaattgagattaaggttaaggctctgaaattgagaggagcttcttcccaatctacaggagaagctagggttcacgaacgcaagcaaaattccaggcaaatttagtaccggtgggagagagggaagaatccgaaagaggatgtggatgctcgccagatggagattaattcagccgcgactcgtcttgccgcgcaaggagcggaggagacggagacgggagatcttctcttacgccaagggaagatgaaaacggtttggaaattttttcggaaactttccgaaacggaaacaaaaactaatgtgataatactaatatctgtcggaaacgaatccagatttttctttctccgaatcagaaacaaagtatttctcatatacaactgattttcaaacttttctacttcaattatttagatttatactatgtgctagtacttgtaactacaagatacaagatagtacttataattgtagtgacagatgaatatagttcttttcttccaacaaaataaagtgtacaactagttgtataattattaattgataaaaatttagaaatatcgatttattgctttagaaaagatattaaactacagctcttcattgatttgagaagttcgagttttattttctgataaatatccattaccctattcgctcttactcgtattcgataatatttgattatgcttttgtatccgtggttttcaattccgatttcgaaaaaaatagggaaacaaaaacgacaaaagtggtttccgtccgtttctgaacctttttcatcgccactgaagatctccatttcttttactactataaaactagctatttctttatgatgaccggtggcccacataacagcagcactgagagaaaaaaatgcaacaaactcatttgaggattgtgttgacaacaaactactcagaccaccaaccactaactgccgctctacacaccgccaccgctgctctttctcgttgagccaccatagttcctcctctctgtctttgcatgcgcaaccgcaccctctagtcaccgacatatcttttctcctcccccatcgccatgcatgctattgtcatggtcgccgttgaggttgggggtgttaggctttgtagggactcggggaagcaagagtcgacctgataaagagcaaagactcttgatccgggttcctccttgctggataaagaaaaaggcggagagaaagagagttagtatgcataatggttgcaaagtcaccggacttgatagaatgaggtggtccaaattaaaatgtaaagtgagatgttgtgtaaatgaaaagaatggttaaatgatgatataatatgaaaacatttaagaatacatagtttaaactgtaatttacttttttttttctctagcataattaaagatgagttgtccattaaccgatagtctcatgatatgctaagcccactacaattttatcgtctctgcatagtatggttgatcagtgtacttagctattactaacaatcttatgatatattgatacatgacgatataaacttctactaacacgggctaattaattatggttagataaatctagcttaagaaaagataaaaataataccatatattttgctcaataataaagtattggattgtggtcctgttttctcactacatgatatatgatgactatctcttgtcactgtgtactcctcaaaaaggattagcagttagaacatgcttcaatagaatgtacgatcaatacctcatgtgagtaatttgatgcaatcctgcacacctcagatcatcaggcttcccttctattgtattgctggacgtgagtagtacaggcctagatcacctgataacaactttattttattagttacaactgatacaattgtatctaacctaaactatacatgagataagattcactctgttttcagtctcagctgcaggaagaagattgaggttgcccctgaacatgcttctgattgaggtttcaaaaaatcagatattcagaagctgaccgatgtttaaataccgcagtactgttgatgctaatccattttatctaaatgactgttggtgctaatactcctaagtgttttcacagccatcaatctgccactgcattaattcagtaaaattgcatcagagtttcaaatcaagtattaatgggagctgccatattttctgggcattgaaacaaattaatctacctggaagtggactgatgctgacacaagttaaacaagtaaccatatccatgatctgctacatccgaatggtatgcagtttgtcaaaccgattgccactcctttgtcaagttcagataagtgagctcaagattgttgtttcatactttctgagcggctgcaggagaggctgattgtcatgtaacaatgcagtaacaaatgccttgcattctcctgttgatgaccaaattaagagtttgaaggtatcatcattagcacactgtcttgctgttcagtttttgtacagtgaatgcttgtttttcctgcgacaataaccatagaggaagaactagcatctttttctgcctccattttttttttgaagtgaaagcggcaaaagatttgccgaatatattagaagattagaaaataaaggagtacataagagcgattacaaaatagtggattgcaacaactgaaaagagatgaaaggagatgaagatcccttctttcttcatggcggtttgaaggccatctctggctagactgtcctgaactgctcctatgaactgcaagatcaaaggaagatcgcttgggcactaattgtgagaaagaaaaagaagagtgctccagaatacgcacctaaacgaaaatcaggtggcagccatggtaatccaggatattaaccaaagagagttagctttccaatttatagactagagccttttgatgctgtaacagtaccaatgctattcgtgcctatgttttcctgtaacctcagtacttgtaaaaacaatcattctccttcttcttaacacataacaaacggcatagctcctgccttttgctttaaaaaaaaaagaagtgttttggaggctgcttcaacagtgtagacttgagatgctgtgtatttccatgtcagtgaatccggttctgtattgagattcccaacttgaagttctgtccagaggtagtatatcggctgtaaatcctgaatgtttctgacttgttttgtagggttctgaatcttttttccttgataattccttctgtgccatcctattgtatctgtccagaattttgttcttttcaccaggggaagtgtcttttcttggaaggtttgatgagacataatgtcttgatgtttagtttggatataaaaggtaactgattttttcaaagatttcagttgcctgaaatctagactgtccctagtttcaaagtttgggcagaatattttagtgtttctcaaggtatacatattgctgatgttgacactgaaaaatactctttgcagcctattgccaatccgtgaacttctgaaaggttttatccatgctagacttgcttgtattcaattcaaacaggacaatgttgtgctacaaggagtcaaggacattgtgacaattacttgacatgtacagaccatgaaacagaaacagccaactcaactctgaacttttctgaaattcagacttgagagtctgaactgaatccaattcatgcaaagtacacttttggcataaacaaatgaatcaagtaaatattttattgccatgaataaggagtacaattagtactacttaagcacatttaactcaacctatcaacagctaatgatatctgcttagctaaataaataccactatactagccatcagaggattaagctcctacacatctatgcttctttatctacacaagaatctctttctacaaaggacaatgtcactgctaatccatctctagctccatagatcaaacaactcatcatcaatggtgaagtcgatgcagctcaggtcgtccatcgtctcggcaaagtcgatgcagctcaggccatccatgctgtctggaactccaaaaccagtggcctccacgtccatgacacccgatgaggagtgctccttctgcttgtccggcgacgacatcatggaccctgcaccaccgctggcgtccttcagctcagcctcatagtacccggaaagagaatcgtccaccatgccggagcagctctgatcggcgccgacagagtcattggggaggtccaccacttctgaattaggaggaggaacggcgccggagcagccatgatcggcgatgtcagagacagagtcatcgtgatggttcaccattgctgcaggaggaagaacgagctcctcgatcagagcagtctctgacacggcgctagtgcagctctggccatccatggcggcaaagtcaaagcagccaaccatgtcatccaggctctctggaagctcgaagaacattggcgcctcatcattttggttgtcctgcgatgacacccaagatgatgccggtgctgcacggtcgccgccgccactggcttctgctggaaagttcaacgggtcatccatgctctctggacctccaaattcagcaaactgcgccggtgctacgccaccaccgctgtcagcttcagcatcagcttcacagcttccttgtggcagagagacgaactcaggcacaaaactctgaagctcatcctcatcgattgacccggttagatcagaaaacaccagggtagagttgtcccccacgccgaagcagctctgatcggcgccgtcagagacagagttattgtcatggttcaccattgtaggtggaggaagaaagggctcctcgagcacagcaatctctgacacggcgctagtgcagctctggttgtccatggaggcgaagtcgaagcagccaaccatgtcatccatgctctctggaaactcaaagaaagctggtgcgtcgtcgttttggttgtccagcgatgatgcccaagacggcgccggtgctgcaccaccactgccacaggcttcctccggtggcaagactatcaggtcgggaagagcagcaaacacactcgagcagccctgatcagcgccatcggagtcatcagcttggttcaccacctctgcaggaggaggaacaggctgtggcgagagcgccaagtcctcgatcagagcagcctctgccacgacgtcacggcttccttctggcaaagagacgaacagattgcgcgcggcgaactcaggcacaaagctctgcaactcatcctcatagattgacccgggttgatcaggaaacaccagggaagagccctgatcggtgacgtcacagacacagtccaccaccgcagcaggaggatggacgggctgtggcggcggcgcgctgtcctcgagcagagcagtctcgggcatggcgatctgtggggcgcagcgcgctcgaccgtgttcgtcgtgggcgctctgagaatccggttccctcttgcgcttcttgccgtggccactgaaccggatgcggtacagccgcatcgccgacgaggcgaggtcagccggcgacgtgatggcgtactcgtgcatcacccaccccgagctccccttctcgccatccgcgaagtagctgaggacgtacttgcgccacgcgatctccacgccgccgccgccgccaccatcggggacgaccagcctctcgccatcgacgcacatcctctgcccctgccagtaccctccgccctcgaccgtgcgcttctgccggctccccttgccgttcttggcccgcgcctcggcgaagaagaacgcgtcatcgcccctgccatgatccgcaagaagcctccatggcggcgcgcagaggggatcggcgtcgaggatgacgccgtggagagggaggggcttaccctggatgcgcgcgaggaggaagcgggcgacgagctcgtcgtccttgggctcgaacctgagccccggcgggagcccatctccagccgccgccgccatggatcgatccgcaggagaggagaggaatttctagggtttgggaggagggtttggttgggaagagaggagaggcgattcgaatcgaggaggggatggggatgtgagcaacggataggaggctatttaaaggcggcggcttcgcgggcgcgcgcggggagatcaggctagggctcagccgtgtggaaatttccccttttctgtttgaaagtttgatgcaattttattcagtttggaagttatttggaatagcttcgaatttcgaactgagatttttagtgttgcgctattgctgacgttgacactgcaaaatgctctggattcgcagcctaatgccatcccctgaattctgaagaaatcttttcttgaaagaactgaagaattttacccattctgaacttgaaggactgaaacatgggaaacatttagttgagaagacaataaaaaaggacattatgcttaatgaattgaaacagtttgggaataataagtggttaccccttttaagatcaagaatgtggttttcacctggttagcaccaagttaagaaaatccccctattaatgtctgctcgttgaaccgatgcatcatccagtagtattcccttttgtatgtacatgagttaactgttaactcatccggattcagatctcctggattgcctaattcctctgaactatccttctaaaaaacaaattcctctgaacttgcatggagtggcactgtgcagcaaatgcattacattttgattctagctagatgtaatacttacgtagtatcatcaactatatatacgcacctgcaaatctgcaatggtatagtgctagtctgaattcattttttttaagcatgtttgagtagcacaagattattcagtcatagaaaaatgtagcacaaactgtcctgggagatattggctatttctggttgctagtgttgagatcgacttccagccacacaaagatcttggtctcttggaccatatttatctgcagaggtaacatgcagtaggcctctgaatcaccagacaatttgaaccactgtatctgttcagaattttgttccttttttctttcaccattgctaactgaagatgctgtctggcagatcataatcagttacaccagcttatgttttgacattcttgaacccatcactttgcattgtgcgcaatacaccttcagatcaaacaaaggtcaatggggtggatatttctagttgcgaattcctgaaatcctgaaatgttttctccctttttcttttgtatttttcagcagagtcttaacattttgcaactgcaaaaatttggtttgcagctgctgcctttgtttcgtaccaaattctcaacttgatcgttcaaactgaggctttcgttaaaccaagaaaattcagagtgtatatatcaaaccgacgcaattgcgactgtggtcttgtgactacatccggccccagcccacgttttcctctctttttcaggggtcccacggttatttctccttttttaagggtcccatggttattttattcttttaggggtcccacagttattttttttctttttttaagggccctacggttattttttatttttttaagggtcccacggttatttttcagaatgagataagacccagcaaaagcagagacacatcccgagtccccgactcatccgagtctccggcgagagccgccgccgccgacgtgccggactccggccgcaccaccggccaccgcgctagctccgcttcaggtaaatcccctgagcagagaagatgggttgaaatctcatccgtttttttttgatttgaggtctcctacctccggcgatggagtcggcggcggcggcggcggggtgggggctcggagccgtggacggcgtcctgccgccggagctgctgctcgacgtcctgctgcgcctccctgccgggccgatctgccgcctccgcgccgtctgccgctcgtggctcgccttcaccaccgacccgcacttcgtcgccgcgcacgccgcccgccaccctgccccgctcctcgccgtcggcgtgcagggcttccccaggctctgcgtcgacctcgtcgacctctccggcaaccttgtcaagcagatcctccgcgtggggaaaggcagggtggtgagcgggagctccgccgaccgtgtcctcgtcgccggcgaggaccacagcgtccgcgtgctcaaccctaccactggatccatttcaattttacctagccatcgctgcggcggcgcagacccctcaacgattgcggcctggtttgcatttggtcagacagcttccacgggggagtgcaaattagtccggattttactgaatattgataactctcgtcacctatccgaggttatcaccatcggcgacacggatggagagtggagggagacggcgaacccgccaggctaccttggttggaactgcaccaatggagttgtgttcaaaggcgctgcttacttcatcttggattactgtttctctgatccctccttcctcgagaggggctgcatgccttcctttgactttgcgacggagaagtggagtgtggccctccaagggccgttgaacagaattctcgaggaatccaatggcacgctcagctatcatgaccttgccaatcagcttatgttatctggacttaaaggcactttgtgtacatcgcactggaatgatcaattttataccgtggatctatggtttctaactgattctgaaaagggtacatggtccaaagatcataggattaatgttgatgctgtttttcatgggattggagattatctgaaagtgcaacctttgcttgtgacggatgagggaaagatagtactctcgatgcagatgggatcaaaaggggttgtgcagatttatgatccagtaactgacacttcctcggatataattcagattagtatctacactggagcaagtgtgttcactggaagtttattatgtccacagagtgtgtgacaaggtaaagtttggtttcacatcatcacattattgatattcatgccgtaatttggttatatttgtgtgtttttatcatgtttagtttcagcatctttattttgtcatttatttcaagaaaaatgaccagttccattgaaatatccatcattctttatgatgttaaaaacttccataggtcaagaaaataagatgtttctccaactgcaattagcaaatgggcctatatactttgataaatgataattatagcagaaatgagaagaatccaatgattaatgaaacacttaatcatctgctcattgagatgtattgtagttatgtactgctggcaagtggcaattcttgctaaagttgtcgcctaaggagggtttgttattaatttaaacaaacatatattttatcaatgtgttgataaaaaaaataattggaaggtcttttgagtctttatcacaatatttttaaaacggaaaataattttgcatatgaaaatagaaaaaacataagttatatcaaaattttcatatactctgtttatataaaaatggattgttctatcatttaatctcgtttttagtggccaagaaatattgaaagttgcaaatcgcttcaccgaattgcataaatggagattagtagcatgagtccatgctgataattgagtctctagcttaaatttgtcgattgttttctcaactgcatgatactaggggagaaaaaggttagtctcccagatagctattagggaaaaaaagttcagttggcagtatgataaacacttggaatgccaattatgctttatgtcattattagggaactaaaaagaccactgttttatcttgtgatgtcatacatctgaaaggttttaacttgagaataaactatagaacttaagtaatgaatggaaatgttttaatgttgtggtgggagttcttgatcctggaaacacgggcatggggctttcttggtctgggacatgtcacatgcctgtggccctggttggcactatttatcttgaccatatgagttcagcttgacatatatttattttggtttctgcttctgtcttgtaggttggcagggcattgtacgaggtgctaccacaaagctgggcacttaggatctctactgctctgatgatgtttcggtttggtgtcatcaaggtgtagctgatgtccctcgaaaatgtaacaaaaaaaatggtgtagctgatatttgctgtgtcttcgtcatgtctctgaatctctgatcgatcgcgttattgcgatatgttctgtaatcatatcaacaattctggagttaagcatatgccgttagctcgagtttgagggatcgtgtgctcctgtctcgagttttacctgatgcaacgactttatgcaaatagtaggatgaaattaatgctcgtcaacgtaagtttcgttttcgtagatggattcctctgacagaagaaattaaccgacttggtttctttcatttatagtgaacttacaagcacggattttttgcaggaactttctttcagtatatagaactttctgttcgtatgagcaattaatcacatcttaatatcttaccagttgtccacttctgatgcatcagaaaactgaatcaaaacagaccttaacatttcgatggtcagtaaatgtatccacctgcaagaggcgaaatagaaggattttttaaataacaattatcacccagtacagcattagacagagcttgaagagagtcaagctcctggtaagaatggcatgtacaaaaacatctttgcctgctaatttgattaagcagaacctcctgccatttcttaaaaagagttcagggaatctgctatagaaaggaagcctgagccaagaacaaaatgttcatagagcgattgcgttacaaaaagcggcccacataaatccatgtcatacaagaaaagggtctcaacaactcattccaatcgtcatgagagtgattttccgttgaacacgactactgtctgtcataccgactaatgtgaacgaccattcaatcagtacgtaagcctcagttttcaatagatgaattcgaagcttccctcgtactcactctatccctaaatatttgacgccgttgacttttttaaacatgtttgaccatttaaattatttaaaaacttttttttcaacagagacatgcaaaaaaaaagagctcatcattatccccctggcagaaatgccatcaacttttttttcaaatatgatttcttcttaagaatccaaaatgtcacggccaagagcatccaattcatcaggaatctgttatcccccatcaacctcaggtgacctacaaggtgaaatgagtgaacaagaaagttacaaagatgaacaaaatcatcaaaattactgcaatcatagtgcaataaactccagatacatgatagtcttaactcttatcataagaaaaaaaactattctagagcaaagtattgtatcttgcatctaacacatccattagaggtgccattcttgtatgacgattcagaaatctactactcgttctgcttgtaaaaataattaacaaggtttttgcaaatcagacagcgtgaacccaatgacaaagagtgctggtccgtggccaaatctaattttcattatttattccttgcaaaggaacaatctctgtagtactacacaatatgcactggatattgctagtttatgctcaaaatgtgtactaaatcaccattttaaaaaaaaagagattttttatggtccagcaaattgtaccgctcggtaccagtacgcatctgccgttcgttccggcatgggtaggatcggaagagagtggcgctggccatgccttgaagcaatcaagtggcggcgagcggcggattctggcatgcgttgaagcaggccgctgcggcggcatcgaactcgtccttcccagcggcagcggcgttgaagcaagccgcggcggtagcgaactcgtcgttcctggtggcggaggcgtcgatgtcgtcctttccggcggcagcggcgtcgatgtcgtccttccccgtggcggtagcggtggcgatgttgaagcaggcgacggcagcagcgaactcgtcgttcccagcggcggcgtcgatgtcgtccttcccggaggcggcggcgtcgatccaggaggcggcagcggcgtcgatcgatcgagaatcccagcccttctagggttcgagctgcccgtccatccctcccgatccggttattgcacgcgaagttacgtttttgcccttccatctcagttctccgcgtggtactgcacagagacagaattggtaccgcccggtaccaaactctaccagccgttggatcgggccagatccaacggctaggattttggtacctggcggtaccggtaccgaccgctgtaccgtaacaac

SEQ ID NO: 9266 - DNA, 29451 bp, Oryza sativa
ttggtaactttaatagtagaaaatacatgtttggtttgctactaaatttttatcacaatagtttaaattcattactccctctttccctaaatgtttgacgccgttgacttttttaaacatgtttaaccgttcgtcttattcaaaaacttttgtgaaatatgtaaaactatatgcataaaagtatatttaacaatgaatcaaatgataggaaaataattaataattacttaaatttttttataagacgaacagttaaacatatttaaaaaagtcaatggcgtcaaatattttgggatgaagggagtactaaccagtttgatagtggccaaacttggcaaggcaaaaattgacatcaaaccaaacaaacccggcgtcttaacgaaggaacgcggcagccatgcaccgccaccacctggcgattgaaacaggagaaggcaaaaaaaaaaaaatctctctcacacacacacacaccaccgcgtgccccaccggctgccgttgcgagtccagtatgtgtgtgtgtacgtgtgatgcgctgggtcgatgaccttctttcttgcttgcttctccgcgttgattacaccacacgtgggcgcacagcgcactcggcagtcggcacccaggccaataccaggattcatcaaaccgttttaaaggctatggccttgtttgcatccttcgagctattaaatagccctttaaaatcttgctatttagaagtattaaacgtagattaccgataaaaccgattccataatccctagtctattttgcgagacgaatctaatgatgtatattaatccataattagcggctaattactgtagcaaattatggattaatataactcgttagattcgtctcacaaaatagcctaggggttatgaaatgggttttctcagtaatctacgtttaatacacctaaatagtaagatttcggagggctatttaatatatagccctccggatccaaacagggcctatgttccggagtactccggttctctagcatgtagaacggagcagtgtttatatgattaattaaatattagttaaaataatttttaaaaatagattaatataatcttttaaagtaacttttacgtagaattttttttaaaaaatacaccgtcagttttaaaagcttgcgcgcgaaaaactaggagggtgagctggaaaattagacataagaactcagcataaatagggttaccatcaccctatgatttgacgtaggactatcgtattggataacccgtaccatatccaattttacttatccccatcacaaaaatattatccatacctaaattaagtgggtattgctcaatgggttggataacccaatagatataagagaagagacatatgtgggtttcacccgtagaaatggatcaaaaattatactccctccgtcccataatataagggattttgacaatttgcttgcactgtttgatcactcgtcttattcaaaaaaattatgcaaatataaaaaaacgaaaaattgtgcttaaagtactttggataataaagtaagtcaaaaaaataattctatttttaagtaagatgaatggtcaaacggtgcaagtaaaatgtcaaaatcccttatattagggaacggaaggagtacaaaattgctcttaatatataataaatcatccctccaaatttcagttaaatttgataagattttctaatgtgaacgcgagtttaaaaattttaggttcaaattttacacgcagcaaatgggtatggacgaagtgggtaaaatggataataccttccccaaatctaaagtttaaatggtaaactttttcacctatacgctacccaaatactacctccatcccaaaatatttgacgccgttgacttttttaaaaatatttgaccgttcgtcttatttaaaaaatttaagtaattgttaattctttttctaccatttgatttattgttaaatatacttttatgtatacatatagttttacacatatcacaaaagtttttgaataaaacgaacggtcaaacatatttaaaaaagtcaacagtgtcaaacatttaggaaaggagggagtatgtgggtatggatatggggttgggtaatgaatgcccagtggaatgcttaaatttgtaagcatgaggtataccatggttttaaaaactgacgagattaagattacgtacgatgttgtaaactctgtaaactctacccaacacccatcgcctcgtactgtaccaccggcgtaaaggacggatgccaaaacttagaggctagagagtagagtagactaattattaagccaatagaattaaccttttttttcgtgagatttcattttcttggaaacttttatttaaccttttcaaataaagtatgatgcctttttaatcgtacgaaatattcgctacgaatgcctcgatacatgtcgagcaaagttggcaggagcgccttaatcatctccaaaattatcttttaacctatctctcatctaatttatgtgaaattccaacgacttatttaaacggtcatcgttgtgtttttttttctacttctccattttacatatgtatttcatataaaatcatgtgtttatatttatttccgtgtttaacatatggtttcattttaagtaacttggagtacagcgagcgaagaaccctgtaattaaattttggggaaattcccagttgaatatatatttcgttttaagtatctatctatcactttcttacttttaccatgtttttgtaaatatcatacgctaaattatttctcgttccgttcgtcacttgtcttcacccttcgtccacgggtcgagtctacttcatttaggtattacttcaatggacctttatagctacttgtagttaattaattagttttcttcattaacttatggagtaatatttttgcctagagttaatcaacatgagtgacgggtttgttagcttggacgtgtacaaccgtacgtgtgatcgacactactataaagttggtttttcatggcgataccattttttttttttgctggcagttttgtgcaaaaaccgctagcgaaattgtaatgaagggtgaggagctaagaaccgccagcgaaaatagattttcgcaggcggttgagctatatagtccgccagcgaaaatagtatattttcactagcggcccttataaacaaccgccagcaaaaatcattttttcgctggcggtagttaaggagacccaactgaggagagaaattccttatataaaaatttcgcacaggccgcctcccactccaactcccaccggtcttatctccttcctccctcctcctcctacgcccctagcctcctcctccttctctgcgctccttcctcctcctccacctatcgacgtcggcaacgaagaccccggcgaactggcgacgacgacggcggcgaccacgacgggcgggaggggggcggcgcgggtctcgcggatccaccgccgagaggggcgcaggccgtcgatccccggccgggaggggcgcaggcgcggtggatctggccgccggagggccgtgggcggcggatcgggccaccggagggccgcgggcgggaaacgagccaccggagggccgcggtccttcccctcccctccaagcgacggtggctccgatctgcgtgggcggcgtggtgggcgactccatgtgcacgtcgatgacggcgagcacctcccccccccccctctccgcggcgtcgggaggtgggcatgcggcgacggcgacgggaggcgggtgtgcagctacaacaagaggcgggcgtgcggcgacagcgatgggaggcgggcgcagagctccgacgggaggagggcatgcggcaacggcggcgggaggcgggccgcgggcgcttcttctccttctcctcctccccctccccctcccacagtctcgccaccaacacctcctcgccggcggctggggttcccagattcagtgtctcccccatcggatcgagctcggctgctgctcggtcggcgacgacgacctccttcctatctcctgcccagatcgatggccgctcctctagctgctggtgatgatgtttttttccatgttctaccattgttcaaaatgcttgtatgcctgttcacttgcatgttaattgaatctaatgaactctctgggatgaggatttgaatcgtttcctggaaatttggatgtggatttgaatctaaacatgctgcaagttgggattgtgattggggatttgggacaaagatttgggattgtgattatttggcacaatgatttggaatttgtgatactattttggacctggattttcattgtttttcgctcaaaaaagttttcgctggcgggtctcttaatattgccaccagagaaaaccgattttcgttggtagccgtcttactgttgccgccagagaaaacccattttcgttggcggccttcttagtatggccgccagcgaaaactcattttcgctggcggttggctgtccgcctgtgcaaatgcattatttttactggccttttgttactggcggcacgccaacgaaaacctaatttggccgctagcaaaaatcattttcctagtagtgcgatgtatgttaattagcacataattacatacttaattttgctaatactgagttaggagagggacaagctagagatatgatgcgagccatgtacatggagaaagcaactcatgaaaatttcaacttccaaattaactccaatgcaaacagaaaatgaatatgaaaaatagtaggatatcttttatactccatatagcatcgtttctaaaagtcaagattttcgaacaaatggagggaacattacaaattccatttctaatcatgaacgcgtgtttgagaaaagctgggaacaatccaataattcagtgtagcacgttgatcaacaggatgaccaaaccggaagtctaacgttgccagtctcgtgtcaacattagatggtgtagtggtgtactcttcataatagcatttttcttgggaaatgttttcatatacaccataactaaagggctcatttaaagaaaatcttgacaaccaacaaatgccttacaatacatttcttttattgaagaaatctagctacgaatacacttgcctttggaccaatctccttattccaaaatgctccccttctctcgcgtgaataaatggttgttacttcagcgcgtacgacgaaacatgttatactccccctacctaaatatattgattttattaaatatgtttgaccattcgttttattcaaaaacttttgtgaaatatgtaaaactatatgtatacataaaagtatatttaacaatacattaaatgataggaaaataattaataattacttaaatttttttaataagacaaacggtcaaatatattttaaaaagtcaatggtatcaaatatttagggtcgggtggagtattagtttttcaaaagtagagtaagatggaattatttactcatgatctaattgcttagctttaacatatgatcaccaattctaagattaatgtggaatttggatgattaaaactgaccggattaagactatatattccaagtaactacaactatacgtttgataacttatcctatgctatctacgtattgtatacggaacttattagttagataaacaattgtttgagtactcattgaatatcaaagctaaaaatagaattcaataacctgtaacaaattatctgtctttaaccgttattaattcctccgagcagaaaaagagacggtttctccgataacatgtaaaaccccataacatctactccctccgttccataatataaggcacaactattttttttaaatgttccataatataaggcatgcatgcatacatataattaattaggaccttttctccattaaattattacttttttaaatcctccatactcaagatctctaattctattggatgcatgcattatatttattagagtgatccaaactaggagatgataataattgtttcttggtctttaggttaagggtggttgtgctttatattttggaatggatggagtatctatttagtaattgctttaaccaacacaacaacgcttacctcctcccattcgagtctcctgtgtcactcaacgcgcgtcattgatgtaaaaggtcgttttttaatgagtttgtgacaactgcagctttaattcttcaagcagttgagttttttttatcctgattttgagaagttatagttgtaaaattcagaaaacgaactcaagacatctagattctcagaagctcatataaagtgttgtttagaggagtttctagctgctatatcttctcataaatccccatctccactaaatagttttgattcttagaatctatagttacatagaattcatagaatgaattagaagcttagaaactgaaaaattcatcttctcattctaaaagttgattaccaactatccgtttctcataatcttaggaagtgtttatatgcagggctgtaaagttttagcgtgtcacatcgggtattatatagggtgtcgtatggggcgttcggacactaataaaaaactaacatcagtaaaccacgagatgaatttattaagcctaattaatccgtcactggtatatgtttactgcagcatcacattgtcaaattacggagcaattatgtttaaaagattcgtcttgcaaattaatcataatttgtacaattagttattttttagcctagtagtgcttaataattcatactggtgttcaaacgttcgatgtgacagggtgaaaaattttagagtgggatcaccttaataagctttaaaagcgtgcgtgtggttgtagagctcacaattcacatgtgctgccattgcggagttgcggtgtttggtgttccacccgccgcagctcaccaccgctagcgccagcctcccaacacacaacggtcaggtcccccgatccccgttaagtccaatccccgacaggtattagtaccaccccgcatctccccctcctccactcgaaacggctacttcctccccttcctccccctccaccaccttctagaaccttccacgatgccgccgccgccgcggaagcgcctcggccgcgcggccctgctcctcgccgccgccgcctacctcgccttcctcctcctcttcgagctcccctccctcgacctcttcccctcctccgacgccgcggcgggcgcggcgatgcccacccaccgcccacgccgccgcgagctcgaggcctcgtcgtcgtcttcggcgttcgcttcccccgtcctccgccgccccgccacggcggtgtctcccgcgccggcttctgctgctgccgcggcggctggggcgctcccgatcttctcgtcgctgctcctcctcccccggcccaacgcgacggccaccccgttcgacgggaccgccgcggaggcgttcgccgcggcgaggccgcacctcgaccacctcaggactgctgctgctgcggcggcggaggaagcttcgtcgtcgtcgacggcgccgacgtgcccgacctcgatctcggtgcacgcggacgggttgcccggggacggggtgaggacggtggagctgccgtgcgggctcgcggtggggtcgcacgtgacggtggtggcgcggccgagggcggcgcggccggagtacgacccgaagatcgccgagaggaagtccgggcaggagccgctcatggtgtcgcagttcatggtggagctggtcgggaccaaggccgtggacggggaggccccgcccaggatactccacttcaaccccaggatccgcggcgactactccggcaagccggtcatcgagatgaacagctgctaccggatgcagtgggggcagtcgcagcgctgcgagggctacgcctcccgccctgccgacgagacaggtgagctcgcagcgcggagatcgagctcttctgattcattccattttactaatttcattcggttcgatttgatttgatttgatttgattggattggattcggatttgcttcaatcagatcgtctggtggtgtgattccatgattgcattccgttagtttagaatcggcaaattcgatgttgatgatctggagttaggtgtgaagggggcggtttgttagttaggaaaaattagaggcgtcaacttcagtggtctaaattgcgtggaatagctttgcttggtggaaattggccagaaaggttcagcctttggcaagaaatttctagagaagggctgggtttgtttaccaatttctggagaatattttgatggtgattgtgtttgacctgaaaccgtgtctgttgcctgaatgtcgagtttgacttgataacgtgctgcggtgtcggtgggaagtgttaacttattattcttctctttttcttcctcaattagagggagctcaacgggttgattgcttagtttggcttgtaatagcctaaacgtcaaattggttgcaattaatctaatttagcaaatattgtgggagtgtagaagcttccaacttgcaagcatgcttgataacagtaggtctattttttgaatgagctataccagagtttgttctaaaaaaagagagctatacgagagttgcagcgagcatcttaaagcttgcagcatctcataactgggcattcttcaagacaaagttggaacatcattttttgcagcagatctagtttcttgtgatacaggaaaaagacttgtacttacaattaaagttacactgaagatctcttctactttaagagtgtagcgactttgcttcatggtgatgtctttggtctttcagttgatggccaacttaagtgtgagaaatggattcgtgacgacgacaagaagtctgaggaatcgaagatgaagtggtgggtaaagcgtctaattggtaggccaaaggatgtgcacatcagttggccataccccttcgcagaaggcaagctgtttgttttgactctaacagctggtttggaaggttaccatgtcaatgttgatgggcggcatgttacttcctttccttatcgcactgtaggtttttcttaaagcatcaaaaagtcattcagttgcatgagttcttgagcaccatcctgagatctccataactaattttgcccaactaatggtctctgcagggttacactcttgaggatgcaaccggcttatctctgaatggagacatcgatatcgaatccatttttgctagttccctgcccaattcgcatcctagttttgccccagagagataccttgaaatgtctgaacagtggagggcaccaccactaccaactgagcctgttgagctttttattggtattctttcagcagccagccattttgctgagcggatggctgtacggaagtcgtggatgatgtatacaaggaaatcgactaatatagtagctcggttctttgtggctctggtaactatcgattgacttaatggttttactactcttttgagtaaattcataatctaaccaattaaagtaaatttacagaatgggaaaaaggaggttaatgcagagctgaaaagggaagcagagttctttcaagacattgttatagttcctttcatggatagctatgaccttgttgttttgaagaccattgctattgctgagtatggggtaagtgaattgaacatgtaggactgttttgttattagacattagctgctatcccatctcacatgcttctctgcgttccaatttatccatatttatgctcatttaatttggtctgtttatgcaggtgcgagtcatacccgcaaaatacatcatgaaatgtgatgatgatacatttgttagaattgactcagtactggatcaagtgaagaaagttcgaagtgataagagtgtgtacgtaggaagcatgaactacttccataggccactaagatctggcaagtgggctgtaacttatgaggtaaattgttctttcccttattttaaagcaactactatgaatatcacattagacaagtgcaacttgaaaggatattgtgttgtgaaacatgcaataccctatttgccttgcagttgtgttttcatatgcttgctagccaatcattagatattcaccaactagcacatgttgttcttattttctcttcttcttttgatgaaatcgtcgacatgcataccattgttcatgtttccccttttatatgactatgaaccattagccgtgccactaaattatattcaaatatatagtatcttcacatatttaaaatccatgttagcttggccctttgaacaaggcaaacatgccggttgttcaaattgtacatatctcatgaaaaagctggcgctcaatcttctgcactgtccttagctgtcagcttttagcataagaaatggatgagacctcttcttgtcatcatattggatagcttcttttatttttgcaatagtaatattctaatgttgcaatgataactcctcttggcaggcatcatattagatagtttttttttttggcaattgtaatattctaatgttgcaattctgattctattttcaggaatggccagaggaggcatatccaaattatgccaatggacctggctatgtaatttcagccgatattgcacgctacattgtatctgaatttgacaatcagacacttcgggtaagcatcaactggacctagtatgtcctaccgtacatcctgctgtaacttgaactaaactgtagtgtatttctgtttcagctatttaagatggaagatgtaaacatgggcatgtgggtcgagaagttcaacaacacgcttcggccggtcgaataccggcacgatgtcaggttctaccagtctggctgcttcgacggctacttcacggctcactatcagtcccctcagcacatgatctgcctctggagaaaactgcagtccggaagctcacggtgctgcaacgtgagatgacaatggcagcaaaaattagccgtattttggagcaaatagagacgatgttaactcgtaagctcagctcgctgttggaacaccagaaaatcatcagcattcagcgatgctgacggttcggaggagcgctcatcttctggactggacctgatatatgattcgttcattcttttggtcggtggctccgtttcaagctgctgatttctgacacctgatcaatgatgttcttgccttcttggggattctttcgcctgttgatatttatactcgcgtcaaatttatttgacctaggaatttttgaggctggtggtggtggtggtggcggcggtggtatgccggcggcatgttttgtgtataaaaaggattttatgagttttactgtttgtgagtatatattcggtggactcctattggctgacactcttaccattactgtttttatgagttatttttagctggggagtgttattagagagatccttttgaacgggcagtacattcgtgagggaattcaatatataaaaatataatttatgcttaaaatactcttaataataaaataaatcatgacagaataaatcatatacatgtaatttatttaaatatgatgaatggtaaaacttaattaaaaaaaatcaatggcattaaacatttaagagatgagggagatgagggagtatgtttgatgaatgtagtccctatgcttaattcattgctatgtcaaaatacgtccaattttttttattatgacagcaagttgtaaccctttctattatttaataaagagtaaattgcacttatggtacaacaacttgacatgtgagtgtgatatagtagagaattgaatgtctgggtgcaacaacttaacaagtagcgcgttatagcataagaactttgacaatttagtattttggtgcatcaacttggctaagtatatgctaggtaaatttttttcaccatgtcaatatgctatgtaatcctacggatattatcatattaccttataatattgaatttaatctttaagaattatactgcacatacaatttacatccaattaccttttaatttttttttattttcttcaccttctcaaatatcaatcgaaatataataatttctacatcagtttaattgacttttaggaaaaaaaatataaatatgcttatacaaatacactactgtatattgtcaaagtacttaaaaattgaatctatataaaaaatgctctaaataattaagttgccgcataacttgttaatttattgtatcaaaattatagctatcttgcaagttgtcgtatttatatgatcacttataaagttattgtactaaattacatctacatatcaagtttttgcactagaacactcatttcttaagtttttgcactaaattgcacccacctgctaagttgatgtaccgtgggtacaatttactctaaagaataaatctattctgtttcgataaaaagaaactcctattctgagttgtttcagaattctgtttgttgatatcaattgaatctttttatattttattctctccccaaaatttttttttgtatagtttagccgaatttaacttcagtggaatggattttccaaaaaggttcaacggaagggagtgaaaaataacgaagcagcacgcatggtatcatatgatgagttgcactactcttctcagttcagacttcggactgcatataacatggactgggctggacaacatactcggcttggtagctcacttggcttgtgaacagctcggctcgttgagaaatgctaacaagctgagcaaggattgattttttttattttaaattttatttattaaaatattaaaaacacaaattttttaaaaaaggtttacaaatctacaccctaactctccttgagagggcttttttaaaaacgcacttccagagagcattttttataacgtgcacacatgcattggtgtggtccaacggttgcgtaaatattttacagatgacccttgcaactctctaggagggcggcaaggggtccgcctgtaaatggccaaccacgattgttttgcaggtggctctctttataaccctttgggagggcagcaccgcggcaaggaggttgcctgcaaaatgaccggcgaccctccatgtggccattagaatacactaacggacgtgtgccacgtcacaaaaacatcctcaggaagggtggcattaggggtgtagatttgtaaaacttttaaaaaatatattttaaaaatattttaataaataaatttaaaaatttaaaattcagatttagctcggtggctataacgagctagctcgcaaactgttgacgagcccaatgagccagagaaacattaggggaataagttcactttcggcctctctatttgtcgcccagttcgattttcatccctagaccacaaaattgggtacgacccgtcccccaacttacgaaaaccgggcaaacgagatccctcggcggttttggctgacgtggcgcctatgtggcttgtttgactaggtctccatcccacgtggcattgatgtggcgcttacgtggcaattatatctcgaaaaaataataaaaaccgtgggcccaccggtcagctacacacagaagaataatttaaaaatagtggggcccacgtgggcccacatgtcagcgacaaaaaaataaatatgggccccacagatcatcccacgtggcgggatctccgcgggcgcaccaccccgctccagcaccagcacgcggccgccgccaggaccggccagcgttgcggcgagcgggcacccgccataggggagccattggggagctggagtgggcacccgccgtgctgccccctgaggagtggaccaacctcaccgccgctgtcgcgcacgagggctccggcttctacgtcctcgccgtcctccgccgtgagcgccgcggcggtcgctcctgccgttctctgccatgagcgcacgcgacgatggtggtggaggtgggttacggtggagggtgtgtgccgctccctcctctcccgccggcgccgctccctcctctcccaccactgacgccgccgcacgtcgctccctcttctcccgccggcggccatcggggagaagggcggcggacggctaggcgagctccctagcctaccggtgagcgcgcgtgtgccgttcctttttctcctgctgctagctatcagggaggagggcggcggacagctaagcgagctccctggcctaccggcaagcacgtggaagagagagatggctggcggccactcttctccatttctaccgccgtcgttgtcgccggccgcatcccctccccccaacgcaagaaagatgaagaggggagaagggagagaggaagcagaagaggaggggtgagttagactgacatgtgggcccacatgggccccgctatttttaaattattcttttgtgggtagctgacaggtgggcccacagtttttattattttttcgagatataattgccatgtaagcgccacgtcaatgccacctgggacggagaactgttcaaacaagccacgtaggcgacacgtcagccaaaaccatcgagggacctcgtttgcccgattttcataagttgggggacgggtcgtacttggttttacggtcaagagacgaaaatcagagtaggcgacaaataaaggaacccaaagtgaacttattccaacagtaggagtccaggaccagggcccaagcaagaaaagcccattagtgaggtggagtcaggtcagccgagcagcccctttcaaatcagctttgtttgtccttatgcctttgatatttatatacttgtatttaatgaactaatgctaatttttaaactctttctataggaggtagatgatgaaaatcattgagtttgtggagttcccacattgtgttgtggcaagcagctagtaattctgtgatggtcttgatgctgaggaggatggtgttgtcttcaactcttggtgttgcttgatggaagggagatgttacttgcttgttttggtgttgaagttggcaacttggcatgtaacttgtgtgattctatgatggtctgatggacctgaagttctggattgtaatatagtactatctaatctagttgcatggcaacttgcattgtggcatatttgcatggaccatggacatgttattatgttaaccatggacttgaagttttccctattacatattggatggacatgtaatctgcgcacaaatgttgatatggctgacgagctaaaggagctggctgctgagccgagccgagctaactcgatatccaccacccctatatatgatcaaatgcatgctaactgctaatgactgtttgagtggtacatattcagttaagcgctcattctgttgagggaatagtaacatttttctaatattaatcaattagtaacgtccaattaagcacagcagcgtagaattgttgataaggaaactctggttttgtttttgtgtgtgtaggtgggtacggagtaactaataaatggaggcccaaatgatccatttgatggattgagatctgcctgtagcctaccatttcaagcccattgcacgtgagagttctgaccacttaattgtttgatttctatcctcatacgacgcctccaactgaaagtaaaagtttacttcacaaattgtgccagccatttggttcatctcctcctgcgtggcaaccacaaatatgcaagcctccttcgtcaccgacagtacatcttcagagagaatctgagttttcatggttttgtcatggaagcctcaacctccaagcggaggcccttttgagtatacttccttgcgttttcatctgcagttactcttggttttttcgtcaccattgcagccatggatctagcttgctatcttgtggagaagagaaggacttgattgaattttctagtttcttaggagtccttcctagcaaatttcaggagcttatgttaatttggctatcttcgtggggcccttttgcaaaactggttgtacttgcaattgattttccgctggggataagtcatgtgatatgtacttagttatctataatcaataaaatgcatgagtttttttttaaaaaaaatgttctccttaatagttaaaaagttaaacggttcattctgcctccttcgtgattttctacgctgattttatcttacatgatatcgttggctttatccacttttcatggacagagcagaaatataaggcccatctattaatgagcccttcgttctcttccatttccatttccatctccctctcttctccctccagcaaaatcctgctaataccgacctccaccaccgcatcggggctagagacaaggccgaccgttggcttacgacgtgcacccatggctccttagctcacgtagcggtgggacacaagagcaagacaagtacattgacctcgtccacccacatatggactcaacgacgttgaactcacgaagcgatcttggcgttgtctgccacctctccttctcgagctctggcagatcgatgttgtgagagaggagtgaggatgagggagagcatgatacgtgggccaatacgatatttttaattttgctaggagacttaggctttagttcttttttccaactcgaaacttcaacttcctcaatttccgttagcacgctttttaaactgttaaatactccctccatttcaaattgatcatcatataatttttttgaaaatattcctaaatgatcataatatttgtgttcactcattaagtctattcgttatttgtgcattggggtaaatgagcattgatgtatacatccatacacacaagtgttttgatttgctattggctaagaaatagtggggattgtgcatgtatcaagtttattgctaaagtaaatgtagcatgagagagttattatatttttttggtcttgtgcgctcatgtaatatgaagatcaattaggaatggagggagtaatgtgtttttttgcaaaaaatttccatatagaaattatttaaaaatcaaataaatttatttttcatgtttataataattactccctccgtcccataatataagagattttgagtttttgcttttaacgtttgaccactcgtcttattcaaaattttttgaaattattatttattttatttgtgacttactttattatctacagtatttaaagcataactttttgttttttacatttgcaaaaaaaaaattgaataagacgagtggtcaaacgttgcaagcaaaaacttaaaatcccttatattgtgggacggagggagtaatactttatactaatgagctttctcgttctgtgctcgctaaacatctctctccaaaaggtgagaacgaatgcaaccatatgtggtcatatatactttttattttttaaagtaaatttcacaaaactatagaaatattaaccaaattatctcaaaactatatatttaaaatattgtatcacaaaactaagttttttttaacattaaatataccacaaaactataaatttagtaacaaagttatcacaaaactatgggtttagcactaatttaattagaaaaattggacgtttataactcaatcatactattagtgctaaacatttaaaccctaaagatgtgatttttatgataattttattattaaatctttagttttgtgatacttagccttaaatttgtagtcttgtgataaatctattgttaaatatgtagttttataatacatcaacttaaatatatagttttgtgataatttgatcaaagtattcgtagttttgtgaaatttacttttttttttagctagaatgccacatagccgttacgttacataaaagaccagattaaagtgtcacttagatatcacatataacaaaaccaccatctcaaaagtatacaaggagataaattaatccgattttaccagttgtggaagcctttatagccgatagtacggtttgtgaacgtggatcaaactaaccacatagtttaaggacgcaaaataaaccttttccaacgggaaactctctgatacatcgatggaacacgcagttgagacttcagggacatatgaaggagttcaccggaggtccctcaacttaacaacgagatttttttaaagatcccttaaacataaaatcagaaatgtgtacccctaaactcacacaaaccatgcactcaagattctatggtagtatatatgggtggtttcgctgacgtggctcctagtcagcaaaaaaattaaagagtaaattgcatctccggtacacgaacttgttaggtgagtgcaattcagtgtacaaacttgtaaaatgctcgttttggtacatgaacttgtctgctgcgtgcggaggaaggcgaaaaggatactacatagctaatcttattgatttaggggttgattaggatactagtaaacatatatctgagaaggttgatattgacatacacctcttcaatgaaaaatagaataggatatagtgatagtataaaaagtttaaaaaaactgagcaataatataagggttagaaatgtatgaaagtcatcatttccatgataaaggatacaattgagaccaaaattataaatattgcatgtcttatgcatactcactacacgtatgcatgtcacatcctaatcaacatcagcttattttggtccttgttcgcatgaactagacaagttcatgtaatgaaacaagtattttataaatttatgtactaaattgcacctacctaacaaatttgtgtaccaccaatgcaatttactcaaaattaaaaaaagtacataacgcccacatgtcagctgcacatattttttttcttctcttttcttctcttttctctcttctctcttctcttcttcaagccggcggtgggcgagcgccgcggcggagcgctgctgcagagcagcagggagcgagtgcggcagcgaagcggtggcgggctgcgggcggagcacacggcggacgagcgcgacggcggcgaggaggctcgcacgacgacatcgggcgtcactgagatgcgcgcagctatggagtcggcaagctcgtcggctggtgcggccttcccgcggcagatcgggcacgaggcgtgggacgagagccacatgtcgatgcactcctggtggagctgcctcaccatctccccctcgtcgacagcgctgaggcaaaccgcgcactcgaccgacgccgccgtgtccgagatctcgccgttgtcatgggctcgcacgtacgggaacgacgggaggcacgcgatggtggcggcgtctaggccgaacctcggcggcgtcggccgctgctgctcctgctccatgacaagtggacgatcacgccgacgacgggcaatgcggagagctcgagagcagatgaagatggtgatgaggaagaagctcagggcgaatgacacggccaaggcgccgaacaacatcgtggtgctgtagcatccggaggcgcccgccgccgagctcacctgctgtccgctccgcccgtagcccaccgccgcatcactgtcgcacttgtccactgctactctgccgccgcggcgctcgcccgccgccggcctgaagaagagaagagagaagagagaaaagagaagaaaaaaataggtgcagctgatatgtgggccccatatattttttttaattctttttgctaactagattccacgtcagcaaaaccacacatatatactgccataggaccttgagtgcacagtttgtgtgagtttaagggtacaaatttttggttttatggttaatggacctcaaaaaatctcgttgttaagttgagggacctccggtgaacttattccacatataaatacattccataacatgcatatgaccttccacaatacttcaaatctaggcatttctttcgattgaagaaattttaaaggattttccttaggaaataaactaatttatatcaaatttatgtaaaattcatgcggtttaaaggatttgaaaatggagctctcaactcaaataaacaaaccattttctaaagaaaaaaagaaaaaaaatgagcatatgaacaaactcatgcaaaattgatgctcttaacacaaattagacaatcgcaaaaaaagaaaaacacacaaattaggcgatctactccggtcatcaggtcaatgcccctgatgccaacgcaaagtccacgaaccagttaaaatccacaaatttcactgcctccatgtcagtagaaaaaaaggataaaagaaagcttcgagtcaactccctttatcctgctttgtttccttaagtttccgccatgcgagcctaaaaccatacgcatatgtatataaccttccaacctaaattcaaatctagatcttcggccgagtttagttccaaactttttcttcaaacttccagctttttcatcacatcaaaactttcttacacacacaaactttcaacttttccattacatcgtttcaatttcaaccaaacttctaattttagcgtgaactagacacacccttctttagattggagaaactttatgggactttcgaacaaattagactaatttatatgaaatttatgtaaaattcatgcattttaaaggaggaaaaaagtcagcataggaacaaactcatgtaaaatcgatactcctaacacaaattagacaatctactccggtcaacgcatgtcagtagaaagaggattaaaagcttggagtcaaccccctttaccccgcccgtttcctcttgtttccgccatgccgtgggctcaaaccgccggcgccgccgcgcgccggcgaccaaaaccaccggaaaaagaaagtcagaaaaaaaaagtaaggctcaaatccaccgtcgccgcgcgccaccaccccgcgggcgcctccgtctccggatttcacccggtataaatctatgaccgagccgacgcgagctttcttgcgtgttgtagctggagtgttcgaaggaattactggctggcacgcacgcgcgcacgggcatggtggcggtggtgatgatggcgatgaggaagaggatgcgcggcgcgctgctggcgctcgcgctgctgctcaccgcgacggccgtcgtgccgctgctcctcctcggagaggccggggacgacggcgtcggggccgtcgccgccgcgccgccgttcaacgcgtcccgcgtcagggcggtgtcgtggaggcccagggtcttcgtctacaaggggttcctctccgacgacgagtgcgaccacctcgtcaagctggtcagcacctgctgcaatcatagatgccaccaccatggctgaatcctatctgcgtctcgattgattggtgtgtgtggttggagcaggggaagaggaagatgcagaggtcgatggtggcggacaacaagtccggcaagagcgtcatgagcgaggtgcggaccagctccggcatgttcctcgacaagcgccaggtactacatttttggctatatatctggacgccataaatgcttatattttaggacaaaggcaatagtatgtcttttgctacaaatgacaatgatcttttagatattgtgttgtaccatgttcatatagtttgtgggaaattagtatttttggtggccacaaattgccatattaattgggttacaaacaatttttgaaaagaatttaaaatggttgcacaattgcagcgaaaaccgataatgcatttgtattgtggggagacaagtctgccagattaacagctacagttgcagtgaattgatttctagttaatcttcacgagttactactgcttaaaagatagtatttgaactgaacaaaaaactattttttttgtgtgaaattcactgttaaatggacctcatcattgcaactaggttctgacttgctgacatctctcctgcacacaacggtccatttccctgcatttcttctccaacttttgtctctaaattcatcccatccaatcgcaattactggcaactgttcagatcaacatgttcacaggatcaatgcaattcctgttgcgatgcaatgccgcaattactgaacacatttagatcaccatcagtggtctgctgtactaatactgaacctgggtatccggcaaccggtgaacatacaggccggcgtcagttactggaccactggctctcctctgagcagcagttactaaggatgcagatatcagtagcatccatccatccatctattgctgcaggaactgatactttctggcttagctagcattagcaattggaatagtagggaccagatttggtagtaacagtagttaggagatttggtaataacaatggtttgatatgcagtaatttgttttgttgcttgctctcgtactttctaatggattctgtcattctggggtgtaatgtaatggaaatgcgtttcttgttttgtgaaggatccagtggtgagcaggattgaaaaaagaattgcagcatggacctttcttcctgaaggtaactcttctgggcttcctcagattgtctcattgtttggttctattgattgttcaagtagcaaggttttccaagttaatgttactgctattttttttcatcagaaaatgctgagaacattcagatactccgatacgagcatgggcagaagtatgagccgcactttgattatttccatgacaaggtcaatcaagcactgggaggccaccgttacgcgacggtgctcatgtatttgtccactgtcgagaagggaggcgagactgtgttccccaatgctgaggtaaatttcaaatatcacgtccttcacttttccaaatccaaatgatgtatgagtttttgtaacattgctggtgctaatcaatttaggggtgggaaaatcagcccaaggatgacactttctctgaatgtgcacaaaaaggattggcaggtaatggttaccttttgaagtgttttaaatgtgacacctctctaggctctagtttctcttcaaaaactgaaacataacacacttggaatataaccaggctagtttaattgcagtgaaaccagttaaaggcgacacggtgctcttctttagccttcatatcgatggcgtaccggacccgctcagcctccatgggagctgcccagtgatagaaggtgaaaaatggtctgcaccaaagtggatccgtatcaggtcctatgagcatcctcctgtctcaaaggtgacagaaggatgctccgacaacagtgcacgttgcgcgaaatgggctgaagctggagaatgcgagaagaacccggtatacatggtaggtgccgagggtttgcccggcaattgtcggaagagttgtggcgtttgtgattcctaggatgtgtttattttcctaaatctgatgtttgtgtcacttgctgaacacttgatttgtacatacttagagcattttcagatgaaataggtagcatttgaattttcagacagtgaacagtagcatactatttcttcaaaaacaacggcttacatcctttgcacatggttttgaaatctcaagtttacttctagtggaggtgaagactgtgaagtaagttttggtattttactgatgcagaaatggaatctgtccttctggcaacaatgctactgcctgttccactttaattttgttggcttgcataacagtggatttcagtacagcagtgtgtcaggctgtctcaaaaataacaaactcctttggccctttccacaatatagaagttctatggtctttatctcctgcatcagcctggcttttagacaaggaaactttgtttgttgctacctcaaaacatgtttctaatccacagagaacaagtttagatcctaacaaaagttttgttctactgcatgcgaaaaatcgtcgaattagtgtacattttcaacagtagactgaaaatgtccttgcaacgatcatgtaatccatgtagggcttatgagaacagtgtgatccatgtagtcacaatctaataataaggacagtgacatatcacctgaaagtggtagatgtgtgtatttcttcagggtgcttcacactttgaaggatctgcttttggaccttgctttaccagagcaatctctcatgtgtcatgcctcctcctagatttactcaaactttaccttaaacacttttgtgtaaactaaattatcctctaacttggttttgctccaagggtaactaagtaatccctgatggtccatcagacagcattttcggtttgccatcttaaaactccaattggctctttttaccaatcaagatctaagagaaagaaaaatgaaacaaaagaaggaaaacaacataactcaaaaagcaaaggacaaaagcaagcatggcctcacctcctttgatttctaccatgcctcttcattagctaggcccttcaaaagcacatcagagccagcagctcaaggaagaaagaagctgagaagaaaaccagaagcaagaaacacataccactgcctccacaacaatataatgtgctgagacaagagagaagaagcctcacatttgagggggggctttcctcacttgcaccactctatgagatgctcatagaggggtggtggtggtggtgacaataccccaagatatagaaattagggtattatgagcaggtttgccaggtcagcgaggcgggtatcagcgacaacattggccatcctatttggaggcctcattttggtgtcattgttggtggagacaagcgcgaaaccgccgtctccggggagtagtgttcttggtgttgggggtagaaggatgatgatcaatggaggactagttcacagtcacaggagcttggaagatttcaatgctggtgatgctttcagcagcatgaagaggagggtgccaaatggaccagatccaatccacaacaggtaacttttatagcgtgcaaacatgagatgtactgctctttttcttgttcctcttctccttttttctgtttcaccaaatttagtcagaatgttagcttgagatgtgtcaactacaagtttttttaatggccttttaactaaccttccatggatctctggaaattcttattgataataaaagattaatatagcagaaaagtattgtcgatgcctaatcgtgttatctgaggtgcggtcttgttcaagaacaccttaagttttatactgaaatctttctatcccacttcagtctaatttaaagagcatatatgtttcaaattatgttcatgctttttgtttcatcttgctgagtataagctggattggcttttgaaatctctatttgttcaatataaaatgaactatatctatgtcattccataatatgacttctttatggaattaagcttgcttgccatatcgaaatttaatactgtacaagtttgaaaggcatgacttaaatttgattgcacaatgaaaacaatgtataagatggtcacactatttgtattcactacacaaacagtgctcatgatgatgtatgctaaccttttaataaaggaaaacaattactccacccaatgaacaccctgcatgaaccttatcatatctgaaatgattagccaacatgcatctagcacccttaacgaactactactcatcaatcagagcaatatatgtgtgtcaccttgaacattatacttgcaggctttcaattccttcctttatttactctggttttctaatggtcttcaccttgaattcttcagaggaactggagaatcaggaagatcaccaggccgagcgtaggtagcacgcgccccgatcgatggaagcttccgaagcacttctgtggattagatcattgtgttggaagaaagggagggaaaaacaggagttcagcatttgtggtgggtctcttgcaggatgctggtgtaactaggggaaggtggcctatgctgttctaagcactggtatttaagacaattttaggcataaaactttagctttcttgaaaacaaaagctatcctactgattgggtttttaaagagagcaacatcaagcttccatctcacaaaattcagcatcaaaggttcttggcaaagggatatgggcaagagctcctttctttcagtagtgactttgcacatgtttgtagtagtgttgattcttctttttcttttaagtctcatttttgttgtattgattagaaaagcacattgcaagtttgctatagaggaaaaggtaaagataagatgagcaataatttcctggctttgtttcttatcttgtgatgagatgtgaaatccattgtagtttgtgccctagaaccaaagcaaggtagacccacttactaaagatgcttttggtttgccaattagcatgctccacctgcaaatagcattatcacttgagagcaactggaattgtctgcacaatatacgaacaagattataaaattaggtatatttcaattttacattacttaattgctagttgatttcctcaaaatatcttttcaagatacatctccttttcattcttcatatccatattttgtaatttctctagttctacatcaagcacttccaacaaaattactgtggtaaaaacagcaagaagcattggtagaagccaagatgccaagctaaagaagagaaaagaacatccaagctgccaaagtaaccatggattctctccaatgcacattttcttttctttcccttcctctgttttctctcttcttttcttgcaggagtgtagctttgaacagccaaagttgcaccctgaatgtggcctaaaagcaaagcttgtgtgacagtgtgaggaagactgataagaaactctgtccttggttaaaagatgaaccttcttcttcttggggctaatctattcttttcttgaccagtcttcttgtgtactgcatctgggagaataagatgtgtaccaagtgcctttctctgtatcagatgcatactaaagtggggacaaaagtgtgtgcagtttgtactgcattttacagccagcttagggaaaagtttagttactctcttgatccaattacttactatacttggatccaagaaatagtggggattttcagaatttttggggagttgatgaatctactaaaatttgaaaataataaaaccaagcaagtacccaaggctattaaacatcctgtaatcttgtaatgttgtgtttaccttgtgacaaggagcaagccacaaaatttcttcttcttaagaaaagaaatactacatttcatcccatatttattgtatattagttttcaccatgaggactttcacatatttgaactaaatcttacaaaatccctataaaactcctggagttccaaacaaaccttaaaatccaaaccatatatactcacatttcccttacatagaccaatgctttcatcctccctggcagttctgagttccttgttggcacaatatcatttattgtgcagcatagaccccacgtccccacctgtcaatgaaaaatatcacaagaatcctctatatcatcaattttttaagagaccttttaccatgtgcagcttctagcaaaattttccgctctctaaacagattacgttctcacctaaactttgagaatatgtgattatagaatgaaaaagtaaatcagaaatcagaaactaaaaaacttagcttttaaaaaactctcaccaaccaattacttagcggttacttattagaatctagatctcttcggggaagcatgagaggtatggtgaagtcgtggtgcatgactccacccaccagggtttaaatcctagtgcccacgaatattacgcacatgtaggtaggttttcaacggaactttagtgagataaggaatgcgccgttggtttccgtctctcaaagcatatgttagggaatacattcgcgggagtgtgagtgtagtgttacatgtgtagtggtgtgtgttcgtgtgcgtctgtcgtgtaatctcagaaaaagagtctaagatctcttcaaacaagaccaaaatttccatgtacaaattaaattaagagctatggctactgcgccatcgatcgcgtgaatgccccaaaaaaacaaaaaagaaaaagagaaaaagaaaagtgcagcccgtgagtaaacctgtactatgccttttgacctggataccaacgacggcaggtgacaactaatttcacatggctcttaaatttgcagctactccagacgatcagacgttagaaaattaaattttggtgtagatttcagttagtttgcttatatgtatggtgtagatttgcagttggaattcacatttagttaacgagattagtaaattttcactttacatgcatgcaatcatctcaatttttttctctcctgtgatgtttttttatgttggttgtagatggaaaatctaattaataacacgcacagtggaattctccttttgtgtgtgtgtgttagtgattgtatttgtaggccttcatgcttgcaatagaagtttaattgcaacttgccagcaaatcggcgatgatattactaactaaattctcttgctgcagtgaatcatagatctaacagccaatcttttttatgagaaaaaaaaaagaacagctagcattttgtggggccgcgctagatcaaaccaagaccagatgcatataacacatctattgcagatagtattgaaattaatagctgacacgatttttctttgaaaaaaatagaattgcaatcatcctcctaccgtccccttttcaccgtgcgcatgaggtgtccactcattcacaggtacgtcactgtaggatacagtattttattcccaatccatccaccaagtcaatctctaattatatggatctagccaatactttatttttaattcacgtacctagttagtcctcaattatttaggcttggtccgttgcaaaacacgaatatattactagacactgaaagaaaaagagttataatatttaattcacaaaaatatacgtacagttgtgatgcaaaccaggttttgaaaacctgtttcaaaatttcctaaattgcgggtaatttaccaacgtgtccagagaggaaacacctttggcctgaaaattcgaatttgtctgaatttagacactgtaactgtttgaattcagtgaaaatacgttcaaatctcacaaacagtatcctaacctttttgcattgcgaaaagaaaaatcctgatccaaacagcaaaaaagcaaggcaaaatttagaaacaacttttgaattcagcgaaattctgttcaaatatcatgagctgtccggattttcttttgcattgtgaaatgcaaaactctgaatcgaacatgacaaatttaaggcgaaattggggaagcaccaagtggtggaatcctagatgcatgcatgacttcatccaacatatttaaatgatgcccacaaatactatgcatatataagcatattttatatataacaagattttagtgggatatctcattggttttcgtctatctaaacatgtgttagccaggggacgtatttgcggtggtgtaatcattggtcctgtttggatcctccgggctattaaatagccctccagaatcttgctatttaagagtattaaacgtagattactgacaaaactcattccataacccctaagctattttgcgagacgaatctaacgaggtatat

SEQ ID NO: 9267 - DNA, 37589 bp, Oryza sativa
ttataaaacgaagagagtatattcctatggaagtaaaccccctaaagtaatttaaaaaacgatttcttcaagtataatttgtatatgactttttcgtcccacaaaattttggattttgtagcgtgatgcacatgacaaagatacactgaactctttcgagataaggatatctgaacctctctaatttggtattatgttcaattgtttattattgtcttaataacttccttttatagatagctcaagcagtttttaatccatgatgatgtttgtaactgaaattgtgtctgcccccaggaattggagccatgcatgccagcataaggaaacgataaactttttccttttgaggcatttcgtttcatttcgaaatgtgaatttgatgcttctttcttgaatttcatacaataaatttcctgctaaaaacaccaactttaaacgcccttattagtaatagcaggagtttcttcatttgtgactcagctgaaggtagtaacggcagatgaatttatggaaagcattagcaagtgcttacctccatcctaaaataattttatttctaattatgcatcatttgtaactatgcatctggactaatacttatctatgtgcatacaaaagaatgaatctttcttaggaaacacctaaaacaaatactctcactgtaaaaaaaacttaaaatttagaataaaatttagttacattttaatactccgttcgccaataatttttatatatatgcttagtaagaagaagttgtatacatatatttgcctttgtcttcaaatacttgtcactggatacaattcatctttgaacttttgaccactcatcgtttttttagaaaaaatataagtacttaaaagtattatatttttaacgaagtgttttacatcctacatatattcattaattcttttgtaagtcatggtctaatcattttaaaagtatttgatggtcaaagataaaattatattgatcaatggtggcagttatttgaaaccagaagaagggggtgttcagcaccccttttcccaacccctctcccccgttttccacgcgcatacttttcaaaatgctaaacggtgcgttttttgcaaaaagtttctatacgaaagttgcttaaaaaaataaattaatcctttttttaaaaaaatagctagtacttaagtaatcacgtgctaatggaccactccgttttccacgcgtactgttcctgttgggaacttggatgagcgaacacagctaagaagaagtttggtacacttagggtgtgtttgaggagaaggggattgaggagattgggaagatacgcaaaacgaggtgagctattagctcatcattaattgagtattaactattttaaatttcaaaaataaattaatatgattttttaaagcaactttcctatagaaatttttacaaaaaacgcaccgtttagtagtttggaaacgtgcgcacggaaaacgaaacaaacaaactcactctctcaccctctcgaacgctgccttattagatagtatgaatatgttctaatataaaactgttggtcaagtttggctgaatcttatcctagaaacatcaagtatttacatccaaccagatggaatcctttctccatgtggtgtcaattctattgttcagactttaaccaataataatttatatattattaaattttgtaaggttaactgccaaattgttagatttattttgtgggtttgaaatagttgtaggcttaactatttagtgccacgaaaaacgagatgaacaatgattcattatatattaactattataaacttgaaaaataaattctgtcattttttaaagtaacctctatatggaaagtttttgcacgaacacactatttagcgatttagaaagcatactcacggtaaacgagggattagcccacccaaacaccaccttagaactcaattcagccttagacatgttttgatgaaagccattttttatcctactatttttttggcaacttcaatagtattttttttaagagaaggcaaagaagattgtcttcaacagtattgtatggatgtttgattggatgctaaattttgctcacactaatacaaattctactataacaaatttggtagtgccaagattttagcactatcaatattttattttaattagtaggttaaaattaatatggggtatttgatagtgcaaattaaccttttattaatacaaattctactacaacaaatttggtagtgcaaaaatcttggcactaccatattgtaagatttggtactgcatttcattggtagaaattggggttcaaaccaaaatagccctcgaaatccattcttgaattaatagatttataaagcgcctatcttaaccagtgatttttttctcaggaacattacaagtcaatgggattatgaaaagtgcatcgtgcaaaatcttgtttttctccctggctcacgtgcaagtgcatatcaggtctcacgtagttccctgcacttctactatacttcagctgtgtacaacctcctcctctacagttttcactcgtactggagtacaactgttgcaagatgtgacaagacgccatgtgattcgattcaactgggggtgttaaatgttcagttgacagccaattcaagaagaatacgctctaattggcgcacttaattatgttgctactacctgtgcaaagtctgtgtgtacgagatggatgctgatcttgtgccaaaatctctgaaactgtgaacaaagagaatgctaattcattggtgtaccggtgattaacataactgttgctgagaaaatgtgttgaaggacactgaactaatcggtttttcagcggcgaaaattggctggtgcattgcatttgcatatgcaataacttttagagccaaatgtcgcaggcttgaatcttgggtaaaatgaattaaaatatttgaattctaattttattcataaagggggattcacacgaggaagaatgcccctctttttttgtcagaataaattgtggattaggacgtattagtggcgtgcaatatgtatctcatcacagacaataattctccgctagaatttgtgttcaccagctttcccacccaacaagagaacttgacaagtattgacccttttgatcgctgacttctaaatggcaagtagtcaactatggctcgtctaattcaattgctaccgcaatcattatgactattaaaaaccagtataggtgatggcgagagctcgagcaaaatctcgaacagggacttgtagatgcatataactctattgttattatagtacgaattcatgctaacataaaagaaatgctgatcagttctacaaactgtgtgctaaaatacaacctgtgctacaatatacaaatatataaactactatctctattcaaaagtgttaggagctgcctaagttagcacgtttaatactccctctgttccataatataagagattatagtgcgatgtgacaccagtcatatgaatataaacacctctctatcaacatgcgtgattctataatgtgtgatataccatcaaaattacttatattatggggcgatataatgaattttaccgtaatgtgacacattctagtattatgaatctagacacctctctgtccaaattcatagtactaagatgtgtctcatcccaccaaaatcccttatattatgggatgaagggagtagtatagccaactactagctctaattatatataaccaatttaatagtccattcatacaatagttaactataaatatatattacaccattaacatatggtcacacctttcatacgcacacaatattttagagtctgtgttgtgttacagctaactacaagtccgctttttttctctctcttctcttttcttctctacatatgcttatagctaattggtagcctgcaattgtactccgctattttttttttgaccggaattgtactccgctattaggcgctaggggttgggtaacctccatgactagctattagatggtgtataggttgctagactactttgggtgttacttatactgattataaaaacaacgataacgttgtaaaaaataacattaaggtgaaccataactattatgacattgaaaaagaaaaacaaccataagattaggatcgaccataagtgaataaaaaaaatctaagaatctctcctctccctatgttccattcactccccacctagtaaaatattgatttaatttggagtcttttttatttgtaaatgtgcccacatctattatccacgtagaactttaacaactgaccaactggcataggatgttcggcaataaacattggtattgcgctatgccgtaacaacttattaataacaaaaaaaatattgtttataaacttttatactcatatatgtgttgttagtaatttaaagcaaaggctgaaaatgaattacaatgaaaaacttaaaataaaccaacaaattaagtttcaatactcaactctgtttctttcttttttattgttcatttttttaggaaaaaaaagaaagatgctctctgtttgactctttctgtttgctaataatggcactacggaagtagggaacgaagcaggtaggaccagaaggcaggaagacgatagatctgtttgagattaagcctaagcaaattccacttaatgtagtaaattaatgtaagcttatattacacccttttctgttcgttcaagtgaactgcatcaccaatatatgtaacattcaaaaacttaggctctgtcattttccgctcgcacgtttttcaaactaccaaacggtacgttttttacaaaaagtttctttacaaaagttgcttaaaaaagtcaaattaatctatttttttaaaaaataactaatacttaattaatcacgcattaataaactgctcagttttccgtacggaggggatgggttcccaatccatcctatggaacacaaccttaaggctgtgtttggaactccaagttcccaacccctctccctcgttttccgcgcgcacgcttttcaaactgctaaacggtgtattttttgtaaaaagtttctatacaaaagttgcttaaaaaattcaaattaatccattttttaaaaagaaattagccgattcttaattaatcacgcgctaatggaccgctccgttttccgtgcggggagattgggttcccatccctactatccgaacacagcctaagggtgactgatatgtttactttactaattaagacatagtgactgatatgcttactttactaactaagagggctaaagatgttggtatcttaaaggggttatccctcatttagtagatgatggtttatcaatattgcaatatgtggatgatatcattgtttttttgagcatgatttacaacaagctaagaatctgaaactaactttatctgtttttgaaaaactgtctggcctgaaaattaattttcacaaaagtgaattattttattttggtcatgcaggggattattatgatcaatattctaatattttttgttgtaaattaggttccttacctgttaaatatctcggtattccaatgcattttagaaaacttagtaacaatgattggaaacttattgaacaaagaattgagaagaagtttagtagttggaaagcaaaacatatgtctgttggaggagattggttttgattaattctgtactttcgagtttagctatgtttatgatatccttttttgagattccgaaaagggttctttaaaaaattaattattatagatcacatttcttttggcaaggggatgataataagaaaaagtacatgcttgctagataggatattatttaccaacccaaagatcagagtggcttgagggttcataatctggaaatatagaacaaatgtcttttgagtgaatggttatttaagttaataaatgagcaaggggtttggcagaatttattgaagagaaaatatctttataataagtatataacccagattgataggagacagggtgactctcatttctggttaggtcttatgaaagttaagaatactttcttgaatatggattcttggatagtgaataatgaggaacaaacaagattttgggaagataaatggttaggtaatatggcctttaaagataagtatccttctttatatgctattgtcagaaggaagaattctttaattgctaccgtcatgagttctgttctacttaatgtattttcaggagagctttagttggtcagaatcttatattttggcatgatttgtgtgtttctattgtacatatccagttgaatcaatcttcggattgtttctcatggaattataatcagaatggtcggttctctgtaaggtcaatgtatctagctttgattaataactgctatattgggaggaataagataatttggaagcttaagattaaaggggtggtgttaacgaaagataatttagcaagacgaaactgaaatggtagctcaagatgtcgtttctgtatgaaaaatgagacaattaaccatctttttatcgattgccattacgcaaaattcatatggagagcagttcagttttattttggcttatacattcctactagcatttctcatattttttatgggtggttgttaggagaggacaggaagaaaagtaaacttatattgctgggagcttctacgatatgttgggctctatggttgtgtaggaatgacgtagtttttgataaataatcatatgttcatatatgtaggtaattttaggggaacatattggctccggttttggacacagttacaaaggtttgatgaagacggagagtttttaaagttgcatgcaaaaagcttgagtcgatggttatgcatttttttaccaattatggatggagattcacaaatagacatcattctccatatcttttattggttatttttatctttatgcgatggttgctattatttttagagtacaattgttttgagtgctagattgtaattaataatgggttatagctcttttgagtaaaagccgggatgttatatttcattattaaaaaaaatcaccaatatatgtactgctttaattccacttaatgtagtaaatttgcgcctaacttgactaaatgttcttcaggtggaagctctgaagtcgtatcaggtaatcctaacgatgaattattgactgaaactgacaagatgggagaggaagggaacagcttgcaagttgcaagcgcgaaggcgactacgatcacctcacaccagccgagaggcgtttacatggagcagaagcagatgattgataaacacaagtggccaacaagtcacacagggaatcgcatcaagtatttcaactaatacctggcactacgacatcccaaaaagttgggccccggttaaatcttgaatgttcttcagaggttttatgctggtatgctttctgtgctgctgacccatccagccatctgttagcctgtgatgctcctcctacctatatggtagtctttgaaactcatgaagataaagattaagctggcgcatcacaagactaaacgtttggttagtcttgggaagatctgaagatctgagtgtggtatttcgaaaatccaaaccatgtttaatacttggatgcatgtatgtgcttcatatgtgtccaaatttacatgtatgttagtgaatctagacaatagatataaagaaaaaaagtcttataatgtggaacacagggagtacggttttaaatatgaaatgaaatataagagagccgccatgttgaatgatgcaagttttgctatgtaacaagtaggttagatgcattagcagataacacgattaaaagggaaactaacaacttcctagatgattcatgcaagtttttttttacatgacaaaatgcttcgggggacggattttgtcatgtaaaaaaaacccctcaaatctcgtattgaaagatgtaacaaaacccaagctagaaaaatgcaagaactacagggtctagcatattgctcagagattcatgagaaacaatcagagaactttgaagactatgaatggatttagatacttcagaacaaatagcctcttcatttgtatttccatttcccagcaacaaaaagacaaagatacaacagtttctattaacatcattcaaaacctcgtaaaggtatatcactatacagccacagaattggaaaaacaatgaagctttgataattatcagagggaaaaatatcaaagattgcattgagataattgtcaattataagcaaccacagaacttgctcattttgtttcacacctatgttattctttgaacacgattaaaaaacttcctccgaatcaactaatcaatcatcccaaattactaatagctacagactaaggaaagactcgaaaaagatagtttttgaacatgaggtgatcagagaaatttgaagacacacccatacccttttctcgcagttatccctgtacccaatctcaagagaacaggggctaatggtccgggtcaaacataagaaaataccatccaagaacagcatgcacatagatgactatcaaacaaaagtaccttaagtcttggtaataacttacataatcatacaagaaataatatcagggaagcctatcacacaagatcattgcatgttgcgatctaagaggagaaaaagctgaaagccaaacaaaaattacccactggaattcaagttactccactccccagcatggactaaaaaccatattcaccagcttcatacattttaattagagcaggacaatccgagtacaaagtttataactgaaactaggaaaacacagcaagccagccagggttcagactcctagaatggaaaacatcttgcctctcaagattggcaagaagataattggagtaagaagctcagacagtaacacaaatgcagctcctagctcaaaatgtctgaactccgaacaatgatataatctggtaaagaagttcaggccacactactcttaagaaccagtggatgtgttgaactgaccaaggacacagtaacacatctactacaagttcacaacccctggccattctgtatgctcaacaagcttcctgaaaagaaaccaattgagtgaatattcttaacatccaccaagtctgaacccaaagtgtccgtctccggatcatataaccgcatcacccgcctcgtgtattgcccttcgaagttggctaagtgcacagttatgtagatgagtatcctgccatcatctagaatcagtgagggatgtgcatgagggaaaatgtgttcagtgtcccaggtatccatctccaaaacaatcctatacttcttctcccaaatctgcttctccgagtccatcagataccagaggtctacgtaggatttgatctccgcgcttcgataatccgtgtactgagctacaaccaatgcaccactcagctcggacaatgacagattctggtacaccgacatctcaaggggctcagggaggatctcatcgatgttgttcatctccggatgggtcgccattggtccctccaggtatgatatccacctctcggagcagagatcgaacagggccatgtgatccatctcgtaggattcgcgatgcgcgttcttgacgccattgggacggccatccagcaagaagtagacgacgccattgatgacgacgccgccgatggcgtccctccggacgcacatcggcagcgccttcttggccctccaccgcatatggtatctgctgctctcgtccagactcaagatctcgaacagctgttcggggaattgcttgttgtggcaatccgtgaggacgcggagcaccttgtaatcgccattgctgtccctgccgtacttgaaggagccgtcgaagtcgctcagagatcttccccggagggagtgcggcgtcgacagcggctccggcaggtggacggcggcgccggtgatcgggttgaggagggtggccctgcaggtgtagacctcggtgacgcagaggaggtcgaggttggtggtggggaggacgaggtgggtggcggcttggcgaatgcacttgaccacgctgccggagaggtccatgaggaggacgtcgacggaggggaacacgtcgaagtcgagcacgccgccggcgaggagcgggccgcggtggcgcgcggcgtgcgcggcgacgaacgtcgcgtcggtggtgagcgcccgccacgacctgcacacgccgcggaggcggcacacgtccttgggccccagccgcagcagcacctcgaacagcacgtccgccggcagcgccgcgcgccgccttcgccgccgccggcggcggagggggaagccgtcgtccccgcctcgccgctcaccttggcgcactggctccgcgacgccattgctgacaaacacacaccaaatcagcaagacactttactacctcgagcacataaatatctttaaaccgataatctttccgacttacgtgtagactattcttttatgataatcttctcaacttacgtgtagactatgtagatgtcgctggagaagtgatttgagatgatccaaaagtgcaacaacgataatcttatctggtccaaaatgaaagtattagctagagaattatccaaagtgaaattttaataatataaaatatggatcaaagtacaattaacttaaaaaaacaacgaaacggaagatataaaagaacagtcgatgcgacgacgacgacacagcgcgcgattctggtggcgaagaaatcaagaaccctagctagctagatagtacgaaggggaagattagcgggggttggtttcagatccgacgccgacgaactccggtggaaactaaccttcgtctacctcacctccggtgcggcggcgaagagaggaggggatctccttgcaatggtggcgatggtgggaggaggaggaggaggaggagcaccattatttgtgtccgtggaaagagtggggcagcaacaattcagccaatgagaaggctacaactcctgtgtgcatggtacgacgacgatggagtgatactgaagattttttttttttggaggttagttcaagaaaaacgtgggaatccaatatggatgtttgttttggaagaaaaaaaatgaaatgattattcaaatgcttggaaggacggtttgatagggactggtcgctggacgggatcggttttcgacaagcaggaaaccacggctgatgaagcctgttgtggtttttctttttctttttttttttggagaagtctactttacgtccctagaatatgggtactaggtaggttccaataatattcttcaaccgcaaaattggatagagcactgtcacgcccggaatttctatacaaaattccaaacgcttacatgtgtgttacatcctcgtccaggaatcagccgaggcacacaataacaaattgataatagagtactattaaacagctaattaatattcgcaaaatagcaaattattacagaggtggatagttcctctcaaagaataaaattctacgcagcggaaataaaacaaaatacagaacagctatggcgactccactccacaagcaacttaacccggacaaagcctagtcctccaaatcattaccttcactgaaatactcctcctctgatgaatgaatattgcaagaatgagcatatgacatactcaacaagccacacaacaaatatgcaagtgcacaggataacaaaggatggcatagtaaagctcatttgcataaataacatttattaaacctttgagagaataataaaacagttgaataattaatcagtattaaataaacaccatacaacacaactgtgttgcataggcccaacctcatctgaacaaccaaccccggttgtacaaatcaaacctccataccaggaatatatcattccaaaccaggagtcaaattaacacaatattatcattaatgagtagtgtgagactaatcacgaaaaatattgttaaactcacccataaccgcgggtacggctattcgaatagtttactctgatcagaggtgtaccactgtacccacaagacacagctccacaacatgtcaccatgcgccttagtaccaccacggtaccttggaaaggaactgtgacaatacctctcacactgtcacatcctgatttttgtttcaggatttataaattatttaataaattattattagaatttatattaaatgttcattaatttacaagtgaagttaaatgtgggaaataaaatttcctaaatataaagcatggatggatttaattttgattaaattctccatgattaattacactctctgaaattttctcagatgtttcggagctcaattcttaatttttaatcatacaaagagcatttcagtaattacccacatattaaattaatcattaaatggtctgtttttaatattgttaaatactttgggtgtccaagtatgttcaagatttttcttggaattatttgagcataggaagtatttttaacaattcaaagatcatttcattgattaatttaattggaaaagtaataataatcctcttcctagtcttgggccctttccagcccatctccctcttttgtctgcacggccgtgcagcccaagtcggcccagccgagcttcccccttctctttctttctttgctttgttttcagccagcccaagacgaaaagtctaatttgcgtccctcgacactgtttatcttctacctctagcagccgaactgagaccgatttggctcggtttttctcctccaaatctgacctttccccttgtgtttttctaaaattagttgaggggaaatattcctcttatcctcctctatctttatccccaaaaatcggagctaatcgttgagtatcttatccgaatcgaactcgttttcgagtttatctccaaaaccgagtttttgatttcccggatcgatttcttgcgggaggagtccgatctcttcaatccaaggctataaataggacccctagtcctcctctttcgtttgccccctctcccgtggtctcccgtgcctcgtagcgccgccgccacgtgctccaccccgccgtagtcgccggccgagctccatccgcgtcgcgccgctgcctccgccgtcgccgccggtcgccgtcaccaccgttaggtgcgcgggagggtggagaagcccggccgctatctccccgaagccgccgaccaccgcagccccgtcgccgccgtcgaccgaagccgcgccgacgctagacctcgtcgccggccgtcgtcgttcgtcgtttggttcgagggtgagtaccgttgggttcgtctcgtcgtcctctacgtgttcttgtcctccaaagtcgcagccgaccatccaatctccggcgaggtcgccatcttggttcggccattgatgaggtcatcatcatgacgtcatcatcgtttttttctttttcctgtttttctaatagattaaatcttcggaaattcataactaaatcatcgtaactcggttttgagtggttcaagttgctaaattcatctaaaatcaggatctacatgtttgtttactttatatgtactttttatttggtttttattagtctttttcttcgttttgcgtgttagtttgtcgtttccgtcgttgcgaaggttcgtgagtgcgccggaagtattcaagaagattaattgaagaccgattattgcaaggcaagtcacacagatcctaaacacaatcctttgagcatgttgatcctatatttaaattctctatttatttcaactgtgcatttattttcgaatgtcaccgggtggtgtgaaactattcctttgttatggccaatttgcattgattactttattccttgataccttgggttattataacttgactagttgagctttatatattggttcagctagatattagatatgattgcttagccatgcttagaaacattagcacactattgggataacttatgactcattgtttaatgatggtttaatcgtagctcacgatggttaatcatgttatgataattaattgataactaaaacttgacaatggtgggttgtgagcacatggttttgaaggtcatgctcatgataattaaggaccggttcacgagctactgttgtgaaacattaaccgtaccaaccacaagccagcatgggcaacggctttaccttctgtatagcatgattcattgcggggcaccagactgagaagcggcgagaagtccgtgggggtcgctggggagtccatgcctctggttatatttatagagggggtgattatgatccaggaatggtgcactgtggtgagttgtgttgtgcaaagggtattgtcacagcctctattcgggtactttccaggatcgcgacgcatggtagacatgatgaggaggctgtgtcttgtgggtacagtggtacacctctggccagagtaaaactattcgaatagccgtgcccgcggttatgggcgggttgagcaatgtttttcgtgattagtctcacacctctcacaataattatggatgttatatctggtaataatttgcttagctcctggtttggagttagatctgtacagccgggtatggttgttcaggatggttgggcctgtgcagcatgggtgtgctgttcagtgttgattaaaatttctgattaattactccactgttttactcctcttaaatgttttgctaaatgctgcttttgcaaatgagcctatattatgccatcctttggtatccttgtgcacttgcatatttgctgtgtggcttgttgagtatgtcatatgctcattcttgcaataatcaatcaacctcagttgaagaaaaaggatccagaaggagaagacgtttggcttataccccagttgagctgcctgtgggagtggagccggagcttcgctagaccgtaattccgctgcagttttcttttcttttgaaagtatgtaacactataaatagtgatgattctgtatattaaattgtcagtttgtgtacctcggctgattcctggacgaggattttatgcacaaataagttcggaaattactagtgaatttctgggcggcgtaacaattcaaagatcatttcattgattaatttaattggaaaagtaataataatcctcttcctagtcttgggccctttccagcccatctccctcttttgtctgcacggccgtgcagcccaagtcggcccagccgagcttcccccttctctttctttctttgctttgttttcagccagcccaagacgaaaagtctaatttgcctccctcgacactgtttatcttccacctctagcagccgaactgagaccgatttggctcggtttttctcctccaaatctgacctttccccttgtgtttttctaaaattagttgaggggaaatattcctcttatcctcctctatctttcccctcaagaatcggagcaaatggttgagtatcttgcccgaatcaaactcgttttcgagtttatctccaaaaccgagttttctcggatcgatttcttgcgggaggagtccgatctcttcaatccaaggctataaataggaccccctagttcccctctttcgtttgccccatctcccgtggtctcccgtgctccgtagagtcgccgccgcgcgcacctagttcgccgccgccgccggccgtcttcagccacgccgcgccgtcgcttgcgtcgtcgccgccgcttgccgccgccgccgttaggtgcgccgtggtgaggagaacctcggccgcccgtcccccttcgccgccgaccaccggagctccgccgtcgccgtcaagccgagccgccgccgccgtcctcttcgtcgccggccatcatcgttcgtcgtttgtcattgtggtgagtaccgttgggttcgcctcgtcgtcctctacgcgtaggtgtcctccaatcacccggccaaggtccctagctccggcgaggtcgccaaccctagccggcctccgtgggtgatgtcatgctgacatcatcatcctttcttttttttccttttttctaatagatgaaatcttcggaaaatcataactaaataaccatagatccgtttcaggtggttcaagttgctaaatttttctaaaataaagatctacatattaaaattgtccataaattgaattaaatttatttaagtctttttaaatggactttaattagatttaatcttgtaaaattcataataaattcatttgaagtcggaatgaggccgttcaagtctcataattcatctaaaattatgatctacatgtttgtttactttttatgtattgtttatttggtttttattagtctttttcttcgttttgcgtgttagcttgtcgtttccgtcgttgcgaaggttcgtgagtgcgtcggaagtgatcaagaaggttaattgaagatcgattattgcaaggcaagtcacacagatcctaaacacaatcctttgagcatgttgatcctatatttaaattctctatttatttcaactgtgcatttattttcgaatgtcaccgggtggtgtgaacctattcctttgttatggccaatttgcattgaatgccctattccttgataccttgggtaataaattgattagcttgaaccttatgtattggtttggttcagctaaaagttatatatataattgcttagcaatgcttagaaacattagctcactaatgggatgaatcatatatactacattattatttatggttatatttaatggtagctcacgatggttaatcgtgtgatgttaattaattgataattaaaacctggttaaggtgggttgtgagcatatggttttgatggttgtgctcatgacaattaaggaccggttcgcgagctactgttgtgagacattaaccgtaccaaccacaagccagcgtgggcaacggctttatcctttgtatagcatggttcattatagtgcgccagactgagaagtggcgagaagtccacgggggtcgctggggagtccatgccttgtttataagggggtgattatgatccaggaacggtgcactgttttgagttgtgttgtgcaaagggtattgtcacgatttccccctttgcaatgccgtggtggtatttcggggcatggcaacatgtgtggaatcgtgtcttgtgggtacagtggtacacctctggccagagtaaaactattcgaatagccgtgcccgcggttatgggcgggttgagcaatgtttttcgtgattagtctcacacctctcacaataattatggatgttatatctggtaataatttgtttagctcctggtttggagttagatctgtacagccgggtatggttgttcaggatggttgggcctgtgcagcatgggtgtgctgttcagtgttgattaaaatttctgattaattactccactgttttactcctcttaaatgttttgctaaatgctgcttttgcaaatgagcctatattatgccatcctttggtatccttgtgcacttgcatatttgctgtgtggcttgttgagtatgtcatatgctcattcttgcaataatcaatcaacctcagttgaagaaaaaggatccagaaggagaagacgtttggcttataccccagttgagctgcctgtgggagtggagccggagcttcgctagaccgtaattccgctgcagttttcttttcttttgaaagtatgtaacactattattgatggatttgtatattaaattgtcagtttgtgtacctcggctgattcctggacgaggattttatgcacaaattagttcggaaattattagtgaatttccgggcgtgacaagttggtcaaaaataaatgcacagttgaaataaatagagaatttaaatataggatcaacatgctcaaaggattgtgtttaggatctgtgtgacttgccttgcaataatcggtcttcaattaatcttcttgaatacttccggcgcactcacgaaccttcgcaacgacggaaacgacaaactaacaactcaccacagtgcaccgttcctggatcataatctccccctcaaaaccagaggcaatggactccccagcgacccccaccgacttctcgccgcttcacagtctggcaccctataatgaatcatgctatacaaaaggtaaagctgttgcccacgctggcttgtggttggcacggtaaatgtttcacaacagtagctcgcgaaccggtccttaattgtcatgagcacaaccatcaaaaccatatgctcacaacccacccttaatcaggttttaattatcaattaattaacaaaacacgattaaccatcgtgagctaccattaaatataaccataattaataatatagtatatatgattcatcccattaatgagcttatctttctaagcatggctaagcaattatacatatagcatttagctgaaccaattcaatatataaggtccaagctaatcaatttataacccataggaaaataaagtcatattcgaccattaattaattaggaaaggctcaccacccaatgacattcgaaaataatgcataagttgaaataaaacattagctttaaacgggttcaacatgctcaaagggttgtttgggatctgtgtgacttgccttgaacttccgcaaatgcttccgaaccttcctcaacgaaaacgctctcctccagaacgtcggaaactaaagcaaaagaacaaaatcaataaaacagtacaaaaacaagcataaacagtacatgtggatatttttaacatgtagatcttgattttagaaaaatttagcaacttgaaccactcgaatccgagttacggtgatttagttatgaatttccaaaatttaatcgattttcatctaataaagaaaactaaaaagaggtttatgacgtcatgatgacgtcatcaccgccggccatgacacgggtgatgtgaccaccggcgctagaggggtcggccgggctaacggaggacatctacgcgtagaggacgacgacgcgaactcaccggtgcaaaaaaaactatgacggacgacggcgaacggcggccggcgacgagctccaacggtgactcggctcgggtcggcggcggcggcggcgctctggcgaccggcgacggcggcgaagggacggctggggtgctcctcctccgtgcgcacccgacggcggcgaaaggaggcggcggcgacggctagggcgacgtggcggcggcgctacgggcgacggctcgacttgggacaagaggcaaacggaagaggacgactagggaatgctatttaaaggcttggattagggagatcggactccaaccgagaggaatcgaagacggaaaatcttcgggttagtttggagagataaactcgaaaacgagtttgattcggataaaatacgaagcaattagctccgattcttgggggaaaggatagaggacaacaaagggataaaaacccctcaaccaattggactcggagatggccggttggggtggattcggcggggaacggcggcggcttgggctcgggcaggccggccgaaggttgaagacaaccccgacatgtgggccccacatgtcggcggttgaaaggaggggggcgacggctaggcttgggccgtacggccacgcgcgagagaaagaggagttaggccgggaacagcctaggagaggatttttaagacttttccaattaaaataattcatgaaatgatgtttcatttattaaaaatacttcccttgctcataattttcagaaaaatctagaaaatagataaacaagcaaagtatttaatgaaattttatctagctcaattttatgttgaaatttttcctaaattattagagtttaacttgtaggcttttaaaataatttctaattgaggcgattttcagggcgtgacaatcactcaaaacatttaaaaccagtgtaaattaagttccctcgatggttttacctaatataccatccacgtagtatgttgacctggtcatcatccttaaaacagagctgcacgatgaggggtgcccaagaaccattcatctagggcaaaatttgctacgggacacttaaagattgtggtctttgctgtgagacacctgaagatcatgtatttgcttgtggacgctgtaaaaaaatactagtaattagctgctgacacttcttttattattttattattttgcatgaaaacggaaaggaggtccgatgcagcggcgaggcctgtcacggcgtcatcgataatctggccgtgagatttgcaaatttaagtgcgaaaatgataccgtagcgaacatcatcagtataaccatgaaatttttatcgaatctcaactttcagcaatgggcatacattcatattatttttttctcggtgggaggagtaccattccataattgtgtccgtgaaaagggtggggagcggcagcaattttaaccaatgagcaggatagaactactgtggatgggtactactagtagtagtacgacggattcttttgcaggcaactcatcaagaaagcgtggaatggaatccaggagtgggagatactctcttcgttccatttcaagtgtagctgtgattttccgtgttcaattttgatcgtctgttttatttaaaatatttttataaattagtatttttttgttatagatgataaaatatgaatagtacgacttatatttttaatttattttcaaatttttttcaaataagatatatgattaaagttgggcgtgaaaaaccatggctacacttaaaatgagacggagggtgtaaatatttgtgaaaaaaaaagaagcggtacaaatgcttaaaaggacggtgtttgagaaggactagcttcgctggagtggagggactgtggttttcgacatgcggagaaaccacggccgacggccgggcccgttgtgagggattgattggttttcgacatgcagagaaaccaccgctgacgggcctgttgtggttttgtggggggactggtcattattcagtggtcacttcatgctgtattcctacatagagtaagggcaggggcggatccaacgtgggtgcagggggactcgaggctccctacacccacaagacccatgaatatccccggagcacccccttcaaatttttcaccatgaataataaactaaaggtttctagatagctggaggtggaagaaactgtgtaattgaacccctccaatttttttgttcctagatccgcccctctaagggccactttgaatcgtagggtagaaaaaacgaaggaataggaaaaacacaggattatgacaggaattgaagtgtaaaacagatgattgcaaaacacaggaaaaacataggaatggttgtttgattggagcacaagaaaaacgcaagaatcagatgagagagatagactcaaaggaaattttccaagaggttgaagctcttgctaaatttcctccaaaatccacatgcaatgtgccattccataggaatttcataggatttagaaagcttcaatcctttgaatcaaagggccaaatagaaaaatttcttataggatttgaatcctatgaaattcctacataaatcctttgattcaaaggggccctaaagtttttctggtccgatgtacaggagtagtactacctccgtcctaaaataagtgcagctatgagtttccgcgcccaactttgatcgtccgtcttatttgaaattttttataattagtatttttattgttatgagatgataaaacatgaatagtactttactcgtgacttatgtttttaatttttttaaaaaaaattcaaataagacgaacagttaaagttgggcgtggaaaaccatggttgcacttattttgggacggagggagtactaatttactctctcgatctcatgaaaacctaaactagcatcggatgtaataagtactacctctgccttaaaatatagcaatttttagctataaatctagtcacatatgcgtccagatttgtagctaaaaatacttacattttaggacggagggagtagaacttttagtttagacagagatatattcagatttatgagatagaggaagtgctacgtttttaaaatatagttatttctagcatagtgacttattctgaaatagagctatttctacacgtattatcttctcttaaccaattgcacctattctccatttaatttcttccgtcatcttcttttctcaacaaatcacaaccttcatcctattatttctacctactaatttaatattgtgcccatcttggaacgaagaaagtaacttcgtatcaccgaaacttcatctttaaattaacgaccatagtaagaaattaaagtcgtcctcgttaatatgataatagtatcgtgaattgataggtaagagatggctgataggtatctaaggaataaaactaattgatttatgctatgttttttctaagaaaaatcaattatgggccttttgaatcacaggaatggaaaaacagaggaataggaaaaacgcaagattctgacaggaatatagctgtagaacagaagattgaaaaatacaggaaaaacacaagaacgaccgtttgattggaccttgattggaccataggaaaaacgaaggaatcaatttttctaagagattggacctcttgttaactttcctccaaaatctccgtaggattacccattacatagaaattttaaaggttagtataggattcaatcatttgtttcaaagggtttcataggaaatttttccgtaggattgaaacccttcaaattttctacacttttcttacaaatctaaggggcccttaagtccttccgataaaagttggaaagttaaaataaagctttttctaaaggagggagtacatgcagtataaattatttctatttttttctcttcatttcagtatccattttcctaactcccgtgggcatgtgaataaggaattcacctatggttgtaaatgataacttcattagtatatcgccagctaaaaagaatcaaagaactggttctgcacggacaacttcctttcttaaaaaaagaagcgttggaactcaatctgttcatactatttttttggtacaataactgatggctctacacacagtatgtacaatctgaaaatttcgaataaacatgtagtgttgcattacaaacaaatggattttgatattcttcaaatgtgtcaggcaattgagctaaagtgaacactttaaacttctggaaaatgaagagataaaaaaagggaaggcaaattatccaagaatgcgctcaacatgctgcgccactcgttttgcaaggcaatcagctgcttcctctgaagatgcctctgcatatacacgcaccacatcctcggtaccagatggccgcacgaaacatcgcccatgagagtaatttgctgcagggtacctcagaattcagtaacacttcaatttatgccaagaaaatcggatgtcggaaagaaacataagtattatatgctcagagaagatgttacttacatatctccccatctatcagttcctgcagcccattaggctggcaaacccttctttctgcatctgttgtaacaatagaatttcgatcttgaactttaacctgaaatcataattatattatgggagcctgatatgacagtgataactagaggcgtatcttagaaaagaagaggtaataactccaggtactttggcgaaaataccttcaattgtctactgggcagatcagtgtacaggtcacaccaattctgaaacgaccagcccttgtattgcaaaacagcctccaccaaaagcattccacttaaagcatctccaactgcctgattaattagctgacttgtggccaacaatctcatagcagcttggtgttgtgaagaacctaatgtgaaaaggtaaaaggaaagggggaaacatcacgacaaccataaacaaatagatccaacaatgcaaaagagaaaagaaatgctggaaaaatcatgaagagttcacctgcagcctttgaagaaaactcactggtcaaagattccagttgtgagacaaaatgatctgagaatagcactgtcccatgtccattggcttcaaagtagataccgatatcatattttagggcttccttgtgaagatatttcactccagttggagtgaatacaacttcgagaccaatgttcttgagaaaatctgttgatgcaccatttgcataagctgtttgaattacaccaaaacgtgtaggaagtacttcatttcctttattgtcttttccattgataatatctaattgctctctaataaacagcacgaatagtgataatatcttgtcaccatcaacgagatcaatcctagtgtcactagaggatacgatacggaaataaacaagccggtcagcgtcgccatcaaaacttgcacacctgaaagttagatcagaatggccaggtaagatcagtgacaactgacaagtagaaatttaaggagcaattaactgactcacctgaaaccgacatcttcaggaccaaagccaagaggaacaactttctccttctgaacaaagtctgcaccacaactctcattaagtatcccttctcccttccctgaattcctcacatgaatgtctaatccagagatttttgcctttatttcttcaagtttcaacccaccaatgccattagctccatccacaattagtctattgtttatcacatcagcttctttatcttttgggactaactccaataaacacctattgcaatatagttaaattatgcaaacaaatagatgccacatatttattacttacagtagcagagaattaaattcagaagaacctgaatgaatcaataacttgtgaaaaataatccgtctcagaagacttcagtcctttgtttttacttcggaccatccaatgcagctgtggagtggtgaggatccccatgtcaactgctactgcacctattaccgcatttactcccttcatgcatgagttccagaaaactattaagattgactcatgaacatgagacatacagtgaatacagaataaaggatgtaaattgatgtcataccttcaccgccacatcaaggaggtactctccagttggcctcgtgtctcttgccagcagcacttgtgccgagtggcttccaccaagtttaatatcctcatcttttgcaaactgaagcactatctacaattcaacaaacataaaagaaaactgagggtaagagtaggcagaaacaaaactatcaactatctgaacaaacttaacatctcaggcagaagatgccactcctcattagttccatagttcaatccaatgataatattgaggcactgaagttctgttttccaacagtatcaagtaccaattagcaccatcagagtctttaacattgatcaaggaatttaaacattactataattccaatatgctggaggtttcatgaggatgatgaccactcatttttcaaatgcaagaatgttcgacaatgctggagtgaactagatcttgaggatttaagataaaaactgttgatgtgttgttcacctaaagcagcgatggaggaaacctgaaacctttctaaagagaaacgattgaatataactaatttgctttggagatggtggagtgaaagaaacaaagtaaactcagaagaggaccaagtacaaccacaaggttttacgacttgcagtatattttaccctagaggatttgtttcagctctgaatgaactttgacaagacaatggtgccaatactgtcatctctagagctgtcagattcttgttagcaacatgttttgttcatgttagagacttaaagagtcatgcactgtcctagaaactgtgaagtgttatccatgctctagcacaatttggagcatcccaagaactcgagcatcacctgctctggttcaataaatttctagagtttgtaaggcctggtttagttcccaactttttcttcaaacttccaacttttctatcacatcaaaactttcctacacacataaacttccaacttttccgtcacatcgttccaatttcaatcaaacttccaattttggcgtgaactaaacacaccctaacttaggtgactggcgatctggctagctcatcctattaacaaaattagctctcatgttacaaaaatcaacacagaggaaagagattacgcgtcagacagtaacaaatcgaactgactagctagctgtagtacgcaatctaacaaggtcagggcatgtggtaagctgagatccagcgaaggagaggcaacctggaggagggcgtcggggttgggggcattggcgagtgcgtcggcgaacggctcccagtcctgcgacagcatcccgccgtccgcgtcgacgatcttgacgccgttgtcgcggaccgggttgtgcgaggctgtgatgaccacccccacggcggcgccgcccagcttggccgaccgcagcgccgccaccaccccggcgcggcacaccgcggggcccatggcggccccctccgcgcggaaccccgccgtcccgtacgagaacctcgcgccgtcgggcggcggcgggaagagggtggccgccgcgagcagcgcggcgcgctggtcgcctcccgccgcgagctcggccatggcgctgcgggtggatcgaaaccctctcgccgccgacggagaggtctgcggcgacctgctgagatctgggctcgccggagtcggagaaggggcgtagtagagggcgagctctgtagaggtgtacggtcggtatcgtccgttcgatttgaatcggatggctgtcaacctcccagagtgtactgtatatttctgaattttttagagaactgaaaaaacgttcgtacgatgttttttttttctccagaattttcagtagcatacattaacagtagcaaatttgagatgtttgcttgtcaggtacagtaaaccactaatatgatagagtttgaacttcagattttggattagagttttgcatcacagatatacatgcacagtgaacaatggttaataatgaacaatggggatttagtcaacgcaggggatttctaaagccattatgcatctaacataccctgcctcgtatgcctcctgtacaggaactggatcgagcagcactcttaccttgttcacaggcaggatggatggcttgcagggttgacgagtcctgggatcggtggcggcgtgagggactcgaagcaggttcaccttcgaggtcgggacgacgatggagcgacgcagcgacggcgccgacggggctgcgggctgcggcggcgtggagcgtcgatagggaaggcccgacctcgcctcctccagccgttgcgcggaatcacgccgtcgatggagggtaggccgatgatgcggctgttgcggcgtggatcagggatgcgacgtggatcggggatgcggctgcggcgtggagcgatggcgttggaggggatgcggcggcggcggcggcgacggcgttggcgtggatgggggcggcggcggttgagggggagcgaccgagtgggtatgcggcggcgtgaggcggataggggatcggcggtttcaggatgagagctttgttgggttgtggggttttggactatttgccactctcccggtggcgtgttttcaaatgccgctctcaaggttggcttcgctattttgtcatcggagagaagatttcttgatcgtgtgtcatttttgagcctgcaaagtattatttttgagcctgcaaagtgccacgtcacctgatccgagggcaaaataaccgtcttgcctatcttcttcctctagctcggggtctctctcctccaaccttcctccttgcgtgtgagctggtgacaccgccaccaccaccgccggaccgacctcctggcgctaggtggcgaatgacaaggtaggggaagcctcgaggttggacttgacacaaccgccgacatcggggagagtggaaaagagccgagaggagaaagaaggcgacgacggtgacgatgaagcaaggcaccggcgatgacacaaaagaaagagcaggggccgtggaggtaaggagcaagcaaaggagggagaagtgcgaggcggggagctcaccggagcccaataaccttggcgccctgggaaaggaaggggatgaaaaagaccggaggagaaatgaagaagaagggtaagatggttattttgtcattagatcgggtgacgtggcgccttgcgggctcaaaaatggcacacaagcaagaatcttctctccccgatggcaaaatagcgaattcattcgggagagtggcaaatagtccaaaaccccgagagctcgaggaaaagaaaagataggcgatcgaggcgttggatttcgcgatccaatagttcatattccatggggctgcttggatggggattcaagaccaccactacacttttttaagtagtagagatatatgttaaacaactgttaagagctaaacaataaattaaaatattgatatcactatacattataattgaaaaaaagtaagtacaatcctaccttagttttaggtaaaattcattcctttctctatgtttagccctagtctggttcgctatctcctacctcattcggcttgacctttatctctttggctcggctcacaagtggagcgtctagctagcactgtcagctgtctcctctcgttgcgctatagtagcgtcttcaacctctgaacgacagtcacgtaccttgtatgatgctagagctgatcctccccatcaaatatgccgaatctttctcgatctcccaaaattggttaagagcttttgatccactcaatttgctcttttcgtttcccaaaaatcagagagaatccacatgcaaatgtcacaacccaattccgcaaaactcgggataaaagcggcaaggaagctcgccgaccggccatcattagcagttagacggagattaaatccggcaaattaaagccgaattgaaagggaaaatcatggggaatgacaagggaggagtggggaatcgatttttgcaatcggttggaggatgaggaagcacacagggagacggatcgacgtggcaacgatgctagggtttggctgggagataagaatagatgtcggctggaggcgtgtgtcgaagtagaactagcaacggctgggctgagcctaagcatagctaggccaacggatagaggagagggagcaggccgaggcaaggagacaagtgaaaaaggacttttggccgaaggaggaaaggtccaaaaggagagagatggaggccatgagggagagagaaaagggagcgggaggaagaggccaaataagtcagctgagagacgacgacgtatgcaccaaaaaaagctaaggaagccttagattttttttttaatttggtatagatataatacgataatatgagtaaattgcgctcatggtgcgtgaagttgtgtgatgggtataaataggtacatcaactagcaaattgctcaattcgatacaataacttacctagtccgtgagaacttggggcaaaacggtcattgtaagcaaattgagctaatgtggcgcatattactattacacaaaatttagaccgacaaaatgtataattattatgcgctcgatatttttcagatttagattgaaaaaaagtgaaacaattgaaaaagcccaaccatggaaataaacttctaaaaacaagtttttggtgaaatggagtatttgagaatgaaaattaaaatgaatttttcaggagactatggcatggcagaaattttgttgctcctgaacatataagtgagcattatacagagttatacagatgataaaaaaaataaattcttgtcctgtacatgaaaatttctgcacaattaatttatttttttctttggattccaaataagatctctaaaacatagtaatacatgctatcagtttggaaccttacaataattttgtttgcatggataatttcggtgcgatttgtgatggactagtcaagttactttatcagaatgtgcaagttatagttgttgtagtacctattttgcacccaccacacaaatttatatactgcgagcacaatttactcttataatatatcactgtatttaactagataatctcacagcagtctcacccttctcctgtctgaactaacgccggatgtataccaactcaccaaagtgttgtttggtttgatgccaaaataaacagtatcaatctttggtaatatcgaattttagcattatcaatatttggtttggtagggtagaaatgtgtagagtgtatttggtttgtttttcctaatactggtaaagtgtactcggtcctaagttatttttagagttctccacatggctgaaaaattgacagaattaaataagataaatatgattggttgagatgaagaaataagtagagatactaaacagaagataattgtaattggttaagataagagagggagaaaaaaccaaattttaatataaatttaaatactaaatatttactatattacataataaaaggaagtatatcacattaattaacaatagagtaattaaaacttatactaaataaacttttttcctgtttttaaaaaagaaaaagaatctctccatacacacgcctgcccgttatatatgagcggcgcaagagactcatctctactattttaccatacaattcttttgcagtaacacttaaggtttcgtctagctacacacccaagtgctacctagaactcttcgccctgcgcgagagccccggaataaaagcccaggacgcagccgcccttttccacctgcgccacctcctcgcacgcccccgtcctcgggtcgtgcagccgcaccgccccctcgcaccccctcgcccacaccgccatcctcccgtcccccaccatcgccagcggctgcgccaccttctccctgcacaaccacctcacctcctcctccttcttcttcttcctcttcttgcttcgcccgccgcgcttcgcctccgctgccgccgccgggtggctcgtcggttcttcttcccacccgcggaggacgttcttgatcgggagcgagtgaagctttgtccatgtcgtggtgttcggcgttagggaccagaggttgatggtcctgccggggtagtcgtggtggacggcgacgaggcggccgccgagcgcggcgaggctgaggttggggcgctgcccgcggtggcgctggtcggcggggagcgggccgtccatcagcaccggcctccactgctccgtcgcgaggtcgaaccccgcgatggtgtcgcactcgacgccgcggtcgcgcggggcggaggtggtggccggggagaggaagtggaccaccccgccgacggtcgcgctgctccggctgatcccgtgctcgatcctcatcggcgggtggctccgcgtcgccctccactggcagccgccgccggcgccggtggtgatggtgaggacctcgcttgactgggacccgttggcggcggcgtagacgtggagcagcttgtgctcgccggtggcgggcaccttccccagcgtgtacccggaggagacgttcctccccgtcgccgccgagcagcccatcgagaggtcggtcaggtcgccggtggccacgtcgacgacgcggagcagcccgtcgccggggctcacgacgcagatcatgtcgccgccagcgcagaccctgaggcctggcctgctcagcccgtccatccgcctgacgacctcgccggagtacgcgtccatgagggtgatgtcggtgaggtcctcggcgatgtggtacaccgcgccgacgacgaacgcgtccccgccgccgccgccgccgcggtgagggcactgcatgtcccgccacgcgccgcaatacctctgcaacgcctcgtcgtcaacatgggccttctccgtcgtgcggtttctcggcggcgccgccattgatgacgccacagcgagctggtcgagacggcttatgaatctagttccggaggcgcactgattatgtagtacgagttatcgagggcaacggtggcgggcgcgcttaatatggcgcgagcgcttagttcgaatccgaatttaagcccgaacacaatttaatttggatccgatttatatgccgggacgcttagttcgaatccgaatttaagtccgaacacgatttaaattggatccgatttggagtgagatcaagactgacattggcacgttgtcgcgtgtaggaattgatttgagtgccttctgtagagcagagagtgaagagatgtactcctatatgagttttgtatatttcacgccagcacgttatttaattgagttcatactttttcttttgtttttttatgaaagattattggcttcaaatctttgcctaaaaaaattcggcttcatggactgtaggttttttttaagggaaagaccgtagggttctatatggtggaaatcacaaatatttcggggttactgatagaagcgaaattgtggacattacagaaatttcggttagaaaaaagttgaaatttgaacaaaattttgcttaattaaaaaaaattgaagagtggccaatcacttttggactgtacatatgctaattctgaatcttcagctcctggatccgttcttcctgctagcagaggagggctatctccccacaatcctaagttattaactagcattaacaaagtccaaaatttcagattgcatccaagcttctcaaacggccgtccctcaattggctttgtaaaaatgtctgaaaaacttgtccaaggaggagatgaggggtctgaactctgaacctgatgaacacctagtttcttgaggcaggtactgcacccaaacaatctcttcagagttcaaatcaccccccacaagcaccaggaaatcaaccattagatgatctgccatcatcagaacaacttgctcagtcggcgtccgaaaatgctctcacagaagtaaagagtggactgtgttttctgaattttaagcccagtgcaaaaccgtagcattcacattcagtatttcagatatcacaaaatccgtttgacagacaatcactaatggttgaattgaatgtgcttatgttgcattaattattgtaggctcttatctgactatctccaatgaaggcagtaaaaattcttgattcttttgtttgtgccaatagtttactctgcatgatttagattgagtgcaggctctaaagtctgaacttcagagcaattaagaacatagaactgtgccaacgggcggtaacctcatcaatgttcctcaagacaaaagacaaatcaagggacttcgaactttcgtcaacagctggatttgctcaattggtcaatttcttttggtgatattcatcctgaatctttcttatggctcttttcttcagtgtcagcttcaggccttcagcaattggcaatactgcaatagccaataggctgcaaacatcatttgttcagtgtcaccttcagcaatacgtatgtatagcttgagcagaactgcaaaattcaaaccaacctcacctcgaattttgaagctattttttttctaaataactttcatatcgaatcgcaaagataagatatttcatcaaactttccgaaaaatgggaaactcaccagatctttccgcgcgcgagcgcgaggctgatcccgcgaagccgccgcctttaaatagcctcctatccgttgctctcccatccccatcccctcctcgattcaaatcgtctcctctcttcccaaccaaaccctcctcccaaaccctagaaattccactcctctcccgcggatctcccatggcgtcggcggctggagatgggctccctccggggctcaagttcgagcccaaggacgacgagctcgtcgcccgcttcctcctcgcgcgcatccagggtaagcccctccctctccacggcgtcatcctcgacgctgatcccctctgcgcgccgccatggaggcttcttgcggatcatggcaggggcgatgaggcgttcttcttcgccgacgcgcgggccaagaatgggaaggggagccggcagaagcgcacggtcgagggcggagggtactggcaggggcagaggatgtgcgtcgatggtgagaggctggtcgtccccgatggcggcttggagatcgcgtggcgcaagtacgtcctcagctacttcgcggatggcgagaaggggagctcggggtgggtgatgcacgagtacgccatcacgacgccggctgacctcgcgtcgtcgacgatgcggctgtatcgcatccggttcagcggccacggcaagaagcgcaagagggaaccggaatctcagagcgcccaccacgacgacggtcgagcgcgctgcgccccacagatagccatgcccgagactgctctgctcgaggacagcgccccgccgccacagcccgttcttcctcctgctgcggtggtgaactctgtctctgatggcgccgttcctcctcctgcaccggtggtgaactgtgactctgacgtcaccgatgaggatgagttgcagagctttgtgcctgagttctccgcgcgcaacctgttcgtctctttgccacaaggaagccatgaagctgaagcggacgtagttggtggcgcattgccggcgcaatctatgtcgtcgtttgctgatgttggaggtccagagaacatggatgaccagagctgctccggcgtggtgtttgctaatctttccgacctgatcgtcttaccaccggtggaagccagtggcgcagcacccgcgccatcttgggcgtcatcgctggacaatcaaaacgacgaggcgcctgtgttctttgagtttccagagagcatggatgacattattggctgctttgacttcgccaccatggacgacccgagctgcactagcgccatatcagaggagccctttcttcctcctgcagcaatggtgaaccatgacgatggctatgcctctgacaacgccgatcaaggttgctccggcgccgttcctcttccttcagcagtggtggaccttcccaatgagactgacggcgccgatcaaagctgctccggcgtggtggacgattcatccatggtgtttgctaatattcacccgttggactctccagcagaaggtggccatgaagccgaagccggtgccgggggtggccgtgcagcaccagcgccgtcttgggtgtcatcgctggacaaccaaaacgacgaggcgccaatgttcttcgagcttccagagagcctggatgacatggttagctgctttgactttgccgccatggatggccagagctgcactagcgccgtgtcagagactgctctgatcgaggagctcgttcttcctcctgcagcaatggtgaaccatcacgatgactctgtctctgacatcgccgatcatggctgctccggcgccgctcctcctccttcagcagtggtggacctccccgatgactctgacggcgccgatcagagctgctccggcatggtggatgattcccttcccgggtactatgaggctgagctgaaggttccgcttgagtacgccgcgcgcaatccggtcgactctccctcaaaaggcggccatgaccatgaagccgaagtcgacgccagtggtggtgcagggtccatgatgtcatcgccggacaaggagaaggagcactcctcatcgggcgtcatggacgtggaggccactggttttggagttccagacagcatggatggcctgagctgcatcgacttcgccgagacgatggacgacctgagctgcatcgacttcaccattgatgatgagctgttcgatctatggagctagagatggattagcagtgacattgtcctttgtagaaataaagagattcttctgtatatgtagaagcagagatgtatttattagcaaagctgataatcattagctgttgataggttgaatcaaatgtgcttaagtagcactaattgtattatctgattatatctaatgaaagaagccaaattgttaattgattattcttttaattccaaaagtgtactatgaatgaactgtatttagttcagactgccaagtctgaacttcagaaaagttcagacatgagttaatcgattcttgatcatgtactgaaaatgtcaagtaattgtgaacacctaaatttgagtcacaaatcaatttaggaagctgatgtattaatctccagcagttaaagcataataggcaaacattatcgtcatcaagtaagttgcttcaagattgtcactccacatactaactctgccgtagcattgtattcagcctgtgtgattgatcgtgagacagcgtgagcaccaggagatatgaagttaggtacaaggcacagtacatttccattagttgatctggtgatgatcagaaaaatctgctctgtccgtgtttgaaaacgggctgaaaagagcttgactgcattctctgaattttgaactcagtgcaaagctgtgccttcagaagttcagagtactaacgcacatctgtaggagcttgtaaatactaacgcaccctgtcatcatcaagtattgtagcacaccagcaccagcagtagtctagtatagcttctgaaagtctgatgtctgaacatgacataaaagtggcaatctgtttggcaaatacctgtccggtgtggcagatcaatgagatacctcttttcatttatttgtgccagcatcagttcatcaccagatagcttatttgcttcaatgctcagaaaatacgacagcccacatatatccttgattgcaaactctgctgcaatttttctgaattcgtagaatatcagattgtccagatgagctagcaatacaaatccacatagtcaaggatataaatggtgacaatagattgatggaagatcaaagatacaagtatcagctttggatacactactgattcattaagaagaaatggatcattactgataaaatggctcatctgaaataagcaaggatttataggttaaaacaatagcctgctgctgacagacaatgttcagaacaagaagcagattgggaggcagtttctctgtgaaagtgaaacctattcctggagaggagcggttcttggtggtgagaattttagtacatgactattactcagctctttccctttctgttgacggatttgccaatgtttacattcacctatggatgtccattggacagctctgaaacgaatttcaaggtatctgaagtatcctgtggatattgggctgcatattagacagtcaagttcagggcttctacgacctgagctgcatcgacttcaccattgatgatgagctgttcgatctatggagctagagatggattagcagtgacattgtccttttgtagaaatagattcttctgtagatgtagaaatagagatgtataggagcttagtcctctaacggtcactgtatttattagcaggctaagatcattagttgttgataggttgaattgaatgtgcttaagtagcactaattattatctgattatctgcaataaaggcagtaaaattcttacttgattcttttttaattccaaaaatgaaccctgcacgagttggattgagttcagactctcaggtctgaagtttagaaaagttcaggcttgagttagttgatccttgttcatggactgtacatgtcaagtaattgcgaacacttgaatttcccaaaactcattttcattagcatccagtttaggcacagaagatgagcagagtacagttgtgtttg

SEQ ID NO: 9268 - DNA, 6162 bp, Oryza sativa
gggaggaggaggaggaggaggacgacgacgacgacgacgaataacattggtttttctgtgtaatatgcatgtaagtttggttgttatattctgcatcgatcatacatgttggggggattcgaacactcaaattggattccttttgttatgcaggggcgttatctccaatcctgtggtcacgtgtatgaggttctaaactgctaatctagctgcaattttgttgcacaatctcagttaccatgtgttttgtgctgctgcagcttgtgggcatatattctgccgtttatgcctggcgcattacatgtctcgaggacctgcaatcttattggttgcgtgatttcaatcctgcaccctggtaagggaaatgcagatgaaggtgagtattcaacctttaaagtcgtctacatttatgaattattaggacattctacgccttagcaactagctgacatgatgcattacaatttcatctagctggacagcaactagcttacatgatgcattgtataagttcatccagctgaacaagaaccaggggtaaagagtaattataccatcatgtgcatactgtacaattactctttccccctaccttgtgccttagcacgttcttctctcgcaatatttgcattgacccgttgagcaccaggggcgctcgtctcccgcacgtaccctactatttccccatttttgtactatatgctattgcttccaacttgtgtcctctattgctttaattcccatgtgatctgctgaacacgaactattttgggttaagaactttgccggctgccaagtgcaaaagtttcctttagaggcctgctatttcagtgtccacttccccttccttatttactgtgtggggtatcctctagttctcgttgtttcttgcctgaccatctccttcattctcactgttttttgtagttgacgggatcagatcggaagatgtggcttgtctcatttgccaggaacttttgtttgacccatcggtcctgaattgtggccatggtaagctcgaatttaggataaaatattgcagaactatgttattacttcttttctgttggaaaattgacattgttttatgaacagtttactgcatgccatgtttaacatctgtgggtggagaggaacttgaatgccaattttgtggagctccacatcccgctgaacctacagtatgctcaaatctgaagaactttctgaaacatcgcttcgaagaactgtataactcaaggcaagagaaaagttcaggtgttccaagcaggaaggaaggcactcgcaaagggaaaccttcagagatattgcatacccacgttggggtgggctgtgatggttgcggggtacgttcttattccaaacttagttattatggtttggctagatatgcaccagctgttaaatgcatttattgaggaggcagatgttcatgatccttgtctcaataaagcttaccatctaaattatatctaaaagcagcctgtttgaatggatagatctgtttgtttgtttgttttgcaggtcttcccaatccaagggagaagatactcatgcaaggagtgtgaggcaccaggtttagatctgtgcgagaaatgcttcatgacaggatctactgcagagggacgctttgatcagaagcatactgcagatcatgacatggaactggatgactcattccttttccccaacttagtggattacatggatgacctatatatcgatatgacttgagtgaggggtggacggtgctgaacatgaggcagtggaaatagggaatgagcggtgagagtagaggactaaccaccgttgaaggtgtaacttttgtctagaattcaatatgtagatttacaaatgctgcatctgcggtttaactctcggacaaatttattacaacgtttggtgctgtgagacccatgataatttgggcgtttgcacgagtccgtgtgcttttgttggattcgattgactgatcggagtcagacatccatgccgacctctatctacttgtaccgatgtagtgccaattatttttccatgccagaactactgcttaccgttgtcaatagggaatccaacacagtgtggcattatcaaaaatagcaatctgtgatctattggttaatggttggccactagtttaattctgcagttggctcaactatactattgggataatatgctttctcatccctggttgttagtttttacctcattctttcgtcctggtatatttaactattcgccacttctagatgtggcaattaactatttaccactggactcacatgccatagatacatgtggacccacatgtcattgagatatggatgataaatagttaaatactaaatctaaaagtggaaaatagttgtttccaagtgttcaagtcaatggaaaagaagccaagattccattcccctggctagtgttcaatgagaaagctgtaggacctgttgcgactaaaattagcactacatatcgactgttagggtgtgtttatagttcacaccaaaattaaaagtttggttgaaattggaacgatgtgacggaaaagttggaagtttatgttagaataattgggctaggcccaatttatcctattaaatctcaaaggcccataataagtgttaaggataataataccacctcaggatttaagcgaggaatatctcaacctaaatagggagttattggaggctccctgttgactagttgaggtgggggtcggaaggccccacgcgcgtgcgcgcgccgggccagggcgaggcgtggcgggcgtacgtcacgtcgctactcttttgcaaccacgaacccacgttcccacgactgcctccgcaacagcgcgtccacgatcctacgttcccacgactgcctccgcaacagcgcgtccacgatcctacgttcccatgactgccctgtgctgttctcgtctcctcgcttctaatcgcttgcgcgcacgagagatgcactgccctgtgttgttctcgcctcctcgcttctaatcgcttgcgcgcacgagagatgcacgactgcctctctcctgatagataaggaggcctgatagataaggaggtcgcgagtccgatcagaacgatccgcttgcttctttcccgggtgttagttcctcctcctccgcgcctgtgctgttctcgcctcctcgcttctgatcgcttgcgcgcacgagagatgcacgactgctcgtcctcgcccaccatgtctgcgcctggagccggcgctgctgcttctgctggaggagatggcgcgcctggagctggagccgccggaggtggtgcgccaggagctggagccggtgccgcgaacaacaacatcaacggaggcaattctgcctcacaatccagcggagggccattctgcctggagctggagccgccggaggtggtgcgccaggagctggagccggtgccgtgaacaacaacatcaacggaggcaattctgcctcacaatccagcggagggccattctcggggtatatccttctcctgttcctgttgttagcgctttactgctatgttcctgttcctgatattcatgatgcctttagcatgctactgcgttactactatgttcttgttcctgatattcatgatgcacatgatgcatttagtatgctactggttatgttacatgttgtcactagatcaccctacactgtttatgccatgattattgtcttaacattttggattaaaatatgccgatttattaccatatttccgacaatccaaaaacctgataggtcattttcggtagttggctttgctgctgcactaaaaccacatgcttttgatggttctaactataagagatggaaagcacgtgcactattgtggttgacagcgatgcagtgcttctatgtttcacggggcaaacgaagtgaaccacctctttctcctgaggaagaggctaagttcgaggcttcggattgcctgttccgttgagcattgatcagtgtactcgctgacaacatagtggacgtgtacatgcacatgccttccgggaaggacatgtgggatgcacttgaggccaagttcggagtttctgacgccggcagtgagctgtatgtcatggagcagttctatgactacaagatagtcgatgatcgttctgtagtagaacaagctcatgagattcagatgctggctaacgaacttgagaacaacaactgtgagttgccggacaagtttgtggcgagtggcattattgccaaattgccaccttcttggtcggactttgccacttctgtaaagcacaagagacaagagttcagtgtttctgatctcattggctctatgggtgttgaggagaaggcgatggcaaaggatgtccggggcaaaaaggttgagggaggttctagtgccaatatggtacagaagaagaaccctcatgcatcccacaacaacaagaaagtcaagcctaatgtcaaacccaaggctgcaaccaactttaagaagaaaggcaagggaaaggcaaagggagactactttgtgtgtggcaagtctgggcattgggccaaggactgtcctgagcgcaaagacaggaagtctgccaacatggtcattagcgagggcggaggaacatcggggtacggtaaaatattacctacagttctctctattttccaccacctgattggtgggtggatactggtgctaatattcatgtatgtgctgacatttctctgttttcttcttatcaggtcgggagaggttcctccttgttgatgggaaacgggtcgcttgtggctgttcatggtgttggtacggtcgatctgaagtttacttcgggaaaaaccgtgcagctgaagaacgtgcagcatgtcccttcaataaagaagaatcttgttagcggctctctattgtgtagagaaggttttagacttgtgtttgagtccaataaatgtgtcatatctaaatatgggacttttgttggaaaaggttatgacagcggaggcttgttccgcttttctttgaatgacatgtgtaataatcataatgctgtgaaccatattagcgagaatgatgagtctaatgtgtggcattcgcgactctgtcatgtgaatttcggttgtatgacgcgcttagctaacatgagtttaattccaaaattcactttggtcaaaggttccaagtgccatacttgtgttcaatcgaaacaacctcgcaagcctcataaggcatctgaggcgaggaatttggcacctctagaacttgttcattccgatttgtgcgaaatgaacggcgtgttgactaaagggggaaagaaatatttcatgacactgatagatgattgcactagattttgttatgtgtatctattgaaaacaaaggatgaagcattgcattactttaagacctataaagctgaggtagaaaccaacttgaaaggaaaatcaaacggttgaggtctgatagaggtggggagtatttttccaatgagtttgcatccttttgcgaagagtttggaattattcatgagaggacgcctccctattcaccccaatcaaatagggtggctgaaagaaagaaccgtactctaactgagatggtgaatgccatgttagacactgcggggctttccaaggaatggtggggtgaggcagttttgactgcgtgtcatgtcctgaataaaattccaatgaagcataaggaagtaacaccgttcgaggaatgggaaaggaagaaattaaatctctcatacctacgaacatggggctgtttggccaaggtaaatgtacctatagccaaaaagcggaaatttggaccaaatactgttgattgtgtgttccttggttatgctattcacagtgtgggttatagattcttaatagtaaactctggagtacccgacatgcatgttggtacaattattgagtccagagatgctacattctttgagaatgaatttcccatgaaacatacacctagcacctctagtcaagaaactgtcatgccccatgagcactttgcaccgatagaacacaatgatcaaatgcctgaggaaaatcctgaggaggacaacattgtagatactcgtaagagtaagagacaaagggttgcaaaatcctttggagatgactacattgtatacctcgtggatgacactccaagaaccatagaagaggcatattcatctcctgac

SEQ ID NO: 9269 - DNA, 14548 bp, Oryza sativa
cttgatgggtgaaagtatcccagatgctaggcttcctcccatcctctgcagctgccccttccacctactccaggtgttgttatgttacaaagttgcagacaaattcagatcttgaacagcaaagatcatgccatacaaacaggaaacgatacagaaattaaacagaaatccaaatccgatgcaacaaattcctgccaaatttcagggatatcgtatcgacatatgcactgtctgcacaaataataacatagttcatctgacaaagtgaggtgaaactggctaattaatctaggagtacttggcacctggaaagcggaggtgcctgcgccgaagacgaagccctcggggaagtcatgccgggtgagcgcggaagcgtctctcgccgcggcggcgagcaggaggaagacgacgacgatgaagggcgagggcacgagagctcgtgccccggccgccatggctgctggctcagctgctgtgcctagtgcctaatataaagatggcgaggttttgtcttctcctcactgtttgatgctgactggagagtggaaggagagacaagtggcactgaagtcgacgcttcttttttttttcttttgggatttttgtgtccctgtggggtgggccgtgggcctacgaactcgggctattttgcccggcccaatggaagatggggacaggcccaatgatggctgtgttcggaagacagtgttactaaccggaagcacggaaaactgagcggtccattagcgcgtgattaattaaggacgtgattacacagctagtggtagctggtttgtctaaactagctaccactccatacgtaagagacactatccacctatactttaaatacaattttctcttaaactacttatccgatctacgatccgattacaccgttgtgttcgtaacaattaaatcttaataacaagatcccacatgattatattttgatgaaaaattataaattacttttataatatatctaaattacttttagatttcactaaattacttcttagacatatgaaagtaaattcaataaagcctaaaagtagtttacatatattatagaaataacttataataaaaggaaagtaactttaatgaatgtcctttttcattgggcgtgactacacagctaaaaatgaaaggaaaaaacaatcgatgattttatagatagttacttttgaacaatgcaaaagttatttccaattaacattgaagttacttttaaaaactgttaaacttacgtgtgttgatatgtgccgattaaattttatttctagataaattcatatttttatccctacaacgaatttacttctaatgtcgtgacaaagttacttccgttttgttttaaggtacttttataatatatgtaaattacttttagactatattgaatttccttttatacgtctaagaagtaatttagtcaaatctaaaagtaacttttatatatatatatatatatatgataaaagtaactttcacatgtaataaaagtaatttacaaatataaattttttttcatcgtaatataatcatgtaagatcttattgtgaagatttaattgtaacgaacacaatgttgtaatcggattgtagatcggataagtaatttgagagaaaaaattataagaaagggaaaaaacatgcatgtgtaatgaaaacaggcatgcatatgtactggcttctccactccactgttcacacggttgggtctcgcgttaagactatcgcgagaggcctcgctagatagacctttttttgcaaaagtggatcaatatgacttttttaagtaatttctgtatagaaactttttataaaaaatacactgtttagtagtttagtagtttaaaaaacgtgtgtacggaaaataaagaagttgcaaaccaggggcaacgaacacagctggcatggtttaccacctggttactaaccatgactatctctcatggatcacaacctgagtgatactgaccgcgactgagttcttttctttgctttctaaacttgcctctttcatttttcagtacatactttttaaattactaaacggataaaaaaatatatatatacaaaaaattatattaatctattttcaagttttttttctaatacttaattaattatatattaataaatgaccacattttttttccgggaagtagagttcgagaagcttctggtaacagttgtttctttaggaagctttagtttctcagacaatatagattcttacctagattttaagaatatgtagctataaaatacagaaaatgaccatctagttgtttatcaaaatcttaaaaatttctctagtagagcctcagcttctcagaatcaagtcgtaaaaaaataaataataattatgtagatttctccggagtcacaatgtgatgtcggatttcttcggccggagctttgccgccgaggaggaagccatagtaccagcacatcgagctcatgacgtacttcgttctcgctggcgcggtgaagtcggcgctacacgggccgtatcgcatgtacaccgtagccggagagcaactcgaactcgtcgagcagcgaccacacaaagtaccccgcgttcgatccgctcctgcacccgtcggtcgccggcgaaccgagaaactaattaagcatactctagctgaagtccaaatgtatggaatatatattgcaatataatggctttctaatttccaatattgttccgaactatcatcccaaaaatattatttattgtacacgttccatctctcgaacgaacattccaaagagaaggtataccgtcctatggtttcttgacctatcgccctagtaattttatgacttacttataggatcaaagttaaaatattttataatttaaaacagaaagagtagctacgaagtacgtgctcagtacatgtccgtacatagacatggacttttttagaagaaaaaaacaaataaaaagataacgacagcaacagcgaaatgtcataggtggtacaaaggagtgtagtaactcaaattgatcaccatttctgaattccggctgcttctgatcgcttctcctctcttcgtgattctgtccaatttttccatttacattcatgcatccatcctttggacttctagtcgccttcttctagaaggccaggtcatttttatttttaaccaattgcgtggagaggtgaaactttccactttcgtgtagtaaaaaggaaaaaaaaagatattaccccttttatttctagggacaatttgaaccatccacataaattttacaaaatttatgatatgccaccctgacccatatgtcattgactcatgtgggtcctacgtgtcattgagatacgggtgacatatctcaaattttgtaaatatagggtggtatgtttccaacaaacccttatttctatatgacgttggttaattcatcatattaaaaacaaaaggaagtactagtactccctccgtattttaatgtaggcaaattttgctacaagacactatgatttcgtggttttagccgtaagacattgcccaaactcacttctaggagaaaacactccataacatggtaatttgacaatggacaccgcgctatataaaataataatttccggttgaggaggagagagaaatcacgtgaaatgtcaaaaatacccttgggcccacatgtcaactctccatctctcttcctctctttcttcctctctctctctctctcttctcccggtcatggcttgctcggcgacggcggtgacgcccgtagcgcgcgcggcctactcggcaccggtggccgatggaggacctcctcctccacacctgacaccggtggccgcctcaccgtgctcgacacgctcgccaacatcagtttgctcgtcctcgccggcggggatctcgagcgccctggggcgggcgcgccagacgaacgccgcgccacaagcacgtcgaagctcgtcgcgcggccacggaggtgcggtggcgacgtcgccggggctgaaagaaaaggtgcgcatgaccatgtcgccggggaccacggccggcgccgggggcgcgacggctacgtcgttgtactctcggagctagaacgccggcttgggtggcttgcgcgcatccagcagctagctcgcgggatcggcgacggtgtccatgaactgcacgacactggaggcatcgcacatggcgtggttgaggcgtattccgaggacgaatcctccgcagaggaggcgggtcacctgtccgtccatggatcaagtcaacacatgtggacatgtgccatgcatgccaccattgtcgatgcgtgaatgagcaaaaatgaagcttacctggatcagcagcaatggcgtgccgagcaccgcgggcggagccgtccacgtcgaattgaagagcagctgatccatgcacgggaacggcgccctgagcccgtgcggcccgtgctcgtcttcatgtggcccgtcgctgctgatgcgggtgctgctgcgtgaggcgctcgcgctcgagtgccacaagcagtgcctcggccgccgagtaggccgcgcgcactccgggcgtcgccgccatcgccgagcaagccatgaccgggagaagagagaaaggagggagagagatggagagctgacatgtgggtccaagggtatttttgatatttcacgcgatttctctctcctctccaaccggaaagtattattttaatcggcacggtgtccactggcaaattaccatgtttatggagtgttttccctcaaaagtgagtttgggcagtgtcttaggcctaaaaccacacataacgagtgtcctgtagtaaaatttgcctttaatgtatgacgccgttgactttttaaacaacgattgaccattcattttattcaaaattttttttgtgtaaatatgaaaatatttatgttatgctttaagaacatttgatgatgaatctagtcataataaaataaataataattacataaattttttgaataagacgaatggtcaaacgttagataaaaagtcaacggctttatacattaaaatacggaggtagtaataacttagccagcgttggccatcttcctgtactgtacgcctccgaatttctctggagtgatcacagtgtggcgtaggatttctccggccggagctcgccgccgcggaggaagccggagtaccatcgcgccgagttcttgaggtacctcgtcctcgccgcggcggtgaagtcgacgccgcacaggccaaaccgcaagcggtagccgtagaggaactcgaacatgtcgaacatcgaccacacgaagtatccccgcgtgttcgatccgttcctgcaccagcagaccaacaaagcccttgttcaattcctaactttttctttaaactttcaacttttccatcacatcaaaattttccttcatacataacttcatacataaacttctagtttttttcttcaaacttccaattttagtcaaacttttaattttaacgtgaaactaaacacacggaaactaattaagcaggaggggatcctctactgtacagcatatgtagtaggtgacccacatgtcagtggcacctactttaggtgcagtacagcacacaatttgcatccattaagcacaatctatcttaagtccgaactgagtagtacttccgctatatataatgagctgtttcagttttgtgctaagttaaagttctctaattttgactaagtttataaagaaatgcccactcagatttttaatagatgatgacattgaattttttaacatatgttcaaccatatgtctaattttgactaagcttttatcattaatgataaaaccaagtaaaaaattaaatatatattttcaataagatgaatgtttgagttaacggtatcatctgttaaaaaccaaaagaagttattaatatctttaataccaaataaatgtaccatcacgacatattttaatgtggattttaataaaattaatttgatgttataaatattggcatatttttctgttttagttatgtttaaagaagtttgtcttagaaaaaaactaaaatgtcttacaatatgaaatggtgggagtactcccttcatactagtaaaggaagtcgtttaggataatgtttaagtcaaaccctgggaatataaatcatgaataactctcaacttgttaagtttgaatatgtaaaaattatataaatagatttatcttaaaaatactttcataaaagtatacatatatcacttttcaataaatatttttatagaaataagaagtcaaagttgtgttttagagaccatgtcgctgtccaaaacgacttcctttacgagcacaaaggaagtaagtagctaggagagtgagcgcaccgtacggacaagtacagagcttccaggtagccctgcaagaacgccgatctgaagtcatcgttgtagttgatctttccgaagatatccggtgaatctgaataacctgaggcatcgaggaaaaaacataatttacatcgtactaagccagtgacaaatgccattttaaagctaccaagaactatggaagatggattttcatccctctagatgagacctgttcgtttcttacatgtcacctaaatagttgtaatttgctttttttaagaaaaattaacaacatagattaatatatatcatttacaagcatgtaagatcaaatttgatttcaacaagttagaaaaaaaagaataaattaaactaaaaatagtcatatattcacagttatattcattatttctgttaccaacttatagaagttaaatttttaacttacacgtttgtggatggtatatttcatattaatctatcttatcattttttaaaaaaagtttataactttttaggtgacatataagaaacgaaggaatatccccctaagggattaaaaacatttcccacgcagaattcggacctaccattttcgtggatcatgaccggggggttgccatactcgagtttcaggtgattcagcaccttgccaagagaccaagaatgacactgaatgttctcctgcaaagggagcatcgaaagaagaggtgttttactcatatctatttatgttaccacattaattaactactagtagtaaaacttataaatcaatggttgagatcacttccaaagcgaggatagtaaaatagtgtcagtagagagcaccatctcgaaaggactatcaagactgaatttctaatgccttgaaacattttcaaaaacaactctgctccactgcagctcgattatctatatattaccgtgtcgtcttctcctgcaccagatgaacagcaactgatcagctgatcggtttatggaactcaaaaaactaatgcagttgagagttgattgtagaaagccatggataatgcatgcaaagtttgactgattacttagcttgggaacatctggtgttcagagattcttaccttgaacacctgcgtcgatgtagtagtcccgtagtttctgctcattcgcgtcgatggattgcacaaagataacgtagtaatggttgatgccgatgaagtcgaacgatccgcgtattttctctgaatctgacgccgttatggatggcaaccgaacgcccacgcgactcctcatcaccggagggtagtctccgtgcaccaaaggatgcaaaaacctgcattttcagacggagatcagtacattgaaaaaacaggagaccgacaatttgttttctaagataattgatagaaatctgacctcgcaggctcgcacaagtggatatacacggtcagaagatacagaaatactccctcctttccaaattgatcatcatataatggaattcaaaatttcttaaattgaatatcatataaccacatagacatagatttcatcataacataattaatacaacatggaagaatgtctgcatattaaggtgtaattggtatggtattttaatcgatacatgcattgtgggagaatatgtgcatgatatcttgattgatgtgatttaaattatctttggtcttggtacataaacatatatgatgatcaatttaggaatgagggagtacttgactaacaaattgctgaaccgaataaagtttcatatcacaaacacttgttgttttatgcttgaaaagtccgggtataaacatcgttttaagtttgtcatgagtgtacttgggatttgagatagcaatgccgagaatttaagtactacggagtactccctccgttttaaaatgtttgacaccattgactttttagtacgtatttgaccgtttgtcttattaaaaattttgtgaaatatgtaaaactatatgtacattaaagtatatttaacaatgaatcaaatgatatgaaaagaataaataattatttaaattttttgaataagacgaatggtcaaacacgtactaaaaagtcaacggtgtcaaacattttgaaacggagggagtagtagttagtggagtagttagtcagtggagtagttagtatggcatggctagttggtactgcaatttaagtagcagtactaaccatccaatatggaattcattcatcctaatggcagcagctgcatcggctgttttgtcggtgtatggctcatgccaccgaaccatgagagtgatccctatctggcctccttgaattgcctgctgtcatgtccaattcaatgttcagggaccatttcttggtatgtgaaagacacaccaaagacataccaatgaacacagtatgaattcagtattgtgacctggtatttctgtctgtagatggacactgccgaggcatgagcgagcagcaggtggtgagccacgatgtacggctccgtcgaggagtcgccgccggtgcagttggtgccgaaggggtaggagcaccgccgcggcggccggtcgccggcgtcgaagccgccgatgggctcgatgttcggctggttaaaggtggcccagtgcttcaccctgtcaccgaagttcttgaagcacacctcggcataagccgagtaatcttctctgaaatataatatgtggcaacatgtcagggaattgactagtggttgtagtgacctgagtagcaccctatggtcctgagttcaaatcttcatagaagcgaatttcagattgagttatttgagggctaagttccctgcttgataggctaagttcctaatttaaaaaggttgcatatatccggttggatgtagagaccgggtaaaaaatacccatctctaaaaaaatataaaaaaaattttagggaattgcctgaattcatcaccatttggatcagcttgtgtcatgaaaacatttagattacataggattttgtggagtttctcagggtgcctacatgaatctggggctgagtattccaccatactcatcctgaagggcctgagggagatcaaaatggtagatggtgacatgaggttgtattcctgccaatacatgacagaagatgagtctaccgatcaagattcagctaggaataaatccaaggtgcagcaagtaatgtgtaccatgcattatcaattcgtctatcagattgttgtagtactccaagcccttggggttgatctctcctcttccatctaaaaacaatttgaaactcactgtcataagtgttcagaagatattcagtagtactaccttatttatgtgattatgtctacccggaataagacgaggccaagcaatggaaaatctgtacgcatccagccccatgtcatacataagctttacatcctcctgaaatcattgaaaataaaaaaaggtagattaaactgatcttttttatagattttgtgtcatatctgaacttatcactgaccttgtaatggtgatactgatctgctgagacatctgcattggagccgtcaggcatgtaccctgtaagcatcaatcatggacatattcattctagaacaatgcaactatatgcatgcgtaaataaagaacatacaagaaaaaaaatgttctagaataaaagcatgaggagaagattatcatctactccatttttttggaccttgattgatgaaggtgtcccaaatgctgggcttcctcccatcctctgcagctgccccttccacctactccaggtgtgacacatttgcaaaaacaaattcagttcttgaacagcattgctcacacggtagtaagcacatatcttggcatatacaaacatgatgcaatacggaaacacaaatccgatgcaacaaattccgccaaatttcagcagagcatgagcattgagcgtgagcaggatgagcatctgagcatgatgagcttctgacatgcatgatcgatggattttatgtatatatacctggaaagcggaggagcctgcgccgaagacgaagccctcggggaagtcatgccgggtgagcgcagaagcctctctcgccaccgcaccaagcaagaggaacacgacgacgatgaacagcgaggacacgagagcgagctctccggtcgccatggctctagctcgcagctggagcaaggctgctgttgtgcttaagtaggcgaggcttgctccttcttctttctttttttttctttctttttctttttctttttctttttttttttgagaagggctgcttgttcttatcatatcaaatctttagttttcgtgacccactaccaacagtgttgcgattcatcttaggccagagaaatgctgctacagtactacagtccctcgccatgcatgcgccgtcagatgtccaactggtgattccatccagccgtccacacggtcatcgctcatccctccatcccctcagtccactcaatcaccacaccagccaccgcctagacatcctcgtcttctcggcgccgccgccgcgctgtcttcctcctgcgatgctcggctggcgccgtcttcctcccgcggcgcccatagtcaatgaacgatgtttttaatatcctgcagtggttcactgcgcaatattgtcaatataactatagaagaatcaacctggatgtccctagatgaaactgtgaacatgagatccaaatggtgaaatggtgggcataagagcaaagtattgacatctcatgtagctcctcagagctctacctaattatgtcaagtattagcattaccgttacagtcaaccacaaaatcgaagagtacctcagtaatagaacagttaaatcgaagagtgtacttcagtaatagaactggcttcttttgcccaaaaagtactgcaaggtatacatgctttagctatgttattattgctgaaacatctttgcttgtcacaccaccggttactaatcagtttatatgtcacaccgctttgattgctcctttgggaaaaccagtttgccaagtgctaatttacacctaaagtttagtatctactacgtatgttctaagattaatattttacacttagattggtatctatgtgttaagtgttaacggtgtcaacactatgatatgctctagtttacaactaaagattagcgcctatgtaaattaccagaaggctatatatcaagctatatgaatctgaagcaccacataacaaagacatatgccattaattttgtcaaatgttgctggaatatatggtccagtagaaatagaacaataagttagataatggagatatgtttcactggactaacagttatccgatgcattttgagctttaaagagaatataagatggatggtattagtagtttactaacaaattgtgcttctatcatcttgtttcggcgcaaaaggaacagtacatgcagttggctacaatgagggcatgatgtgacaaacagttaatttgaggttccaaatatgaagatatcgatagttcagaaataattataagtatgtgctagaagagatcatgaacatgatatatgctattcttgccaaattcctatgcttcatctttcatagagctgcagagaccaaggcagtttgctcaaaagtaaaataaataatttaagatgcacaaggtttgtagatcaaacctttagtttttaaactgtattacaccaacagtgacaattaatccctatacacagatatgtacagttgtacactccgatatagagagatggagaagcaagttggttgaactgcacatatggttgtgtgaggctggagagtggagataatttggagaattttggattcagaggtgaaattaaagcttgttaatgaaaaccgatgtaaattctatatcttaaataagaaaagtgacagtactatggccccgttcgaatccatttaaaagtgtggattaaattttggattatagtggtatgcttttcaaactgttaaacggtgcgtttcgtgcgaaaactttctatatgaaagttgttctaaaatatcagattaatctatttttcaagtttgtaataattaaaactcaattagtcacacgttattaccacttcgttttgcgtgaaacacttaatctttatcttcatcttcagaagattcaaacaccacctatctatgcctagttgcctactggtgtattaaattaaggtattatttgtgtcactgttgggtggggcccattcaggttcgtttatttgcccggctcaatggaagatgggcatgggaaaaccttttcaaccaaaatttggcgcacactaaaaattagatgctaagcaaatccatttctcgaaaaaaaaagttttgttttttgtatcaagaagttggcacatactcgctccgtaaaaaaacattacctaacccctcctagtataacgaatctccgtccaaaaaaactaacctagatttgttgtactagtagatgggtcacatgaccatttataggttagtttttttttgacagagggagtaggatattagttccttttcacgtatcaattttgaaaataagttttgtgatagtttatttttaaaatttataaaattaataagtttaaaaagttaaaaaaaatctgcgtgggagccgtacgagcatcgaggtggcagagtttagtacagacaatataaaatcaaaccctagcatttcaatgcaaaattagtggagagtgaaaacgactaaaatgtctctcattattgaaaaaaatagtaattgtgataggtagataaatgatattgaaggaataatacttctcattttacgtgttgagggtaggtagaatggtaaaagttaatttcctgtagaataaaatttaaactttagaagtcgattttttttatagagggagtacaatgtttggtcaaacgattggcccttgccgtgcagtaggagtccgatgccggttgtggtttctgaatttagaaactgtaataggttttggaaatagaaagattgagttctgatgggattagaagttgacttctagtactaaatctatgtcggagattttttatataaaaaatagacgaagagggttagatgaacaataaaagttattaatatttgcctagggtttaatatattcatagatgagagaggagtgatttgtaaacaaacacacaccccctccaacaccaacggcctgaatttcgccgtccccttggcggcgcctcctctccttgcgagttcgcccaccgcctgcctgcgccgatcgatctccataggcgccgtcttcctgcggcttccgcccgggtgagcatcctgtccagttacgcaaacccaccccacttttgtctcggatttttgcttgcgttaaccctagcttctcttgatctagacctgtggaagaagctcttattaatattaacaagtacttcctccgtttcacaatgtaagactttctagcattgctcatatttatttagatgttaatgaatctagacatatacgtgtttagattcattaacatctatatgtatgtgggatgctagaaagtcttacattgtacagtttgtccgttccccccaaaagtttaggggagttattagccatgagtttgttcttgcatttactactacacttgattgaacttcgtaccagcgactgtcatcttccgagaagtactgtaaaaagaaaggagatattagcctgcttaatattaattgaagtgtttaattgcattttctttaatttgcagttgtgtaattgtattttctttctgatttgttttgccaggttctaccttggttaactatcaggaaagatgtcaaataggtcaaagttctggagattagcagcgctagtccctgaagtgcagtgtcctgaccagcccatctctccccgtcaaaaatttaaatacacggccattgtacttttcatctttgtgactgccagccaagttctattgtatgggatccaacaccaacctcgaaccattgagcctgatccattacattggctgcatctgattctggcgtcaagccgtagtactctcttgtcgcacgggatcgtcgctattctagtacctgaggttctggtgaagatctgggtgtacctaaagatcataactctcgataccagtgcacctgaaactggtgttcttatgtaagtgctgattctgctcacctccaattaatctaacggcaatatttgcatatggagagatggaatggtgacagtcgatctgctatgctttgatcggtttcataaagaaatgaatatt

SEQ ID NO: 9270 - DNA, 2352 bp, Oryza sativa
cacgtgtgcagcttgttgaatgcccatccatctacgaaatgctgccaaatccacatttcaagtggaagaaagcaccagttgttcaggtttggagaaagaaacctgaaaaggatggaatagcggagttagttctgtatgaagctaccgattgtttatctctgtttcaagaagctttaaggaacaatgaggtagtcactctctgcttctaatttgtaaatacttttaaagcataagaaattagcaccgcactaagcgttactatcaaaagttgaaaaatcttttacatacagatgagaactactttgcgcactaactggaactaaatcatcacaccatcctttagttgagagggaaatacccagatagtatgcagaaggcaaaagcacgttggcagttggtattactcatgaaaaacatagtaatgctgtctactccattgatttgacaatgttaaaatggtttatagattggtggctcacttcgaacaattggagataatgtttactgcatgtgaacctttttttatgcggaactgcctatgtattaacattctgtgtgtacccacatctgggagaacttttgtcctgcccataaaaccattagtcgataactcgttgccttacaaataccatgtattgtttgacctaaaaaatgtaataaaaatatttagagcttgtctcatcattgcatcaagtttggatactaacatagccatggtatatccttttatttggtgatagtgctgtgttctgttaattgtatttgagtgaaacttgtttattctatttatcttttctatcctagctcaagtataatgggaagacaattgcactgccattcaatatgtcagtcttcaagtgggccactgagacccgccgaattcttgaggatgctgaattaccagatactgtgagcttttataatatatatgggacatcttacgatactccatatgatgtttggtgagtatttttgaagactgctaattctaacatcatgttgtccttcatgctattcttagtaggcaaccaatctagattcccatttttatcggtttgcgactctcaacctacaaaccaagatataaatagttctaacagtatccattacttgagctaattatctgcttagccaatataattgaataggagtgcatggaaagcaggatccgttacagcctttggttgatagagttctcttttcttgttccaatgtccaattgtgtgcatacttcaagattcttgttgaatagttgataagttattaatctaataacagatttattccgatttgacttatctagctttggctttgctgtaattatgttctttctgatttgcagttacggctctgaaagctccccaattggagatctgtcagaagtgtgccacacaatggtgctgaacttaatcaattaaaaaatatcgtttttttagttgtgtgatattgcttttactaaaatattatgctggtccatcttattttcagccagtgtacacttatgtggatggagatggcacagttcctattgagtcaactatggtagtcgctcttttctgtcatataatagatttcagctgtctagtttcctttctgtaatgttattcaacaaaacccagttcacagtattactcttcattatgcatcgagaaattactcacttgttgcttaatgatttagtagggaagcagaacattacataatgcctttcataaactttggatgttaaacctagttggttatgactaaataaagtgccttaattttgtaaagcctagcaaacatacgatcacaagatcatcttcaatggcatatcaaacattcttttgaagacaaaaggcattgcactatgacccgcaatttagtggcactctttcggatttcttcagtactgcttgatcctcgagtgttttgaattcaagggcaactcgttcaatgctaagctttgccatttacagtttaggatacaccatacatacttttccttccccttaaactatagcatctgccatgttgcctcatgaaaacaatctgggacacaatatgtcattgtttttttgttgtcggcaggctgatggatttgcagccaaggaaagagttggcatcgaggccgaccaccgagggctgctttgcgacgagaatgtgtttgagcttctgaagaaatggctcggcgtgaaggaagaaagcacacggcggcgtcggttgtccaagtccaaagtgacagactttgcaccatcataatgaaagtactaatcaagtcaaggtgctcaaaacaaaaccatcacaatttcttcaaggcagccattattttttgggctcttcacttgaagagaagatgaatatagcgaaaca

SEQ ID NO: 9271 - DNA, 7035 bp, Oryza sativa
aaaaaggcgccgacttatatttggcagctcgggcgctgggctcggttggagggagccttgttgttgttgttgttgggcccccggcccatttagcccactcccaccccagcctccgcccccacccccgtgtgccgccgccttcgccgccgccgccgccgccgtcttccctctccgccttccgccgccgtcatgccacgccgcacctccaccgccccgcgacccgagacggaggcggcggcggcggtgtagatggtcgtggcgtggtggccgtcgcgaggatttcgggtgcagaggtatgggattctggtgtagtggattttgcagagtagattttggtaactaggagtacttcagaacaccatggcttttgcatttgcaagtacggtgacttgggtgccgcactgaatctatgattcgattttacctgttttggttggatggaggagaaccggagaagtggcgtttcgagtaagtttggcttctttatattactgtactcaattaaggctaaaaatataaataaataatcctttcagatagagtatgcacctcttatttagagtgtagttcaaggatgcagacagaaacatcactgccaagtgcattttcacagatggaataccttttagtataacatagcattagtcatttgtctcttttgcaatgactttctccttgatcctgttcaatgacccccgtttaaccttggggagttggggagtactttgtaaaatgcctttgcctaactacctttctgctcattttggactctgccagtcaccaagtagcatactagcatcactggaatcttgtgtgttagaagacgccatcctatggttagtctatttacgcacttttgccaatgatattatggcttccttgtaactgggactggcagatgccaggataagcactacaaggaggtctgctgaccgcaaactgtaaacccgaaaagctcaatctgcacttcttggctccagcatggtgtgctctgctgttcacttttatgtaattgtgtgtaattcttggatgtttgatatttccatcatgttcgttttagctcctgtggcactattggtcattcagaacttgaatgtgaaaaccaagcgaagagggatgaaaagggtctgataccatatgagtgcaaagaaatttttttacttagaacaagccgcttctgcaggtagtaggagtggattgttttttccttttgttgctttgcatgtcttgagcgacttatattgatgtcgattgggtgcaaatggttgggattaaggtaatgtattcactgcacaaggcaactgcacagtatgtttatttttctttccagttccgttctttcaaacaaactgaaaatggaaacttgattacatcctggtctggatttcattggtccatcagttcttactgaatctttggtcgccactgccggtggggtgccacactaaatttatgactcagttgaataccactcttaaacaagtgcagcagttactttccacatttcatctgcatatctttcattgtactcttctagtgcactagtgtataggttatgaattgggggttttactcaccagcagacagcagtctcctttacttgttggtaattttcttcatttctggcattgaataacagaaacttattggtttaatttactgagatagacatccagtactacaaaacagttaatagatctgccagcataacaatattgcaaatatactccttaatccttattctgcaaaattctgtctgaaggtttgcttgattgtttagttatgtttcttgcggtctgagctaattgcacctgcctcctcctcccaagcgctgtctcttgggactgctatttttaaagatgagcgcttgtgcttctaatttgtttcttgggactaaaactcttgctcaataatttaattcttgtggatttttttctcttttacaatgataatgacatttcatgtgatagtgctattatgctttgcaactgcaattttggctacgttgcatgttcaacactcaaacattcaacttgaaccttttatttgttcctttgatggtgtcttgtcataactatgtgctatataatcataatctgttttattttttttccctgtaggtcagcaggttgtctttgaaacatttactcaggtgatgttgccagttgccacactattatataccagtggaacaccaaaaggagtgatgcttatctgctgaaatctcttgcatctggtcgaaagagcagtaacattcacttcttttacctgaaagtaatattgaaatataaactgtacttttcttgatgtgatttcttgtcatgtgaacatcagaacccctgttcctcttctatccaaattaagttctatgcagttatgtttgtagatgaaaactttctgggatagtattagcagtacctggtgatagtttcctaagcatgcttccaccatggcatgtgtatgaacgtgttatcaagtacttcatcttagcttatggaattcaacatgtttacatgattgtcaagtatctgaaggtaacatttcaggcatcgtcatagttagtaccatcaagggtcttatgatgtcattaaggatttattgcgaccaattacatgacctaatgctgtactattctttagcagcttactgaacgctgcaaagttgagtttgatatattataagcaaatgtaacaatcgtcaggtccagaccttctaatctactttagggaaacccaagtgtcatacttgatatgatagggttccttccctttacagtattctcctttctggtcactattttctatttcttatgaagatgctgatgttgttcaggtgttttgacttctactctattgataggaagttttgcaacggtaccaacctcaatacactgtatcagtaccactggtctatgagactctctacaggttagttcttctattacgatgaactgcttccatattgtattatacatgaaattgtatcagagatgtaacatttacttcagttcactagtatcctcaatgtggcaccatgcaagatgcataatctatattttatccatctattgtttctgttcaatggcataagctctaactaattttataggaagcacccaatcagtgtaggcaacattcttttttgtccttgatgctggcattttcttgcaaactggtaatgtttaatgattgctcctttatccattttctgatgtttcttctccactttgtaagtctcaattcagagacacatatcttccagttcaaatgctcgaaaattggctgctcttgcacttatcaagatacgtttgcataatctgtctcatatatcctctgtctcatatatgatgaccttatgatccagaaatttctatcccatgaattctacttgtaggtgtagcatgattctttaccactaagatccaactttcttctaattatctccttctcttccattggaaagggaatagtcctattgagcaatcccgtcaaaccatcatttattgtgcatatggtcaattggctattggcaagaattgttgctgcacttctgtggtctttgcataatctggcaaagaagttagtattcaagaaaatccattctgcaattgggattccaaaggtacttttacttatccccatgcacctgtttctgtgtgacattgataatccttgtgtaagtacttagtgtgaagggagtttccttaatgttgattacaaatataaactctgggttctgtggtaacttgctgtctggtattagcggtggtggaagtcttccaatgcatgtggacaattttttgagttagatgtatatcatttaataaagttctttgttaaatattcatgccttcattagtattttgttctttgatacatggtgtgcttccatagaaacgggaaaaaaaggtcacaattttatgtattttaaagcatattcttctcagtggcaatttcgtccttaaacaatgaattcatatatcattcatagtctgtccttgcaaatttactcaccataaatggaaacaaattcttctgagaggccattttccttcaacaatgaacattgatattattaacatcctctccttggtagatttactcatcatcaaacatttgatcttactacactagtagacttgtatctggaagcatacatggcctgtggaatgcataaagaagggagtccctattgtattcctggcatatttgcattacttctcatcatttatactattttctatgtatagcttatgataatactaagatatgtagttcatgccacattgcaggttcttggcacagttggtacccagtaaagcacacggaaatcaaggtagtgagcatagagaatagtgaggttctcgcagatggttcaaagggggttgtgaaagtcagaggacctcaagtgatgaagggatattacaaggatcattttttccagtttactgatgccaagttttaactataaattaaattgagctgtaaacagttgtttgggtcaaggtgaacacatttttgggtagaaatgcacatcagattatatatcttggtaaagacataatgctgcaggtcacagataacacttgcttattgtaaacatcatagttgtagcaatgatgaggttctagcaatggctaaaagaaagcctattcttgatgggaagccaaaggataagttttggaactttgtatgtaatgagctgagaactatttctctcctgtttcttatgagctctgatttctctagcctaatagtctagagaacttttgctgattttatgatgggtcacaactcacaatcacattggagttaaatctatcacctgagacatgattttttaaacattgaaggacagagtaggactgtgtaatttgttgttgatatgtgcgaattaaaaaccttacgagttacgagtctcgtactcccagtctcccataccaatacagggttttaggtatggtggcatgtcgtagtcggagaggaagggtgtgtagtttatatatgttgatttaattagagccatgttgaatgttttgttaatatataaatgccaggatgatgggttgctccttccaaatcagccctattctaattgttaacgaatcatttacggtaagttttcacctagtaattatatagcttttcttgctatcaagtttgacagtacttttttttttttgtattcaggtggataatggtttgctaacatccactttgaaaataaggagggacaaggtaacagccaaatatcatagagagatcgaagcattgtacaagtggtatggagtgggcttgagtaaaacattacaagtggtatggtgtgggcatgagtattttcgtttgttcttgccttaggggacatctctgatctctcgagtagaagtacagcagctagttcagcaatcagcatacaataatgcaaccatttttgtattattgtatgccagtttcgctcagcaaatgaaacagtagatcacttgtttgtgtcttgtccactggctagatttgcttgcaatgtgattgcaagtgcttttggacttgaaaagatcaatagcattcaacacttgttggaagcttggttaaatgaatttgacaaaaagaagaaacaactagttgcagtggggattgcagccacactgtgggcaatatgggaagttagaaataaagcatgttttgagcataagatgatctcacatccaatagaattgatatactatatgtgtcactggatttcatcctggtcaattttgcagaggtcggtggaaggccaaagaagtctacaatgtgggttcgacacttcgacttgctaaagcaggttgcaaaagagattatataattccaagtatggctggaactttgatagaagacggctggaggtgtgagacaaatcagcaaaggaaggaaacagggaatcgactggaggaactgaagcagaggaagagacaggtttttgtggctggaagaacaaagaatgggaagatcatgggatcaagtagttttagttgttcttttcgtctagttaaaaactgtactagctcgtctccttctttctgtttggtaattgctgtatgctggtgtggagatcacacataatggagggatgacactatttgttgtgtgatttgcccatggtccattaatgctcttctgtttcaaaaataatactccctttgtttcaggttatatgttttgactttggtcaaagtcaaactactctaagtttgactaattttgtagaaaaaagtagtaatatttttaacccaagactaatatattatgaaaatttattcaattatagatttaatgaaactatgttggtgttgtaaatattactattttttttatagagttagtcaacttagagtagtttaacatcttataacctgaaacggagggagtaataacaataataatgcaaccattttaggagtcacttcttcaaaccaggacaaggcacttcgcagcaagataaattaactatctgcgactcttacaagtgacacttaagaatttgttgttggactcacatattatagataaatgagggtccacatgtcatagacaaatgagagtccacatgttatagactacgagtgacaaatccttaattgccacatcttataaaagtttaaaaagtggcaaatatttataaagtgatggaaactcctgtgcatcaaactggagcttgggcttgacaatccaacgcgaacaaaactagtggttcggcccaggcgcagaatggaatgggccggcccaagtggcttctgcaatggggacccacatgtcctcctcccgtctctcctcctcagtcctcacgcctccaactccaagcgccgcctcctcccccaccccaagcaaagcccccatcgccggagaagcggaggtgagcccgtcgccggctgctgcgggaggatcatggcagggagggaggaagaccccgtcgcgcctgagcgagcggaggccgccatcgtcgccggcggcgtcatggcgagcagggaggagaaccccgccccccgtgaccgtcccattcctg

SEQ ID NO: 9272 - DNA, 43766 bp, Oryza sativa
  unsure (1)..(43766): unsure at all n locations
cacactgtacatagtaaaacattttcagttacagcacaagtgtcaagtgtgtgctgcagatagaagcctactactaccttgaggtagtagcagccaacgaggagacctccttgttggtggaggctggctcatcgtctccggcgccggcaactcgcgtcgcggcctcctcgtccgtcgcgccggcgacctgcgccgtctcctccgccaccttggagcccctgcttgcaagagttttctcagtgatgagtagcgatatcgtcacagctgattgctactccctccatcccaaaataaatcgatgtcttatgtgtaggtttgtggccagaaaataatttattttaggatgaatgaagtacgtatcttgaggaattttacttcctttggaaaagtatcttgagatacctaaattttatactacattttttatacttttagatatttagtacttattagagataccaaattttaactaaaaaatatcgtatctctaggtaccttcttaaggatggtaaaaaatttttgacgtaagttaaggatggtaaaattacacatgtatcttatgtgcatgttcagaaggaatggcagatgaagaatgaaggcttacttgtatgagtagatgacaaggccagctgccgtgccagcaaaagcaacgaaatacatccaatcaacctgcaaatgctcaaaatttgattaaacaagatcaatttgaattttaagatttagtattggcatgactgtatggggggaggaattgttgttcagagaccttctcatggtaagcgaagatacggattagaacagcccacatgtccgaggtcaaaagggagagattgagcatagttgcaccacatatctgaaattattggagtaaatttagtaacatgcaatattcagaaatgctgtgaattttcccacaatcatggcctgtaccttcaatataatcggtactgttgagtagaacaagaacattgctaccgcaaatccaatgaaaggtagaatctgaagaaaaaaaaagggtccatgaatacgaagcatggcttaacttgacttactgcctacgctcacgaccaacaaccnanttantntncntntncnantnctncntntnanntntcangnnactngctnggngcctttcaacaccccaaccccaaccccaaccacgcgcaacacctctaagacgacaacttagaacctcccataagagaaaacccgtgggacaaaaccaaacccattaaacaaacttttttttttaaacttttcccacaatctgagaaaagaattgactctgtgcgccaccccattactcaaatgtgnncctcgagtaccatgtatgaaagggaggagatcgacttaccgcaccagcattccattcggttgaccgaagttcttgtcgttcaagtatgcttctgtagcagtgttaaggaaatgggatatagaagcatattttcttgctatgccaaatataaatcaggtaatacaaagtacaaaatagttacagatgggttggtagaaacatgtcccagtttcactggttcattgttttggtctcgttgctattcaagtaatttcccttgttttaacttctagtaacatggagaggcattcttataatattcttagtttaatcaaactacagtggaaacaagtcatcacttaactaatccaaaggatacatttgtataccacttataactgctccaaaaacgcccagcattgccatcacctcaattctgctgcttttcttgacaaagtactcctgaaatgttgtaggcaaaacatgcaaggttcttcatgtgcattacctaatttagttttatgcttaatccgatgggctgtcaaggctaatatttgaagtggtaattatcatatctcaaagaacatgttttttgccgggtcggccgaaagatttggtcgaccaatttcattaaaatctcaaagaacatgtgaaaaatctagaactgggagttctcccctgtgttctgaaaagaaatggaaaataaatagtaataaacgaactatagatttgctattacctcggtaacattactgacagcataaagcatggccccagcaatgacaaacaaatcacctttcaaggggttgggtccttctgcaagacactccattgtgtaaggtcaacatgatttacttgttattcttttactgacaagtgcaaaatactgtattttctttataatctatttgccacatttcagaagagctttgtgcctttgtgctgagaatcaagtacacattgcaaagactacatgaaacagagcaatgcagcaccaaaataaaacgcagaaactgaacagataacggcatgccaagcagatgtatataagtgtataattgtgtgagttgagtaaactttcattggaatcatgttcttacttgctctatcagaggcatggacatcagaaaatactaccaatataatgccagccacacaaatcacaacaccgatgaacttcctcaatccatactttgtcttcaagaagacccaagtgaggagaatgacacacgggatcgcccagcaatcgatgagcatcacactcgttaaggatgtatactgataagccttcacaactgtgtgaacaaatacaagtcaagtttagaatcttcacatgaagttactaactaaaaagaagctccaatctcagtaagaaattcagattacatcattttcactaatggtagacatttaccaatatagttagcttctacatcaacgatgccaaggatcaagaagtagtaccatttaatctgcagaaacaaaatgcagaaaacatttcaagctccatgctgataaaaatattcagattgctgcattgcaatataataccgtggtgacaacgaaacagcctcagaaacttttttttttagagaagggtattttttacccggcctctacaaccaatcggatatatgcagcctttttaaattaggaacttagcctatcaaacagcctcagcaacttgcgaagaacataatcagaataagcataaatatgtttggtaacaaagtgacttgtcattggtcctggcttggggataagatacgctaaatacgcaacgtacatgcatcaatcatacgaaaaaaagaggaacagcacaactcaaaataatggtcctagggaataataatctgaaggtcaggccagggcacaggacatgtgttgttaaacaccataatagcttattgacctttggtttcaccatttccagtctccagatatcaaaatcataaccgaattttgatctaaaaaatagccaaaattgcatccaaacatttcttttcagggcaaaacgcagcaggcagacataccgtcaggtgttgccttctgtagatcagtatcccaccataaacaagcgcaagaaggacgtaattcagcagagactgcgaagttggcgcgttgacgcctgaaaacaatgcgcaggattcaatctcataatcagaacttcgtaacccaccattcacaactctctatatctgaacatggcatggtttgtaacaacataataattttcaaagattatgaaattcgaaacatggtcattcatctaccaagaaaatgaaaaaaaaaagaaccaaaatgaccacgtataatacaagccaattgcacgaatacattctgaaccaaaagctcatcaaaactgaaactgcaactcatcaagaacccaactattttcagagttcagattgcatgaatacattctgaaccaaaagctcatcaaaactaaaactgcaactcatcaagaacccaactattttcagatttcagattgcatgaatacattctgaaccaaaagctcatcaaaactgaaactgcaactcatcaagaacccagctattttcagagttcagatttcagatagatcgataccatcataccaacatccagttgttagtttcaaacaaaagccctatcgagcgaatacgcgaacatcatgcggcggcggcggcaagccgtacctcggcgggcgagctcggaggaggagaagccggtggaggtgatgagcagcgagacgaactgccccagcgcgagccccacgaacacctcccgccgcagccacctcgccgccgccggcgccattgctccctctccctctcctcccctcggagacttctcctcgccgtggacagtggacaccaacgtcgccgtcgtcctctccactggactcacgccaagccaacaagctaatgactttccaaaacaaaaatgcttaactacttggcctatatatacggcgcttcgttgccgtcgttgcagtgtgggccccgccgccgctaagccggccggtgtaggctaattgctcattttaattactgttccttctatgacggcattaacttttttaattaccattcgtcttattaaaaaattatgtaataatatcatttattttattttaacttgatttatcatcaaatattctttaagcaatggtataaatatttttatatttaaaaaaaatttaaataacacaaatgatcaaacgttatagtaaaaaaaaaataacatcgtcgtacattttttttaaatggagggagtatctttttcgctgcccccttgcattgtgcagctgtgtaaactgtaaagcaagatatttttccatgcatttgatttgagccaaagacatactatatttattttttaatgtataacgttgttgattttttaatcaacatttgactatttatcttattcaaaatccttgtgcaaatataaaaatatttaaatcatgcttaaaaaatatttgataataaattaagtcacaataaaaataaataatagttactttcttttgaataaggcgaatgatcgaacgtatctcaaaaggtcaatgacgtcatacattaaaaaataaatgaagtatcaaatatgaaccgaatttgaagtgaattcaaactttttttcgcatttcagaaacaggctgatcatgtcatgccagcgctcaggtttaagctttgaacggggtggattgggttttggcagaagactctctagctctcaccatcaacctggattgggtttttttcttaattaaattgatatcaaattctcctttttatatcttacagtattttaaaactttcttatagcattgtcacaactcacaagatatagatttatatgctataatgggaagctattgctatctaaagtgagatcatggcatcatctacatgtttaattaggcccttaattaaggtgatattgttatgcacgtatgctcttgtgtaccgtgtgattatccaaggaggaaataatcttcagccacagaagatttttgagaaagaaaaattgtaagttagtatatctatttcaaggaaccaaatagttgactttgtgctagttgtgcattatttattacaacatttctatggacatttgcttgttcttgcaagtcaacaaattaaaaaggagcaaaaaagaaatggacattgcaatcagttcgttgtatcttggaataggactagtgcatgacggccactctcatgtgacatcacactcatgtatatatgtgttcagtcaacttgtgataatatcatttccgaaaagataagatgtgattataatttataacctctcttaagtctctagaacatagctgtaaacaagaacatccttttttctagtttgcactagttaaagtaattataaagtttgtccattcagagtttttaaatctctaggtcgtttattagaattttaaaacatttccccctatttttagggagaagagagaagtagtagatcccaattgcttagctcatttgaaaagaaaaaaaaacatgtagagaacaaatgacatctcaactagagtagttatttttacagtgaaattagtccatccaggttcgagtctccaactctacagttaattattttgtaatggtagtccttacccgtaaacaaaacgttgaagtgatttcgtcaatttcatgtattacctcggtaacaaaaaaaatataatagattacatgtatttatactttattttcttaaaaaaatccctgtaaaattacctaccgatttttatctattttatttacatgggcctaaattggacatggtccaacgcgtataacgtaaaggaataagttcatctgatgtctcttaacttgtcaatgaatccgattttcgtccatcaaccgaaaaccaaatgcaacgggtccctcatctatcaaaaccagtgcagatgaggtccctcagcggtttagatggcggttttagctgacgtggcgcttacgtggctaatttgactcggtcttcatctgacgtagcattgatgtgacgcttacgtggcaattcgatccgaaaaataataaatcttatgggacccacatgtcagtttgaatgaattaaaaaatgatgggtaacattctcacccctcctctctccccatctctcccctctcctctctctagcgccacggggtcacggggaggtctggcggcggcggccgacgacgcgggggaagggtggggcgtcagtggcgggagtgttgggggacgcgccgtagcctaccacggtgacgctgtggttgacgtcggcggacggcggtgcacggccccgtgtagacaccgctgccgtagagctagaacatgaagttgccggcgtcgacggtgacggacaccggctgcgccgccacagccctcgccaagtcgggctcgctgctggtgtcacgttctggtagcccgcgatgctgaccgcgctctggttcagtttcgccgcctggcacgcgccgttcgcggcgtggtacggctagctcgcctccgtggtgactagtgaggccgtggttgccgacgatgaactcgaacagctcatgtacccaccgccgcaccccacagcctcgtcgttgcagtctacgagctcctgctctgacagcgacaccagctcgccgttcttgttgatcccctctatcaccgccacggcggagaacgcccagcaagaacctgcatccacacaacacccagatttccatcgattaatctccaacatttttacaggtttgaatctttctttaccatgctattgctcacacaccacaatcttcttggtactccacttccaccactgctcctttcttcctccaatctacgctcttcggcagaatatcatcactgctctctccaggcattgctttgaggaattgcgacatgaggtctgaaccccagcatcttggctctgaactcctcgttcgtcaggtcggcgaacgtacttcttgtcagccagcttgtagccattgcacatggagttgaacttctcaaataactcaacgttgctcctgtacacctcgaacctcctctgcttctcttcggcagtcgtgcagctcccggcaccacgctcgcacgagctccagctcgtcggagacgggcggcgccgcggccccgatctcctccacgagcccacgcgcggggtccgcgccgacgccgtgagcgaagacctagcgctcccgccgccgacgccctgcccactacccttctcccgcgtcgccggctgccgccgccggacctccccgtggccccgtggcgcctggagggaggagaggggagagatggtgagagaggaggaagaagaggaggggtgacaatgatatgtggggccatgtgggccccaccattttttaattcattctttcggtgaaactgacatgtgggtcccatgagttttattatttttcggatcgaattgtcacgtaagcgccacgtcaatgctacgtcagatgaagaccgagtcaaattagccacgtaagcgccacgtcaaccaaaaccgccatccaaaccgccgagggacctcatctgcactagttttgatagttgagggacccgttgtatctggtttttcggttgaaggacgaaaatagaattcgttgacaagttaagggaccttaaatgaacttattcctaacgtaaagtcctcttctttaatgcttatattaggcctggcccatattagcccattgagagcccagatgactcatgggctcgtggcccgtgcagcgcggtcgccgccgcaaggtttatctcctccgcgaggccgcgacctgacgccgccgccgccggcggccgccgcctcgtcgtcgatgagctcgccatggcgccctgccgaaccctatctacgccgccgcggtagcagggttcaggtttggcggcaggctacccccttctcactgtcgcacgacgacagacgactcctccctcctccccacctcgccgtcgtcgtcgtcgacgactttgctcttcctccgtctaaccaaatcccagattctgcagggccgcaggcgcggactaggcgaagaagggccgtcccccgttcatggcactgccgcgcgagcgtcccattccccactttctcgccggtcgcgatgagcagtaggccagagtctgaaatgtgttcgtctcagccggctcaatcgttcggcgggcgctgacggtatgctcttaccatgatcccctctcatttgttctagggatgcaagtgggtgatctcactacccgcataaaaattcactcgctagttcatttcttacatgatagtataaatttcggaaggaaaaatgaactagaagtgagataagcgggcaaaataatctcgcttgcccgccccacttgcatcactaatttgtttattgtggcctccgcgagactctgtggtgactgattgattggtgttgttattagtaatctagctgcattgtggctattatctgaaattaggggatctaacactgagcattacttttctcattgatatccccattgcattgcgtttatccatgtgtggatgcatccaattattgctatctgtaggaaactagaaatggttcttcatctctggggtttattcctttgattcaatgtatttggatatattagcctttcttccattcattatactttaaatcaggccctggcacctgtatctagaaatgttatggtatatatggttttgtatgccatataaatgagtttcaacttggttttttgtgaccctttagaaaaaaagaatgagaaaaaaatgtccacaattagatgctgcgagtaaaaagaattcagatttgcatatatgtatgtgctaatttgtgttcattttaaagtagagaacaccaactgttgcactattcctcataattactgatatgaacatcagcattaataggtgactatgaagatattggacttctaatttatttcatacaatacaagtcaattactagactacttgattgtcaactgctatatatatgctgttaactgcgttttgtgcattatgttttgtaatcttgaatgatgttgcatccagccttcaacttggtccctgaaacctattaacaaagaatagaaaaaaagaattagtaaatgatggcttttctcctaaaaacagcatgcctagtttgttattgttttggtgtctaggtcttggcttcttgcatatatgaataggggggataaacatgccatctttgtaatctaatgtattgtttgtttcttttgaaacaccggaagtgtatatagtgagtagaataattgttcagcattaaaaaggatgcgagaaggcttatttctgttgacaaaattgccatggtaattaaaactacatatgtgcacttatgtcatggaaagcttgctcattatcatgaacagggtaaagtaagcgcacccgtgtcctaaaaaggtactaagctaggaacttaagttgatattctactctgaattcactattctgggaagaaacgtgtattactaataaacctattttgtatcttccagatatatgcaatgagctttagcgatcctcagaatcttttctctagagcatctttggaaatcttatgcttgtgttagagtagatgccacgtctaagtctatgaattttcaatcaaaaatgtcatggttatgttttgagagggggtgtatgagtctatctggctcctgtgatttcatgactaccaatatatgaatatttattgttttagtctctctttaagtaaaatattaaatttgttcctaccttctgccaccaacaccactctccttctggcagttgaagtataatgcagcaacaggtggtccaagattgtaaaatgcagagaaatctctgacgttgaaattttgccgccatcctggagcataaactgtttgtcgtgcttcctgtttgaatagcacaaaaacaagccgatgaattccagccggtggccgtggagcttcgtacggaactatttcattgcctgaaacagtgtgtattctttattagatttgttttgttgtggttcatattatcaaggtgaatgttagctttcaccacatcactctacagactacatgttccttgatagtgtggtatagattgtcctatagttcagtcattcagtgacattactgcccacccttcagtcctgtgccacttgctgccaattaaagcaaataaacaataccctgtggtacatgttgtttcacgaaatatcattatggttagaagtattgcaaccaattgcacatcctgaatatctgtcatggcttccacatgaaaataaatattaaagttgaaatcccactagtgaaaatgcatatataaaaaaaagaggtgaaccatttttattatgtgaccattaagtgtgagtgtgtgactaataaaaaatagtaaatgcctgagttctagtatattatgtgacttacatttatttttttcaatattcataaaactagatttgatgtttaaataatcacttgcaatcttgataatttagcagaaaagagtgtgcctctctgatatccttgggatgagccagatgagaggatcaggcgtgcttcatgtatgcactaccgaaggtatgcttataagttataactccagcattgcagcttggctccaaagaagtctgtaatttgtaatgctactagtgttttttgtgggaaaacagtagtgctgtttttgaactattattattttcagttgctcacatgattattcctagttggcagcttctttagggagggacagagggcatgtgataactttacaccttggttttccttaaaactccagaaacgatagtattatgttttcacttggaaatgaaagatctcatgtttgaaaaatctgaagtatgtcacacagattaggtgtgtgtttctgtggggccccacacaacagaaccattggtcaaccataggcaggtaataccataatagccacatatactaatttcatcagtgggccccacagatgatctgaggtactcaacttgaggcgctgttgggcagataacaaccgtccaactgcttaacctgcatcaaaaataggtgcagtcatacattagagcggggcccatccccctctccctaagttgctttacatttgattcacaggtatgcatatttaagatgactgtatatagtttagtagtcaatagatcaatcgcagacttactttaaaattagggacctaatgtttttttcttaatttttgcaatgtcaccttaaatccaaaagaacaacaagtgtagggatatagaactagattttccaattaaagaaaaggaatctcggtatgtgatagtctgatagatgacctactaaatgcacctttaatgaaaatgccattgattttcagtgtatatgacatctaaaataattattgacttgatccttgtcttgttagcttagtacaggagataaattgattgtctcaagctccctatactttctttgcaaaatttgactgtgtaatcatggtcgatagtaacataaactatgaagaccaatgcattcttttgaatcattccttagcatttttatcatgtcttttacttttgcatatgtaacaccctcgtagatttctaccttgacaccccaaacaccagcctactatacaaataaaattcatcaagtttcatacagtaaacttgtttacttaaaatcttggaaatatatgcactaacataattttagcaaaacaattatttcatggaagtattaaggtatttggtattttggttggatcaaaccaacgatatttccaaacagttatattagttatagtagtatttccatagttactcctgtctctatcatcatttatttttccaacttgacatagattttactaaccacgtggttattccattgccaagggtacttgtgaaatgtttacaaccatatacaacaataaatatcatgatttctgtttgaaacaaatggcaaatattggaagtgattttgctgtttgtataataaaaatgtttgctgatctgtacatgcaattactcaacattggaggttatgtaggagtaagatgttacccaccaaaacgtgcatctattgcctctgggatgtctgtcaccaacctgtagaaaaataacaagaagaaagaaacaagaccctagctttagctctttgattaggctcagaagtaagaactgcttgtaaaggacacaaataataagatactatgataagttatatgttaattaaagaaacttcatgtatggtcaaattggaaatctttactcttatgaaaaacgcaaatctatgtaaggagatatgagttgcagaaacatggattagattagataatcaatatataatattttagatatattatggtaccacattgttagtagtacacagcaagcaagaatttgcccgatcaactgaaaaaaaaaattcagtgttgcaaatgaccatcatgttacatcagatcatcctttgaaagtttaattaagattagttactcataagtttgtttggtggtaaagggcacagttcttctatattaatatgccatagcaaggctcttaatacatcttctagattagttagcttctaattatattcaaaatcataaacttcccagttacaaattttgatattagctccagcacttgtttataaacataataagaatgatattacaattcttatttataatgatattagtattcaaaatccatgatactagtattcccagttacaaattatacaaaatccattagtcttgtttataaacataataagaaaaacataaatttcaatttaacacgcattaatgttatttacttattttagccatatgtgacattacctgtaagcattagctccagcacatgtttcttttttaaggtatctttaaattctagccattttttccctgtaaccgtataattgcatgcatgcatgctatctacatgaagtccttcatgctgatatcataaataatgccgtcaattaatgttttttcatagtttatcatcttatgttgatatgttaattgattgtagcacccaataatgatgtccttagagttactcaggatcatgactggtttctccttactttatctatgaagaaattaataggcaaacttccagagtaccttctccatgagaagttggtaaggtgccttcttaaatactagaaagtataaactattaagataatatgaaatagtttgaagtattggcaattttattttgaagctacataatagtgccaatttaagaactaatgattgatgataagaaatgacaatctgaacaaagagacttaggttgagggaattatggtgatgaaaagaattaagttatcacagaaattgtactttcttacccaatagcatatagaacaagagttcttcagctgttgatggttggataagaaacacccccctccttttcgagagggctgcattccaatcctgcaggttatctaggtaaggtgttcttgaactataaacataacaatagtgtggcaagtagcactcattggtttcttgcaaaatgtggctttgttgagtttttaggaaggcattatgcaactctttgcttgtataataaattcaataagctcaccaatgcaaatattccctgtattctggtttgcttggacttggcgcatcaggatccaccataaccttataaaaggaaaaccttttattttagcatttagacatagatatcaaggactagttgcatgccttatagaggacctagggcatagctcaataaagcaaacagaaaaaaagagagacaaaaaggtattctggagaccataaaaaataaaaaccatataagttttcaccctctccatgctaattatgtgaggttttgtgataaaattaaagttgtagagtgcctattagtggttagagcagcactgtgcagggaagtgggatcagcttagtatcttacagtcttacttttctacagtgagttcaggctggatattttagtgcgtgatatttcatggataatttgaaatgtgtggcagtgtctattgttgtggaaaggatgctgatatgagaaagtatgccaaattaccaactttaatacagcagagattcaatttctcactttaagtaaatcagacatgacagggccttatcctatccaatattcctgtaccacagtgtacaaacaagacaggggtgcacaagtatattctaaagtagattgtaccatatgtgtacttgatcattaccaaaaggttacaatatgattacttttttagcaaataccagctggcattatgatttagttttcctgccactacaatattctgtgaaacctaataagctatatccctcatatttctattatcgacagtacctatggatctgttgaataatctatacttgtgcaagttagatggccttttctggtgaagcactaattagatctgtgcattatttctttaaaacgtagggtgcctggagtaacaaacatgtttcattaattagtgtgcatatgcatgagtcactccataagaaattatctaatattctagaaaataaatattacctcttctgacacgagagaaatctttttaacttgaagctttgtttggatcaaaagtcattttcaccttacctaacagaatggttcaaaagacctgtacactactctgatcatgatcctacaaattatgacacttacaagtgtgtagagcttcgtttggtcacgaccttcaatctcaacatgtggtgcagtgaaaacagcagatgatcgtactccagttccatttgtaatctccttctcaccataattaatcctcattgcagctgactttatgaaaggatccaacacatcgccaattacctggctcaatgccaaaggatccctacctcgtgacataattttattgatccttggtgagaagggaattgggaaatattcaataaggtggaagggctagctaacaaattttctgtgggaaagaacagagcggttcgatgtaaatttatattaggagtgaagcatccactttatgttcacaacattccattgagcactatgagcaaatggaatcttgctttttatataatatttatttcccttatagttgcttctgtattgcatatggtctttgtgattgatatctatggtcagtttttcatgcatatattccccaaagatctggaggtatgtttaaagctccaagagttagcctcccctgcatggcgccttgcctgggctaggccaaaggtttacgatgagtcatttcgtgttcaatgatacttctctgagtggtgagcactcagctggagagagaatcttttgatcgacatcacaatgcaagagtatgaaacctggggaggtagaggcaggtcattagcaatcttctttcttcttttatttgcttttccttgactgtaacgggagtatctagtacttcatccttcatcctttggtgaaaaactgctatctggacctgttctacatgacccttgcatacttaactaaatataatgataaaggccctacaaaattttcaataaaattttagcaattgctcgtcaagtttctcatataaatgagataaatacgattcttacaagagtctctttcgacaaaattgtaacatttttcagtgcagaggaaaaagattaatgcatgtctgggaacaagttattcactgtggacacttctgttacaggtaagaattacacattagtttgccataattccatattttacccagtgctgataaattttctaccatagcaatgttattctgtggtatgtcttcctgtttctgttttatacattcataatgtattcatatgcaggcatgcaggtacaactttccttgtccactaaatacagctgtacaggatcattcggaccaaacaggaacaggaaaagcatctgccttgttcgagttgcagcatcattgtcttgatatcatgagaatgaggccacattccattttccttgcagcacttaaaatccagttgcacacagaagtttcacctttgatgctacaaacgggcattggacttttcgaaggacggaggatggataccatcacactatggggttgtgttcaagaacaccacatgtagctgcctttgctctccattcaaaaacatcacatgcgactgcctcggctctccacataaacatcaatgtcgagaatgccatgaagaatccatgcagattttaatatttttcagctgggaatacaggtaaggaccactggctcttcattttgcaccttttacttttgcataggcttcagaataagtactccgtactgtgccatacctttttttggcaccctttttttctggtcaacatgtaatggcctatttggaataaatgaatccacagaaaaatttacagagaacaatataaaactccgttattcttacccatttacatctcttcatccaaatgggccttaaggatcattcatgataacaaagcatcatcagttttagaataaaagtaacttcatgtaggacagattgtgttttgacatttggataactgtttggcacgtgtacttaaaggctgactgacgacatgctataatattgcaatacacagtgaggcaaggaatatactcgacatccaaaaatcttgttggaataaaggtacagtcttcagatcagatgagcatctccaccagggcactgcatggctgcaaccagaaaagctgaaagattaactttgaattgttgaaagctcttgcatgtcagtcacaaaaggggggaaaaggcaccaaggaatttccccgcactgcaaacaacctacacccagcttctgtggatgaactcgtgccatgccagtatgccaccgtccctgctgcctcaggcccctctagattgttcgtggaccagctggaaactgtgctaaagctgatctgatctccaggtgagagctgaatctattctgatggggagcaatcttatcattttgacagcatgcatctgaaggtgctagtggataagtggaagcttactgaatactcttttctgtaagttctttttttcttttttagcagcaaatgctatggcgtgctttcgatgagcttacagattttaacttttctattgattcacttgtttcactggtttctcaggcaaaattgaccagtgatgaatctcttataacaggtgatacatgacaagcttcgttgctgcagaagaatgcagggtcaggtgacctggaaagattgatgagaagaatttgagaatcttgtacagcaaattggatggagataaggtgaatggctgcggtccacttcaaaggtgaactgggaccagccgtgcatacagaaacaacgtctctcatttgtcccggtgcctgcataaacaatgtgagcgtgaacgtcaaagtgaagctcaacacagttcttctgatactctctcttgttggtccatattataaggtgttctgtttttcataagtcaaacttctccaacattgatcaagtttatgaaaaaaacacatcaatctacaacattagattagtttattaaatccaccttaaaaaggttttgatagtgtattggacgtatgtattatactacctatgttttagattataagacgttttaactttggtcaaagttaaattgttttaagtttgactaagtttgtagaaaaaaataataacatttttaacccaagataaatttattatgaaaatatattcacttattaatttaataaaactaatttggtattataaatattactatatttgtctataaacttagtcaaacttaaaatagtttgactttaaccaaagtctgaaacggagggagtagatattaatgtatttttttttgtataaacaccttacagtacaggatggatagaatacatttgttcttattgatggattgattattcgttccatggatgtgtgaattgggtccagttagtttgcagttctaattagatggcaaagatagaagcataaagtggcccaaacccaattttcagacagcaccatgggcggctcgactggcccaacgagtagagtaatctgggttaaaaaaaaaacaacttttaaaaccagtttataaattccaattgcatattgagagccttttttttttacacaatatactcttgagagcatgattggaaccttggataatccatttggtcttcgttccctaatctgtacgctaatcatgcaattaagagagagactcaaagcgaatgtgctatcattcggagacatggccactaactaaaggccgtttgccgttactaaactactactaatgcaagtacatatccagatatccttctggtacaccagcacacgcatcatctgaacataataatttgataatgaccatcttatatatattttaaaataaggcaatggtgataggtacacccaaaccgtaccagctccctcgcaaaatccacctgcctgcactgcaccaatatgcctaagctggaaagccacatgaacaaacggaacaaacaatgacccattcctgctgtgccgccgcggcgaagcaagctagaaaagccggcgaaacggccaagcaaaactagtgccgcgtctggtgcactcacgccgtgtttagtctaaaataattcttcaaacttccaacttttccaacacatcaaaactttcttatacacacaaacttttaactttttcgtcacatcgttccaatttcaaccaaatttttaattttggtgtgaactaaacatagcctcagttatcaaaacaactacgttcctgtaggtccctgtcactcggatggacattaatttagagtattaaatatagaccacttacaaaactaattacataaatgagagctaattcgtgtgacatttttttaaacctaattaatccataattagcacatgtttactgtagcatcacgtagactaatcatggattaattatgctcaatagattatcccgcgaattagtccagggctatggaatgggttttgtcaatagtctacgtttaatacttctaattagtgtccaaatatctaatgtgacagggactaaaaatttttaagtcccatccaaacagcccctaagtgcacagtctattttacatggtaaaaatttatgacggtccattacaattttgtagtagcttgaatagtaaatgtgttagtttggtttgatgccaaatttggtaatacctatattcaaaatggtacaattctaaaactttgttcaccataatataaattttagctctcaaacttatccactttcaaaactactctaccataacattggattttaccactatcaatattttagtacgatactaaaccaaacaagttatttgcctcatgttcaagccattgtctatgttgcccgaggtctgagttcctcaggatgtgtaaaagaaaaacataaactaaaaagaagggagaggtagggagtgtttgagatatgagaaagggaaagattaagtagatacgtaaaacgagataagttatcagcgtataattattaagtactccctccgttccaaaatatagtaacctaggatcggatgagatgtattccagtaatacgaatctagatagggggcatgtccagatatgtagtactaggacacatcacatccggtactaggttgctatattctgagacggagagagtattaattattctaaatttaaattgtggttaagatgatttttttaaaacatactccctccgtccaaaaaaagacaaaccctgggtttccgtgtccaacgtttgactgtccgtcttatatgaaatttttttataatcaatatttttattgttgttagatgataaaacataattaatactttatgcgtgacttgtttttttaatttttttttatattttttttaaataagacggttaaacatttaacatgaaatcggtcgtagcagttaagagcaaccaacaaaacacaagaggagaccaaatcaagcgcgacagctaggcgtgtacagccccccgtacaggcgtgcagccagcgcgacgcccccctgtggtgcgctggtagttcagccttcgcgcgcgggcggcaaaacacggcacgccacgccaatacgtgcgcgcgtcccgcgccgtcacgccgtgccgtgacgccgcccgctgtcgctcgcgccgcgtccgcgtggtgtgtctttcccctctcgcgaagcgaagcgaaatacaaagacacccaaacccccaccaccacgacgtctcgttccctcgtactagctcgtctcgtctcttctctaccccaatcccgttctctccctttccccccaccccacccccaaccccgtgccgcggcctcgccgatcgatcgatcgtgcgctccacctcctcgagctccctccctcgccgccgccgccgccgcgcgccgccggttcgacgccttcttcgcgctctcaggtgaaatcatcttctctctcaggttcaggaatgaatgcgtgggggatgggggttgatcggtttcggctagggggtgctggattggtgggtggggggtggcgcaatgctgctgcggcggggtggcgtttttgccgggtcgaggcgggcggaattgtggggaattttttttttttgcgtgcgcaattttggcgtggctcgggatgatggctgggtggcgtacggcggcgtgagctagggggaactcgcagcggcgccgggggtgggtttcggtggtggtttgtgtgagtcatttgtctcatcgagctccaagtttggaggtggtgttatgctgttttagcactggaggttttgtagtacggacttgcttggatgtggaggatatggtcatgtttttgttgattcccggaggccacctcttgtttctgatttccttttggtttgtgtcattggttcatcaggtagcggtagacactgaacatgatgattcaattggtgtgacggatgagtctggttggccatgcatagaattagacaggcggatgcgtaggttagtaaaatatccatgtgaatgaagctgagcgacaactgaaacaaaaataaatgcaggaccaaacttgatgttgattgggacataggcatgtgaaatttgcccatgttcacaggatgaacggcagaaacccagaaaagaacataaaaatggaacatgaaaatgatagttcacttgcttgggtggttggcaatcggcagaagaggatgcaatccctctcccttaatcgcactgcctatccatgattaatgtccatgtgcttcagtactagattttttttttaatttggaccacttcagttctgattatgagttttgtcattgaagtattaatgttcttagctgtatcggtgctaatgtgctgtcttttcctccttttctgaacttaaggcatagaaaagaggaagaaacaaaggatacatcattatgttgcgacgctggttctgctgcactcagtttcacgcaccatatcgtgaacacgaaaatgaatttcctgacatcccagaggagaaagaaggtatctttcttattgagcgcccctccttattctttttccttttttgagcagctatcttcaagtttatggtattgtatggtctcaactcccaagtagtcaagttgaggaaaaaattgctgaggtgttcacatcatcattgttcattctatatgaactaaactttagtctgtccaaggttgctatactagatgtcagtgcattttcagcatagttgtcagaaccattctttttcccccatggccttatcagttgaactgcacaattccttgcatggtagtagtatttttatcttgattttctttaatgctaaaaacaaggtcttgtattatatatccgcgaatgcttcatatcctgttgtatttttgcctttgagacctaaacctatttgtcaacatttggctagcaggaaatggttttgctcccaaaagtgatgatcccacaaaagcacctcctcccattgaagtaccagaattatcatttgatgaactgaaagagaaaactgataattttggttcaaaggctttagttggtgaaggatcatatggaagagtgtattatgctactctagacaacggaaagcaagttgctgttaaaaagcttgatgcttcaacagaacctgaggttgataatgattttttgacacaggtatggttaatgattatataatcatatgcagctcttgccaattatatgcattctgctattcgatgtttggaataaggttttactctaaaccttacttttcatttctattggcataggtgtccattgtgtcaagattaagacatgaaaattttgtggaaatgcttggttactgtgtggaaggaaatcagcgcctagtggcctacgaatttgctacgatgggttctctgcatgatattttgcatggtatgagaaatatgcctttacggtaaaaaaatgccatcgtatctcactaaacacatacaagccttttaatataattgtgtatataatatagatacttcaaggtttaagttggttgcctgtttcttttgtaataactcaaaataattcatatatagcagtgctctgatattgtttttgtttttcacatccttgtcatacataaggaagaaagggtgtccctggtgcacaacctggcccagcacttgactggatgcagcgagtgagaattgctattgatgctgctaaagggctagaatatcttcatgagaaggtccaaccttctatagtccatcgggacatacgctctagcaatgttcttctatttgaggactacaaagcaaaaattgcagatttcaatccttcaaatcagtctcctgatatggctgctcgtttgcactcaactcgtgtccttggaaccttcggctatcatgctcccgagtaattgctctactcaagtacttgaatagtttatgcatttcttttttttcccaagcaaaatatttaatcaccttttttgctataatagattactctgtaatatatattgctagaagatgatagtgttctgccttcaatattttgtactgttgattgcgtggctgtagcatccaggcaattcttaaatatagctaaacaagaccaatagttctatgaataactgaagttcccattatttgttaccatgcttgttaatcattcactcagtcatgtatcctttgttctcactccatgcaggtatgccatgactggccagttgactcagaaaagtgatgtatatagttttggagttgttcttctagagcttctaacaggaaggaaaccagtagatcacacaatgcctaggggtcagcagagtctggttacatgggtaagcattttatttgtaaatttactacaatatttaacatgagagctgtttgcctcagctattggtaaaaggagaattactttgttgataagatcactctagaataaaacgaagaaaaatgtggtcttaataacaaattactaggcatccagctcagatggactgaagttaaggttttgaatggtacttcaaagaatctctcagactagactttgcacgttaatgattcttcattcaacaaggctttcaaaccaaacagaattttattgtcctttgagaaactatactatttttactgtcactgtgcatagatgctattctatcgtgttatgtaacacaccattctaagttgtgtacaagctgctctgcatatttctgattagctcttgttactacttattttgtacgcaggcaacacctcgtttgacagaggacactgtgaaacaatgcgttgacccgagactgaagggcgagtatcccccaaaaggggttgccaaggtctgcctccctcctcccttccctttaaatgcacaagcactctcttgtatggtcactgtgtggagccaagcaacatcgtaaccaaaatttgagcccaatggtttccatctgtttattgcagctcgcagcggtggcggcactctgtgtgcaatacgagtctgagtttagaccaagcatgagcattgtggtcaaggcactctcccctcttctccagcataaaccgccaccgccaccagccgttgctcctgagacctgagctccagattcaactgcttcttatgcttttacttccgagtttcaacatggatgtaaagagggatggaatttcttcatcggtccctgtcgttactgtttcatgcttgccaattggttaccatgccgtttaagtactggtcctgtgagctttacaatagatttttggtgtttacactcggagctttccttgtcattcctttcatgtgtgcttatgctgagtgctgtgctgccttcgttggtcggcaaagttgtgtttttagctgcccagcggtggtgatcaccgaataatcttgttctgagttgaactgtgacatgggaaggttctaaatctaactgttcatggcttgacatgctttcggtgtgtgcctacgtgagaggatgatggttcttcactttgttaacatgtgagttatgaatggatgcttttggcttgctacaaatgtgagttgaggctaaatgctcgtcacaaattgaggttgaccagctaaaacatgcaagttttgataattgataacctgtacgccatgcggatacagcgacttgaagttgcccatcaacgaaaccggaatcaatgatttgccactataaagatttgtcatttttattgcatgtcatagtgataattgttgggctgaactaaatccacaatgtgcaaatgtaaatttatcagccggtaaatataggacacaactacatatcgacctgttgttgatttggttaaagcaacgaccacttcatcccatgcataataaatccttctttagcttaaaaaaaatgcaatggtaggtgctatctttttaaaaaacttcttcgatgacttctatcttaggatctatttttagcattatactccaatcaaaatatgtgacaaaacaagatcaatgttgaatgtatttaaacattttatttaataatttgaatatattcaatattagtcttatattttgtcacatattttaaatagagtatgatggttcaaatggatcttacaaataatatacgatctaaaaaatattcctatatcataaaagactaaaaaaaactaatataacggtatgttagcctcagtagcatgcacgtgaatcgacatgacaactaacaactagccgatagtgtgtggttctctttttctagcaagtggtctcgtttatctatttgtccgtacaacatctacgtgtttgtatctcagccatcattaactgattgaatggtttataaaagggtctctagatacaaccaaatagagaacgcatctcacaagggtgaggtaatcttcactactccctctgttttacaatggaagtcattttaacgttttccgcatttatatttagattgattaacatcaatataaatgtgggaaatggtagaattacttatattgtgaaacggaggaagtatattgattaatagacaaatcaacgattcatatagactaaactcttacgagtaaatcgcaatgagtcaagtacaaagctccacgtgaagagaatttaagtagaccaacaacaataatgacacacatgagtacgcagtactctatggcaaacacttcggtccgatccggtccggtccgcgccgcaaacacgtcgatggttcgaccgcaaccgggtgacccctgctccgaccaggccacccccgttctcctccccgccgccgccaccggcgcctcccgctcgtccccggccggcgagtcgcgtaggagggaagcgccaccggcggcggccgcggcgagatgagcggcggcagcggcggcggcgccgcgagcgcggtgttctacgcggagaagtaccacccgatccaggcgggcagcatcgacggcaccgacgtcgccccccacgacaacgccgtcctccgcgccctcctctgctccaccgccggcctctgtgcgtgctctcctccccctcctcctccttttgctccacgcggagaagagcgcgaacgccgccgcagctccctcactgactcggttggggttcggtttccgattttcgttttcagatgatccgttcggggaccccaaggccaccggcgacccctactgcacggtgttcgtcgggagactctcccgctacaccgacgacgagacactccggaaggtgcgcggattccctttggtgtgtgttgtactattagctttgctcgttttctcatggctggagttgttgtttctcgttgtgtatgtgagagagcaggagatgagcagatatgggagggtgaagagcatgcggctggtgcgggatattggtgagtttaaccaatgtgattcatgaaaacgttgcttttactttttgaagcatggttcatttgtaattgtaatggttattgaacatagcatccatacaatttatattatgccaatgcaaattgacgttgtattctgcgcggtattgataacacattggagcattgatatataagaaaatgggaagtgctgtcctgaattttggaactgtacctttagcggctattgagttgtcggtaggcagcaaatagcagtgcttcactggagcaacatgccagcatctcatcctttttcgcttttgcaaattcagtttttactaaccgaattacttgattttcagttactggtgcttctcgtggctacgcatttgttgagtatgaaactgacagggagatgcgccgtgcctatgaggttatatgatgttcttatttctactgcctgtttgtttccttcttaattcttagtacacttgaaatataaaagaatacatgttacttttgggtctataggatgcacaccattccattattgatggcagtgaagtgcttgtagattactacaggcaacaacttatgcctggatggataccgaggagatcaggtgtggttctctgccgaagttttatgcagagctaaaaatacttgagatggttttcatactacttttatttatcattttataggaggagggcttggagggaagaaagaatctggccagcttcgatttggaggtcgagagaggccatttcgtgctcccttgtatgaacccaaactcttgttgcagtccaatatttctcatgtaaagaatcatagaagaagttgctttggagtttctagacataaagtaacagcatgttgtacttctgtaaaacacaggaggccaattccgtatgatgaactgaaaaggcttgggatcccaccaccacctgaagggcgatacatgacacgttatcaggtagttcatcacttctagagggacaggctatttgactttttttttatttacatgaagtattattgcaaccgtcatttatggtttcaaaatttcatcatttaacaaaaacttgttgcattcacctctgtcatggtaagaaacaaagaaatgtgttattcacgagtgagcataaggaaatgatatgaggttgaaacttggagcgattggctagtgagaatagcagactgttgccctgaagataagggcataggaagtaccatgttcttatgtgaatcacagtcacatcacttttgcacaaactgtttagctcaacccacatgggggtgatgggagcattagtagcttatttgatgcagtagtatctgttcacagcctcgcaggcacaactgaactttctagtcactttgctatccaatgaagttggaagtgtttcattatgcttgcttactgccatgaagtgacactgtactcccactatcacaggttcccccaccaccaagacgaaaaagcagtgatatctacagggaagagtcacctcccaagagaagatccaaagacagggttgatagcagtcactacagaagatattgtagcccaacccaagacgacgacagcacggtcagcacccataggcggaaaggtagccatgaccggcgagaagaaaccgagaggaggacaagagcatatatcagcagagaggccggcagctacagtaagcggagcccaaccgaagacgatggtgatcgtcgtaagaggagaagaagccgagagcctggagaattatctccatacaaggaggatgatgataacagcaaaagaggaagaagttcagtggagccaggcttcagcccttatcagtctcatcaccacaggcatcacagggagcgtcatgacagcagcagccattctcgccacggtgaacgtcggcatcaagacgaccgtggaaaccactccaggaacaggagatcagagagccgggactacagccactagaggtgtcgagtccatggtgggttcctagtgttttaacctgaatccctggctgcctgttcgctgcttcaactcatgtatatgatctagttttctcaggcgtccttgccttgggttgcctgtgtagtgagggctactaaacctgaagtttcgactttggaatacatgaattaatagaattcatgatttagttcaaacctacctataaaattctttcattaaagccttattcagttaatcccttgtccaaggaggttgagagggactggaattaatactcccttatccactccaatcacttggtcattgggactaaacaaacaagcctagagtaagcctaagcgattgtggaaaatccaaataactccatataagttgctggtcttttcattctctccctacaacttaatttcatacaagatattcttcataagttctttttcttttcaatttcccccatttgtcttgtttctagtgattctcgtcatgctcatcgatttctcacatcctatgcacctcccgcatggtgagtgaattcctcctttgttctttattgttgggaattagatttaatacaccttatatgtaatacgtgatcgctgtcgtgttttatcgccgtacctaagaaaaaattgaagtatgcaaaagcaaaaggagaggtatctttggtgacagaggcaacttatttacctcaccataatgctcataaggcacaagaaattgccgaaaactgaatagtggtgggaagttggaagagaaaatgaacttacgagaatacaaggagagtgtgtttggataatggaaaatagagggtgggattgggattgggaaatgaatgaagggttaggattaaatgaaatagggagaatgaatgtttaggatttaaagatgtcttttggtgggtgggaaatcacttccatttcccattagccaaacattgccggagtgttttgcacgaaattaccttataggggagatttaggatgtgttcggttggagggattttctaagtttgtttgggtcgagtccattttcatagatgtttggttgtgagattaggtatgataggataattccaaaagagaatatattccactaaaaaatgggttgagttaatctagaaaaatgtgacggaccactcatatctgtgtatagcaatccgtatgagcatgaaactctacacaagagctcttcgcatcattttcttttttgactttgttcgtaaaaacaatgctcctgttttttatatccttttaagcataaaacgtgtaccactggaataaaaaatgtttgaaaataagtgtacatttttccaagaaaaaaaatctttcacgcgccacgatacaaataactcgaaaatcacagccaagaaaaaaaaaagcagctcacacgcacgcgtgaatcacatcgccccgtttccattttccaacactagtccacttaaccaccgcttccttcgccttccaaaacaaaaggaaccccaccaccgctcttccgcgcttcgcttctctcgccgtctcgcggctgcgcggcgcggcgctctcatccatcccctcctcccgcttcccccacccgccgcccgatctcgacggcggatcgccccgggatgggctccgacgaagacgagctgctcgacgacgaggagtactactactactgcagcgacggggagtgtagcggcggcgggagcgggagcgacgaggatgaggagttcgggggccgcgggagcgacgagggctgtgaggccgacgaggtcgtctccacgcgcgagcaggtgctgtctgtgaattgcgatcaatgcccttgcgtgtttcgttccgtcgttcaaatgagagaggcccccccttttcggatttctggatagcgagtggcgctgctgttgtggtgatggtgatttgtggctttgatgctgattcggttttgggtgcgagaatcctgcgtgttctgtggtaattcgacgttctgagcgacaggtgcaatgcgatgtacgagtggtttatgcttgtatggtgatggtgattagtgtctttgatgatgatcggttttgggatcagaaaccctcgcgtattctgtggtcatttgatagaatttctgggaaacaggtgcaatgcgatggtggtgtgcttagagtcgcagcgaaatttgttcatggcttctctgctttacagatagcaaaacgtttcatccttcggggaaaaaaatagcaaaacatttaccaagatctcaatagattatagatatgatgttttctcttcataaattgtttcgatagcttggatggttgtttactctacagattgagagtttgagactgctattttccttctctgcattgtatgtcattaacgtaattgtgttttggtccttttgttcatgctgccctgcctttctgtttctctattcttaattcttgtatacttggtgtcagaactaactcaaaatctcaaatgggcctcttctgtgttcattttcttatgaacagagatatgttgtgttgaccgaagatgatatacgcgagcgacaagaggaaatgataagccgtgtgtctgcaatattttcagttccaagggaatcagcatgcgtcctccttcgtcactacaaatggtcagtgccgccgctccagcagctcgtcctttctgaacacactctactgttttatttccgttgtagtgaatttgagaagcccatctcatgtatctcttgtttacaagatgtactgcaaatgctttgtgtagttatatgtatatgtaatagcattttcttactgctggcctgccacaaaggtaggatgcttttgagctaaactagaagatccttttctatgttaacaatgtatcttcattttgttgttcaggagtattagcaagctaagtgatgactggttcgcagatgaagaaaatgtccgccgttctgttggcttgccatcaaatgttgttcatgttcctgactgtcctgaggtagaattacattcctaaaagatatggagcttcattgggtttttttttatcatattgtatcatatctggtttgaattggtgactaatgtagttaactgcatgttgtaatttctatttgtttctttggttgcagctaacttgtggaatatgttttgaaggatgtgctgcaaatgcaatgagctgtgctggttgttcccatttctattgtcatgaatgttgggaaggtctatctgtctctctctctctctctccatcactcatttttacattataagttctttgtgacttcaagattttgttattttacttgtaacattacgaattgattgctattgtaactataacaaattgatagatgactttgttgttctcactttcagtagtttgtagcattcttgttcttaaaagaattctgaaatttatggtgctaaaatgaggtaaattttcagggtatattagtgctgcagtaaatgatggtccagggtgtttggtgttgcagtgccctgaaccatcttgtgatgcaatcgttcttgaagatatgattaatagtctgacgaaagatgaggataaagtaaagtatgcacgatttgtattatggtcatatattggagttaacaacaaggtaattctttaaagtactcagcgctcataatggttcacattatcgttctcccaattatgtttattaaaccttactgtattgcccatcagatagtagtactatttactatttactatatagttggtatatacttgcttatatttatgccaagtgtcaccccaaatggttttcaaaaaaacatatttctgaagtaataaaaattaattcctgcagataaaatggtgtccagctcctgattgtacctgtgcagttgagtttcttggtgatggtaactatgatgtctcatgcaaatgcaaattcagtttttgctggaatgtcggtatttctttatttatttatttacttgtatacctttcagattgattgtttgatattaccagttaaatctttggtaaatgcagtgtgcagaggaagctcatcggccagttagctgtgacacagtctcaaagtggatactaaagaacagcgcagaatctgaaaacatgaattggtttgtcgcacacataatttccttttcattcttgtatttgatagtatgtcttgtactttattctttccatcttgaatatttcttgtgtaaaatactttttttctttttaatttcctaagttcataaggaaaaactggaagctgtttctcaagtgttgttttctcccccaggatattagcttattctaagccctgtccgaaatgcaaacgacctatagagaagaatcagggatgcatgcatatgacatgcactcctccttgtaaatttgagttttgctggtaagcttccctctcggcatatttgttttgatggtgattgtgtacattttgcattgaaattgtttatctttggtctgattttccatggttgcaggttatgcctaggtgcatggtcagatcatggagatgggactggtggcttttatgcttgcaatcgttatcaatcagcaaagatgggaggcatggtatatttcatcttggatactgtattgtgcaagaagaatcgtgatttttaccttgctagaataagcttttctattgctacctattcatgtgtttgctctagtcttttatactactttgctgtgtatttaatttatttgttttccttcatgccaataatctcttgtaatgttttcctcatgtttcagtatgatgaggctgaagcaaggagagagagagctaaaaattcgcttgagagatacatgcattattatgagcgctgggcgtccaatcaaacagtatgtctaggatccagtcactttacatagtctttatctgattttttatggtattcatgcttctacatgcccttttgattttcatatggaccatgtaatgtgtatagtaagctcattaggttggagacttttagttttgctgactggaaggatctaatttcatgttgctgctgcaaagtacagcgtctggcactaatgtccttggcaaatcagttgtctacttacttttcattttatatttaccatccaatattatgagtggtaaacacatacacagtgctttattttatatttatctttctcatactttcataacaattttccacaatgctgtatatttccattcaattttcgcatacataatgtgaagggtctgccataaatttacattttagctgtacttttatgtatgatacattttctgttttcttttccctgttggcagtcaaggcagaaagcacaagcagatctgcaaaaagttgaaaatgaagatgtaagttttacattggaccatgtgtacagcatttgtgggtcatagcagaagtttgattttattaatacttgtagcaaaactcactgttttggcagtccttttatcagttgtaaatacttttagtttggacttctgtgatgtttcagttttgcgtttgactattttctcatgtgtatagcttacaaagttaagtgatgttgttggtataccagagacccaactaaagttcatacctgaagcttggtcacaggttagatattataaatcattttctattgcccattgactgtttatgtaatttacatgttcattattcgttgtgacagatcatagaatgcaggcgagtgctgaaatggacatatgcttatgggtactatctacacaacaaagcgaagagtgatttttttgtgtacctccaaggtagtagataatttctgccttgccaagtaggcgcttatgcatacttgacggctgtacatgttttaaaatttataggtgaagctgagtctggtttggagcgtcttcataaatgtgccgagaaggatatgcgtgaatttttacctacagcggattccactcaaccttctctttcattgcaagacttcggtgaatttcgtgtgaagctttctggtctaacaaggtattgcagagatatcttcactcatcatcacttcagtgaatttttgtgaatgtatttgccgttaattttgtaatttacttggatctgaagggcacacgcttgctccaaccatcactgttatccttgcagtgtcgcttgcttcatgcatgatgcaaatgtatattttccaaatatccatgaactgctcaatatgtcactatgcagtgccaaatttgcttgatcattttattcactataagacttgcatgtttatgagtatgtacagcaactaagcctttttgagaacatgatctaagctaaatatttcattgcagcgtaacccgcaactacttcgagaaccttgttcaaacactggaagcgggtctgcaggatgtccgcgctacagaccaatcagcttcagtcagtacctccagctccaagaagcctcccaccaacaccaaggggaagtcagggcggagtaaggtggcgagaacatcgcaggagcgctcaggcgacagatggccatgcgaccgctgcactttcatcaacccgtcctctacgaactcatgcaacatgtgcggcaggaacaagccccgccgcagataggaagattggtcaaaatgcagttgtgcaaaggaacaccttctcactgggattctggtcgaacaaagtggtgctcatttggcccaacactctggtgctatgaacatgaagcagactctcccagggatctgatgatgctcagaggagatgtaagaaacgaacaatctcaggaatgcagcgcaagaggcttggacaaaattaggtagtagtaaaacatatatgcgtgtgtgttgttagctgtaaatattacttcatggagaaaattaggaaagtaccagcctggaaaatctgcgagttataaaataggattgcatgtgagaatgacatgtggggtcctcacatgtgattgtatttttcaacttcgtgaattcagctatggttcaaattaaaattggcctgtatggatgagtggttccattaaattggcctttgctgtattctgctctcagattggaaaagcttaactgtttaagtttggtgatttcaattctgacctgtaaattgtcctctatttttttttacagccgtggaaacaaattcttatgagaaagcccattttgccctttgtgcttcagaacatcgagcctacaggacgatgactccacacggatctgacgaccggagctcagatgatgggaggagctggtcaagggcacacttcagcctgcaagtggggtgggtcgacccgttaggtccgtggcccgaacctaaatttgtggcactaataggttttcgggccggcccatattttcttaggtgacaatgggtccaggagtcagttgaccctaggggtttttgggtcggccttgttcgagcgctccgcttgctcgcgttcacatggcggcggcggctttagggctcccggcctgagacggtgcggctccaccgcggatcgagccggcggcggtggctcccggcggaggcggcagcggtggcggcacggctccatcacggatcgaggtggcggcggcggctcccggcggaggcggcggcggtgacagcttcgacttcgcggtgtgctccaccgcgttttgaggcggcggcagctgggcgtgctccttcagtcctcctcccgtctccaactccccccaagactggtactgtggttcacatcatagcaactagcaacggattcttttgttcttgattttctttttcttttctttggttcttgattctttggttcctcttctatgcagttccttctttcggcggcggatggaggcaccggcggacggcggctacctgcttggtggccaaccggcgaggtgctccggaggacactccaccggcagcaacggcgagggtttcggaggacacccggccacatcgccatcttcatctagctgggtttctctccctcgtgagcacaggtatgatttccagatgatgggaggagctggtcaagggcacaccgcacactcgacctgcaggacgatggcaccatgtgctttttgtttttctgaacgaatcggcaaactgccaatttcattgaataaagaatgaagaaaactttacaagtatgaaaggaaacacagcttcagaccttcggttcagtcgagctaagaaattaaaaatctagccagctaccaagatacctcgccccggccaatgaccacgtcttggcctcctctttgattttagccagtaggcttcccgatgatagctcctatgctggaagattatacagtttctttcattccagatttcccaattgaccaggagagttagcgtgcagattgctttctttgtagcttccttcaagctggcagtggcctcccaccatgtgttttactagtactttataagcatgatttacatctcatgcatttacataaagtttttgaacaagacaaataatcaaacatgtttttaaaagttaacaacgccatctattaaaaaagaggaaatagcaaacaaaattctatgcataattaactacttatgcaaacacattggctttataagttatgcaaagtgcaggagaaaaatatttcagtgacggtacaatttttttctctcgtcgaaacttgtcacggtgtctgcacgacaaaacatcacttgcaaccacaccgtgtgctaaggcaaaacaatccattttgtttttcaataatagaattcgtgtgtgcgtgcgttgtgagtgtctgcgttgtactgtgtaattttaaaaaaaagttacagctaattattataaggttacatgtcgaagactacgacatataagatcacaacttgattaaaaataagaaaactagttaaaacaccaatctaaaagatagagaaaacaactttcatctataattagcaaggatctgcatagccatttgtttcactgacgcttgcaagatatgtagtccttttttctcaaatcaagaaataccatctctaaaatatgtgttaaacccaaatttaactcctagagtaagaaataggaaactatagcctaatttataaagaacctagaccgcagccatcgggcgggtctaggcaacgaggcgggtcaggagtaggttaggctgaaacacgcccgccttcgctccgcgacttctccccccggccctgcagaggttgtcgggtaggaaacatcacccgtcccttgcctcgtaggggacccgacggatgagcggggcccgcaccacccggttgggcgactgaggtgacgagcgatgagtagctacgagagacaacgaggatggtcgagctccggcgacgcgccgaccaggtgagtacgacagcagacggcagcgaggtggccagcaagatgaggaggcacagtgttaacaccaaatttcggcaaagatattcggagttgaagatgaaaccgaagaggatttaaaggagatagttcgtttccaaagcaggcgacaagatacaggtgacaacacataatacctgaaactgtataacaaagcacaaaaaaaaacatacgataagattctgagttgtctatcacatgcattatgggtacaagagtcttgaaagcgaaagccccaggattattcagaagatagaacagatcatggtgctaccagacacgcaacatcttgacttgtgcttttccattcgaagtttaaccttcccattaccatcgccattgtgcccaactggcatcacctccacaccagtgaagactacaacactgtcaattacttcattatcattatccatggacctaatatggaagaaccttgaaatgcagaacctggcggagccgaggttgacaagctgcggttcttgatattccagccatccctcaggtggggcaaattcattccagtcgcctataagttgtggctgggagtcagaggagatcagatcagcagcagccagcaggcggcggctgggctcagcagagaggccaaaccagagcttgagctcgggcacgtactcaagcttgccagagaagaatggcagcggcatctccttggcaagctacagccatgtgttcatctccgtgtccaagcagtaggagccattgcctcagcccccacttctagcgtgaagactataagagaccccacgaagaccctactaaattttttttatcatatgtagatgggaggggactcctccactactagtgtgaagactaccccacgaagaccccactaactttttttaccatatgtgtagatgggaggggggactgtaactctatctagttttctcagaccccactaaattttttttaccatacgtagatgggaggaggaatgtaactctatctagtttcctattttttttaccatatgtagatgggagggggactgtaactctatatagtttcctcagaccccactaaatttgaccccactaaatttttttaccatatgtagataggagggggactgtaactctatctagtttccttataccccactgcatatgtagatgggagggggactataactctatctagtttcctcataccccactgctgaggaggtggcagtggcaagaggacttgccccaaacaaaggcctcaaattgattaatgtatctgacacggaaaacagagcaataaattagtacgtggttaattacttattagcttataaaaacttaaaaatggattaatatgattttttaaaataacttttctttagatttttttttcaaaacatgcaccgtttagcagtttaggaagcgcacacgcggtaaccgagagagtgaggttggtaacttgaactcaagaacacaacctcagctgcgtgccgtcctccgggtcgggatatctctccatgacatagaggctgccaccgccgctgctggggacgaagagagagatgggatctgacttgggcttgtggatgtttggcatagccatcacgctgcgggcatcaacgtcacagaggcgtgtgatcccagtgtggtccaccattaccaccttgcgatctgcaagggggaagcagtcgatattacgctgatcatagggcatatatgtgcatttcaacctcaacatcggtctgggaaaccgaatcctctctatttgtatccttaagccccgtttattcttcggattataggagtcagcagccggtgctgctgctgctgtgttgccgaacagatggcgcgtcaggtcgatggagcgcagccattgggcgcccgcgtaggaagagtccacgatgagattctgaaaccgccgcgataggcccatggcggattattcgatcccaatttcgagccgacctttgcttactgaccgactgtaaaagggaaggatgggaaaaaaaaagaagaagaagaaaggaaattatattgggtgcatggagaaaagaggaaaaacccctcagatcgatctaacagttatgagcagggttcacaatttcaacgaaaatcggccgaattccgcgaaatttcgagtttcgacacggctcggaattaagtttcgattggaatttcgaaggttaaactgtagatttggtccaaattcgaaaaccgattaaaatttatcgaaaaccgtgacaccgatggggctcgaaatttagtgatcaaccggtaatgtaatccctgattatgaggaaggaagaaatagtaccttaccttcaattcgcaaaacagcagcaaacagatgtagccttcaaatcggagatggcgtcacaaaatcctcctatcaaataccgcagacaaagaaaggatttggttttcgaccaagcaggatgaaggatcaatctacaagcgatgtccctcaaaaaaaaaaaatccgtcggaactcagaaagaaaccatcaatcatgggctcgtggcgtccatggatcgaagtgaaactactcgacccaataggcctatcaaaattcggcccactagaactgactatgtgggaccaggataagccacgtcagcgtctgtataaaagaagaccgttgactcgcctccctcctccgtcacctacctcctctcgactcttcgagctcatcactcatcacctcgtctcgccgccgctcaccacaccaccttccgatggatgccaccgccttcgcctccgctccgaaccctagccacgcgccctcctcctcctcctctctctccgcctcgtactcgcgggttctccgcttctccgtccgcgacccgtggcggcggcggcgggggcagcgcctcccgctccacgcgctccgatcgcagcgccccgagccggcgcccgcgtccgcgtcccaccacgacgtggtggttgttggcgccgggatcatcgggctctccatcgcgcgccacctcctcctccacaccccgctctccgtcgccgtcgcggacgccgccgtcccgtgcaccggcgccaccggcgcaggtaccctcagtgcgcgtgcatgtgcgtggggggagttgggtaatatggcctctagggttttgatgtcccgttggtgtgtgcgctcgcgcagggcagggatacctatggatgtcacaccggacgcccgggagtgacacgtgggagctggcggtgcggagcaagcagctgtgggaggagctccccgcccaggtggatggcttcgggggcggcggtgcgcgggagaggctggggtggatgaggacaggtaaaatccatgtgatggtgaattgctgttttttcaaaatttgtttgggggatttgggaccgatggagtcgcgtcgtctaaattgcttgccagagtgattataactttgtaagtagtggtgatttcagttagagagtacaatggacattaatggcatcccctagactcttacggtccaacagatttaacgaccaaggtaattgaggtacttttgtactccaatactccaggactgtaatgttgatgcggtagttggaaactatgctcgttcaatgatgaaatggcttatcatatacattgcattatgtgtactgtgtttgatcaaattttagttctctatggcagtcagagtctgaatgaaatgtgaaattctgttatcatttttgttaaggaagcttactagttgggagaacttccgaagagatggctacattggaggaaaggaccaaagctctatctcaggcaggaatacgtgcggaatgcttgtctgctgcttcattgcatgcattggagccggaactctatgttggacatgatgggggtgctatgttcttgcctgaagactgccagattgatgccttccaggctgtctcattgattgaaaaggtttcttctgcagaatttcgatttcatatttgtgcaattagcagtggtctccaaccgttaacattttcattcaatagaccaatggttcatattcctcagaaggaagatatatggagatctataatgatcctgccatgtcattagtaaggtatcaaggcctcttcttttcagataacttatgttggttggtagatgattacttgtctatcaggctactgagatgggctttcagctatgccaaaccatctacctctatctgcattactgataattgtgttaatttaatgcagatcagagactactggaacagttcaaggtgtccaaacatctaagcacatcctatatggcagaaaagctattgtaattgcttctggtgcctggactcgaaccttattgcgtagttttcttgaaccgaatcctacattggacattcctgtgatgccacgtaaggtacatgatacatctgaaatttcttgaatttacctgtgatctgaaaaatatttggattgaaatgatcctaatgacatgctagctaaaactaaatcattacaaattgttcaccacatatcttcagttcttccctaatatagtactaacatgatggtcatttctctgtaatatttaggaattacattttttttcttcttgtacccaactcaatacctaacaacattagggtaaaagaaacttcctctgttgtttcttaaactttcaccgagtccttatactcaactttgacaattactctttcctaattgcatgtttgtagaaattattaacttaagaaatgatacttttttgggggtaaatccactcagatcattttcatgcaagtatggtccacatctgtttgaggatgggggttgtaatgctgtagtcttccatttcagggtcatttgcttgtgttggataaatttgacaagcttaaactaaatcatggactaatggagctaggatacgttggccatcaagttgctaaatcaagcggcacacccctatcttcagaatccagtgaagatgagcatggtgctttatccatatcaatgaccgcaacaatgaatacaaagggaaatttaatcctaggtaatttatgaactagcaaacttcatcctttgtaacacgttttgttcgtgtggatgaaccaaactccttttcatttaaccaacttaagatacaacacaaaatgacagatgcaaccatgcaagatcaccacatttctatgttacaggaagcagtcgagagtttaaaggattttcaagagaagttgacatgtccatccttaaatgtatatgggaccgtgcagcagagttctttcctacgctgaagaatgttcatcttgatattgatgaaaacactgaaatcaggatcgggcaccgtccctttagtaagcccttctcattttagaacaactcaggaagagaatgccacatagtctttcaaagatatttcattgcaatgttattagtagttttttgctcttttatgtagtaccattggaaataaatatctcatttgtttcagtgcctgatgggaagccagttattggatctgttcctgatctgccaaatgttttgattgcgacaggacatgaaggaagtggacttgctttggtaagggcaatgtataaatctgctccagttagtagctttgtctcttattatttatgtagttgagcaatcaagcataggacttcctcagtccttggttctcctgatgacagggctacaggagttgggacgaataggcccaatagaggcatgtgtcctgtgtcgtatacagaaatagtcgtgttgtgttcgcttgattttttttttaatttgtagagattggttctactgttatctcttttaagaaggtacagaagttgatgttcatgtggtaaattttacttcaggcattaggcactgctgaaatggtcaccgacatgattcttgggaatcctggaaaagtggacttctcgccattctccataaaagacaggttttcaggtaattctggtaaacattttgtgataaatttatctttatgaaaatccatttgttatgttttcataatcacaatttctcttatctgcaacattgtctcactgatttttttttcttgccttgtactccctccgtttcataatgtaagactttctagcattgccca

SEQ ID NO: 9273 - DNA, 31628 bp, Oryza sativa
acatctgcaggctttgtcgtgaacgaagctgacaaatgtgtgtactatcgctatggtgggggagaaggagtgatcttgtgcttatatgtcgatgacatattgatctttgggaccagcctcaatgtgattgaggaggtcaaggactatctgtccaagagttttgaaatgaaggatttgggagaggctgatgttattcttaacatcaaactacaaagagaagatgagggtgggattacacttgtgcaatcccactatgtggacaaggttttgagtcgctttggatatagtgactgcaagctagctcctactccttatgatcccagcgtgctattaaggaaaaaccgaagaatagcaagggatcaactgagatactctcaaatcattggttcattgatgtacttggctagtgcaacgaggcctgacatctcatttgctgtaagcaagctgagccggtttgtctcaaatccgggagatgatcattggcaggctctggaaagagtaatgcgctatctaaagggcactatgagctatggaattcactataccggatatccaaaagtactagaagggtatagtgactcaaactggatatctgatgctgatgagataaaagccacaagtggatatgtgttcacacttggaggtggcgctgttttctggaagtcttgcaagcagaccatcttaacgaggtcaacaatggaagcagaacttacagcactagatactgcgacagttgaggccgagtggcttcgtgaactcctgatggatttgccggtagttgaaaaaccagtgccagctatcttaatgaactgtgataatcaaacagtgattattaaagtgaacagttcaaaggacaacatgaagtcatctaggcatatcaagagaagactgaaatctgtcagaaagcaaaaaaactccagagtgatagcattggactatgtccaaacggctagaaatctggcaaatcagtttaccaaggggctaccacgtaatgtgatagacagtgcatcgagggaaatgggcttgatacccaccaaaggttgcacaatagtggaaacctgtccattgtgattggagatcccgtgaatttggatggcgaaacaaactattgtgtgactgagagaagagacccttgaaaagggcttattttcatgatgtacttctcttctttcctgcatggtaggatggctcatgccttaatgtgatccgagtggcttttccaagcagagatgttgacctacagaacatctcggaaggaacacacctatatgagttcgactgctagtcacagtctatgaggtttgggcgatctctagatactcatgaaaggcctggagtttgacttatatgctccaaacaaaggggatgcgaacggcagcccagtaccagtcaagggtctgagtgaaacctgatcacacaaaacagacaattcaaggcatagtccattgttcagttttggtctgatgtagctcatttcctaggtggaagttcaacttaacagtcttcaccaaaaccctggtatatcgaacaggcacaaccttgagaacatttcttatgagccttgaaatttagtggggattgttagaataattgggctaggcccaatttatcctattaaatctcaaaggcccataataagtgttaaggataataataccacatcaggatttaagcgaggaatatctcaacctaaatagggagttattggaggctccctgttgactggttgaggtagggggtcggaaggccccacgcgcgcgcgcgcgcgccaggccgggccgaggccgtgggcgtgggcgaggcgaggcgtagcgggcgggcgtgcatgcgtcacgtcgctactcttttgcaaccacgaacccacgttcccaggactgcctccgcaacagcgtgtccacgatcccacacgggcgtgcatgcgtcacgtcgctactcttttgcaaccacgaacccacgttcccaggactgcctccgcaacagcgtgtccacgatcccacgttcccacgactgcctctctcctgatagataaggaggctgcgagtccgatcagaacgatccgcttgcttctttcccgggtgttagttcctcctcctccgcgcctgtgctgttctcgcctcctcgcttctgatcgcttgcatgcacgagagattggaaggagcagggcctccggaaccacaccttcgcctgagatctgcaccgagtaggcgggtgatcaggtttttagggagtgcttcccacacgactgctcgtcctcgcccaccatgtctgcgcctagagccggcgctgctgctgctgctggaggagatggcgcgcctggagctggagccgccggaggtggtgcgccaggagctggagtcagtgccgcgaacaacaacatcaacggaggcaattctgcctcacaatctagcggagggccattctcggggtatatctttctcctgtttctgttgttagcgctttactgctatgttcctgttcctgttattcatgatgcctttagcatgctactgcgttactgctatgttcttgttcctgatattcatgatgcctttagcatgctactgcgttactactatgttcttgttcctgatattcatgatgtctttagtatgctactgcgttactgctatgttcttgttcctgatattcatgatgcgcatgatgcatttagtatgctactggttatgttacatgttgtcactagatcaccctacactgtttatgccatgattattgtcttaacattttggattaaaatatgccgatttatgaccatattttcaacagtttatgtgtgtaggaaagttttgatgtgatggaaaagttggaaggttgaagaaaaaatttgcaactaaacacggcctaaagggaggagttaatactggatattcagtgaacatgagagagataatagttagtgacagatatcagttgtaattgctaaagcgataattcatgaaaccagggtttataaaggaaaaatatcggtaattttgtgtgtagatcaaaacttgtgtgcttccgatcataaatattgagccaccagttgcagatgacatcaattggagagagatgctaaaggacaagatcaaacaaattgtttcttgaatgaagtttgataccgcaaattaaaaatttgtgcttcctcgaacttctaatgctgtgttcgggaaccctcacttcctagcacgtaaaacgaagcagcgtcaaagataagatgagcagatattcaaagacgggagggaaagaaaacaaaacaagttgatcaaaacggcagacaaagcgagagagctcaaaggatgacgacttgacgagccggccgggtacagaaaagttaccggctccgggttgcttgctcgccgtcgacgccagcgtccgcgaggaccgcgaactggcggacgcggcgcgcaaggcgcttggcgtggcgctcgcgctcgggggcgccgccgcgcacgtcatgctcggcgtttacggcgcgctcaatagtgtgctcatcgtcgcccagtcggggccagcgtcgccgtcatcttcctgtgttggatagtatagagagagaggatactgcaaatattagacacattgtattgagcctcaggagactggtatatataggagtacatggagaggagataaagaaggattacagttatggaaagagtctacacaaatcaatcctatcttaatatgactctaactaccatatactctaacatcctggacgacctcctcgacaagggctacggcctgcacggggcgtccgccatctccctgctcgccgccaccaacacctgcgagaaggtggtgtggcaggtgttcagccccctgaccgtcgacaccgggcgggcgggcccggagttcgaggggatcgccgccatccaccacgccgtcctccgaccggccatgttcgccgccacctcccgaacgtgatgggcctgctggccacctgcgtcgtcctcctcgccaccgtcttcctcgagggcttccgcgtgatgctgccgctgcggtccagggacgcgcggggacggcagctcgccctcccgatcaagctgctctacacctccaccatgccagttgtgctgcactccgccgccgtctccagcctctacacggtgtcgcagcttctccactacagccggttcgccggcagcctgctcggcacctggaagaagaccggttacgccgccatccccgtcccggtcggcggcgtcgcctactacgtcacgccgccggcggggctatcccacgccgccgcctacgccgcgtcgctcctcgcgtcctgcacgctcttctccggggcttgggtggaggtgtccaggtcgtcggctcaggacgtcgcgaggcagctctcggtgcagcgcctcgccttgcacggggcgcgcgagcgcgacgctgctctccgctcgcacctcagccgctacatctcgacagccgccgcgctcggcggcctctgcgtcggagctctcaccatcctcgccgacatgaccggcgccattggctccggcactggaatcctcctcgccgccaccgtcgtctacaatctcatcgacgcctttcagaaagaggagtagccgagtagggttcgttttagtcattactccatgtttcataatgtaagttattttagcatttcccatattcatatttatattaatgaatctagacatatatatctatttagattcattaacatcaatatacatatgtgaaatgttagaatgacttacattgtgaaacggaggaagtactggagtatactatactgcattacaactttacaagtcagtcttttgcaggagtataatcattacttcttcctcttcttggggaggttttcgattatgatcaatgatccatgctccattttatttagcaattaattcttcgaaacaaaaagttatagtacatattagcaataggttgtcttgatattcacaaattactcctctacgtgctgataaaattaagctagtacagaaattataaggtttgggtttgaattatcgatatgaaaaaatattgggggcaccgataaacatgattatcggaaatctcggaattttattgaagataaaaaaattttggacaaactttgttagattttgcctcaatttgtgcatgaaatcaagtagattgtatctagagcatttggtataaaaaaaagtaacatatataatccgcaaatgaccaggataggtgcaaagaatcatatagacagtcaaagatcatagtgtcacgcatgcaaattcaaaaaaggctgaaatattcgaccgatactgtttttttttcggtacccaccgataaactcgatttttgaaaaattcggtccatgtttcgtcaataatgtgaacccttcccacctttactgtatcctattataagtcgttttgactttttttttaagttaaacttctttagctttggcaagtttttaaaaagttagcaattatctataacatcaaattagtttcgtaatattaaataaattttggtaatatgtttttttgaaaatattattgtgtttttctataaatatcgtaatttttttaaaaaaaaaagaatcaaagcgattaattataatataaatcagaggaagcagtaaggagcaatttctgcaaagcttaaccagccagagctaaaaacaagtttgggcgctgaattcttccacgccaaatcaggaattggagaaatcaatcctatggttttttttctgatcccacatgtcaagtattgttttcctcaaagaaaaaaatggaaaagaaaaacaacaccaaaccatccacccattttttttaagcaaagggcaaaggccctccattttcactaatagaattgagatagtagcatgtaagcatcaatggacatgttcattctagaatagcgcaaccattctaggctgtgtttagtttgtgtgccaaaatttttttaagtatacggacacacatttgaagttattaaacgtagactaataacaaaacaaattgcaggttccgtctgtaaactacgagatgaatttattaaacctaattaatccgtcattagcaaatatttactgtagcatcatattacattgtcaaatcatggcgtaattgggcttaaaagattcgtctcgcaatttacatgcaaactgtgtaattggtttttttcctccacatttaatgctccatgcatttatccaaacatttgatgtaacagaaaagttgaaagtttgacgaaaaaattttgaacctaaacacggcctaggactactactgcctcgagatctgtgcccgccacttgaccgaagaccaagttgcgcttacgtttggtgtttgtgttttacgagatgcatttgacagtatagtggcaagggatgtgtggtttcaaccctaaaatctcgtgttcagctcctaacacgtacataatttcttttaaaagaaatatctggagggacgttttcttgtttgtgttttgctgacggttgggccctataaaacgggcccacttagggcccgcccagttacagcctgctgcctaacgcaaagcaaagccatttagggcccgcccagtcgggtctgggcctgctattgctctcgcaacgcaaagcaattcatctaaatccgtccattgccgaacggacggtacagatctctttggctgacgcgcccggatcacacgaggaagcgtgtcgatgtgatgtgatgtcactcgtccaatgggagacgcccaaacaccgaatcagcgggccccacgccgtggcacttatgcaaaaacacccttatactctgtgaacccttacataatgttcacgccgtggtactaatagaggtcctaaatccaaatatctcattatgtaagggtttaattgtaattagggatcactccagaaggccagaaacctatatatgcagatgccaccctggagtctcgaaaatttgaatttcgaagaccttctccctctccacctcgctcctctctcctctcgtggccatggcgatggcagcaagggcgcgctgctcgaggcaacccaactcccatcgcctcctcgccgtggttgtcctcgccgctattctgctccttccggtggcctccgcggcggcggcggtggtggcggcggtggcggagggggacggggtggagaaccggtcggcggcgaggcagtgggcgacggggaaggacgagggggagctggtctccggggaggagtcgaggggaggtgggtcggtggtggaggacgagttcgcgggtgggttcggctccctcgacagcatgctgcagtgggcgatcggtacgtgcagcccgaatcccaaattctgcgattaaatctttagattcgctttgggattttgagattttgaagtgcgaaagcagcggatttcagtggcgctggcgaattttcagcccagtaatatgattgcaactagctgtgtacaaattggtttgattcgggttaattggaagtagagtgaatgagtggtagttactggagtagtattctgcacattgataatttattatagttttgtttgtgtgatgctcactttgaccacctgtagtcttaatcttaagctgttggaactagtaggctgttattgttactgaagtatgaagtttggttaattttggagacatgactgcattttgctgagttctaccttgttggtgcaggaaattctgatccggataagttgaaagaacaggcagagggtgtgcagaaattgtctgcagatgagctgctcaagcggcgaatggagatcaaggtgaaaaatactgcttcaggatccatcctctgattttgtgttgccgttggtttgtcaatgcattatcttatgacgctttctgctctttgtaacttattataatactggccatacccctagcttatagcagcagattggaacatgcttctgttcttgctgtggtttggattaccaacacatattgttctgatgccaactgagcaaactttatttcttgagcatttttcccatccttgaggaggtactatgaggtaccatgaggtacgaggtatcatgaagtaccaatctaatctaaccgttgatttagcaggggtatgatcggactaaaaaaacatgtgtactctcttcatcgtccgtgcccatccagcccaccgtcgtcgtcgtcatcgtcgccgtcgtgcatccagccggccgccgccgttgcccatccagcccgccgtcgtcgtcgccaattgaggccgccgccgccgtcgtgcatccagccggccacttgccgccgccgtcgcccatccagcccgccgtcgtcgccgccgtcccccatccagccggccgtcgtcgtcgccaatcgaggcttccgccgccgtcgcccatccagcccgccgtcgtcgtcgccgtcgtcgtcgtcccccatccagcccgccgtcgtcgtcgtcgccaatcgaggctgccgccgcagtcgtgcatccagccggccgctggcgtcgcgcatccagccaccgctgtcccgcatccagccgctcgccgccgccgtgcatccagccgcccccgccgccgcgcgtccgtccgcccgccgccgtccccctcgagcccgccgcgtccagccccctccagccgccgcgcgtcccgccgccgccgcgcgtccgtccgctcgctgtcgcccccctcgagctcgccgcgtccagccccctccagccgccatgcgtcccgccgctgccgtgcgtccgtccgctcgccgtcgtccccctcgagcccgccgcgtccagccccctccagccgccacgcgtcccgccgccaccgccgccgtccagcccgccgccgccgtcacgcgtccaggcgcccgccgccgtccccctcgagccagccgccacgccgctgctgtgctctcccgacgttttttctctctcatgaaacagtaaaggacataaataccctcccacccataataccacttcaatgaggaggtgcagtaccatgaggtacggatgatttctaaccgttggatgatgccagatcaatggtcaggatttggtactgcacaacctcaaggacagtaaaaaacctcttatttcttacattattatgccatcaatgctgtcataagagtgatattcatggaggtatcccaaatcaataacatgctctcagttagattttgtaaatttttattttatccgtgccttacgttgcactgttattgatcaaataaaaatagaacaatttatcacactcatgtaaccggatgatatgggctcctaattgctggtgatccttctctgcatagatgaaagacaaagcgtaagaatgttttcatgacatggccgtgttgaacccattgaatttttcttgcaggagttgatggagaaattaaagatgccgtcagatgctgacttaatgaagattgcaattgctgacttaaataattcttccatttcactggaggatcggcagcgtgcactgcaggaactattaattctcgttgagcccattgacaatgctaatggtaaacatgctctagtccatctgaatactatccactcagactcagtgctctgcacatcaagaaaaatatattcttataactttataagtacctcagattgaaaaatctaacttttggccttgtagatgtaggtgtcagtaatattatagtttttcttgtcatagcgattgttttagactaaggccgagtttagtttcaaactttttttttcaaacttccaacttttccatcatatcaaaactttcctacacacacaaacttccaacttttccatcacatcgttccaatttcaaccaaacttccaattttcgcgttaactaaacacaccctaatagtgatttaccgaggtactccaagcccaagcgtcacatatgtgtgactgaatgactgtgtatagttactagttttcaccaaaaaaaaaatccatgcttttttaatacaatgctcaaatccaatcttgaagttgcttgcttgtatttctgataagccagcagcattttcttttttttttaacaatgcaacttcaacttgcgaatatatttttcaaagtaataaatggcatgccaacatatggttcttaaatttgatgataaaaggcactggtagcctgttaatgaatgaacatgattcaacttatgaaaaaaattcaaaataaaaggaagtgcatgccaacatgcaaaactctgttccatttgatgaagcaagggcttatatttgtgcatgcagttcttagaatagtgatgttctaaaatatatgtttcttgtgtttattatcagatcttgacaaactaggaggcctcgttgctgtgattcaagatcttaataatgcaaatgaagaaataaggaccacttctgcatgggtcctgggtaaagccagtcagaataatgcccttgtccaaaatcaggtatcttcttgtttgttcgtcgaatctgcatcattgttgtttataaactttatgcagtgtccttagtggatataccttttaatagtcacttctcttgtgtggttaagctcagggagtagtgattcctctttgttgaaacttgaacacacttttgatcattgttatcaaactcgatgtttcatccttggccagatcctaggttatggagctttggcaagattagtgaagatgggctatgcaacttctgcagaagaagctacaaaggcgctgtatgctatatccgctttggttagagacaatataaatggtcaggaggcatttcattcagaaaatggaagtgcaatgttgcaggtagttaaaacctggtcttgataatattagcatttttgttttagttgtgacatttccctttttgcagcacatattggcgagtaatagtgttgacgttcggcttcagaagaaggcagtgtttctagtgacagatctagcagattttcagctaaattctggaaattcaggacttcctttcttaagtgaccgtatttttcttaagtcattggttgatatgctgtcaagatttgacctcgaccttcaagaaaaggtattatctgtggttctgtactgcttccagttctgtacttccttgtggttagcactgcttagcagcaaaattcttcactcgtcatcagagttgttgctgcttatgtgcaataatttgctgatttcttggtttatttgatatgcccgtactggaatgtgtgctgttcctcatataaggacttctgtcatatgtcaagagatgcatatgagcaacacaactttctgtctggaatctgttctttcagtttccatgagttacttatttgcttggattttaccagccatttccttcatagcttttactattatatactcaatctgatgttctgcacaaaaaggtctagaaatgtttgcttgtgtccaaggatgggagtaatgtttactccaattgacaaaaaattacaatgggctgtaaagtttgcctgttacaacataacgattgatcttgctctgtttttgcgtgtcatgtaggttttgttggctatcaagagcctactgaagctttcatccactgaagccacagatttcgagtcctgtgacctcagcagtgtactgtacagattgggcgtgcagttggaggagttgccatcagaagagcaaaaagagtatgctggggaggtggatgacctccggagagaagtccaaattctgttccaagacaagctcaaagaggtaaacaaatcacctcgcgcagttgctactgtaattgaggtggtgcgattacctgagctaacgtagcttctcttctgttataacctgcagggcacaaagactgcattgtgatgatattaggacgaattaacgacggatgtagtatgcaatggaggcattaaatttttcaggagtatagttgatgtttggggccattcttgcagtgatcagaatcctcagaggatcaaatggagtcatggaatatttatctgtggatcttcggccaggtggtgacatagtgtctgtaggatttgatgtaatcgtaggttaggattattaactgtatggcttcttttcctgaagctacctatggttaattcatcattccctgcactatattttaaccactgcaatgaagcaaattttccccttaagtcacctgtgtggctgtgtcttcctcttgagaatgtatccacgtgtactggaagttgatgtcgatcatctgttttctggcttgagaatccttcctcgttttgcactctgctcgagttaactgttcactctttccagatcatagagctgacagacagattaaatttaaacctgctatactcttgcttactccacttgttttgattgctcatggaacattttttggcataagcacacgcatagggacaaatataacgcatgcttgtcgcatttatttgttttaacagcgacgaaatttcagaccatttttcatagggtaatttggaaccatgctattataattttacaaattttgagatataccatcgatatctcaataatacgtagaatccacatgagtcaataacatgtgggtcatgattgcatatcttaaattttacaaaattataatggtatggtttcaatttttcctttttcatattgggaacctgagcacgtgaacgtctacttttcgcccttgaaatgaagccacgaagttggaagagcgaacgttgaacgcctacgtatttgcacgtgaaatggtcacagttttcgtcatgattatccattgcattcgcactagccaagaagcaaacttggcgtcctggaattttgcagcttggccgttatgatcggagagcggcgctcaccgtcaccgtgccaccgccgaggacggattgagatcctatacattcgaagttatcgtgtcttcagtcttcaccactaatgaaactaatccatccaccaactatctcttacaaagtaaacgtatatcaatgatactctctctcacaaagtaaacgaatatcaactggtttattttttttcgtgaaactagtttactcgagtttaaattctaaacttaacacggtgttcaaatttatggttaattatacttttagtgataggcaacatatcacttgtcccatcgacagcaagacgtccgtgattacttggtcaatctcaaaatatttaagtgtttataaggataatgacttcgctaatctcaagatataccaagtgctcataagggtggtggtttcatcaatctcaacatataaaactcagtctttcgaaagtgctcacagaggatagtgtacacattcataggggtgagtttacatgcgttgtgagtatctaggttttgtcatgtgtttctaacaaagaaaaccggataactttaatttcaaaaaatagttttaaaattttaaatcattaatataaaaatgttaagccctggttaccaaggtaaccgtcccgctatcctccgttccgttccacccatgtgccgcatgtgcactgcagcctctcgctttcgtcggctccatctcacagggttcatatcctctatcatgatgacaacaccattacatgtgggttccacctttatattattccatacatcaattactataatgatacaataagcacattgtaatattgtaatgtagggacattagagcaagtttaatagtatagccaactatcatctccaaatcatttatagccaatttaatagacaattcatataatagctgcttaatatactattaatacatggtctcacctgttaggccattcccaacccaacacactagacatagttttcataaactccacatcatcaagaaactagtactagacactactcttccaatgcaaacaccactattctacttaaatttaatgctacttatctcacatgatgttttggatgttgtgtagaaaccatgtctcatgcaatacatggtttccttctctttcctcatttatttacttgtcacatcactttttatcctagatggcaacttatttaatgctatggacatcatcctacttattgggttaggaatgaccttatacatatattacgttttatagtccgtgttacagctaactatggatagactgctgattatctctttcatcttttttatcttttttaaatatatgtttatagctggctattatagctgggatgctcgaggggtagatggttggctacctcgtcccctcccccgcacgctgcacgcatcccctctcctctccccctcgccatcctcaaatcccgctcctctcctcctcctcctcctcttcctccacccgctccccacccaccaccaccacctctcacctcgtcaccgatcaccgagcgcatttcgcatggaggcgctccggctgtcgggcccggcggcgccgcccttcgtccccgcggcgagggtggcggccgcgtggggcgcgcgtaggcggggggcgtcgaggtcgtcgtcgtccgtggtggcgaagatggaggggggcggaggcgggaagggggtgccgaccaccaactacgtggtgccgctcgacaaggccaccgggatgacgcgcccgctcgtcgagatcctccgggacctcaacaagcgcgtccccgacaagatcatcgaccccgacaccaacaccgtcccctggtcagtgctgctccccatccccccttcgatctcttctcctgcccgttccgctcttgcgctgcagaatgatccggctgatgttgcaataggatttaggcacagcgaagttatcgaattgatagggtgaatgaatgcgcgacatgaatcattttggggattttgctggagcaattgtcgcaattcaggaatttgggagtaaaggtggtgccattttttcacgtatcgcattggatggaagatttagctttgctttcaatagctaatgaattttccaccggcgcgaacaattcgatcggttttgccttgtgttaattacaaaatgttctacctctaccatccaagggccaaacagggggcacgtttcatcaactattgatgagtatgggtccactggatattaggatgattgtgagattcacctgttctgcagtttgcacctaccagaatggctgactttgtctgttacaaataaaaatgggctttaaggtagtaggctatgcgattaattggctaggctttatgattctttctgaaacaactaggctttatcatttttttcgaaacaactaggctttaatattcagatagttggtgttctacagccagcagtttatgctcttgctggctcgtttataggtttggaacatccatttgatgggagagttgcttgagtaacgtggtgttatcctgtttcgatctttgtttagaatatattatgaaaagtcaatggtcaaatgtttggtgtgtggatttgtttagttactcatttaatacaaggtcaaatggagacggttcttctagtctacaaagaggaaatggtctgttactttggaatatgggaattattagaacttcttagtatcatgccgtctttttttaaacgatgcacttatgtcggttcaatgaagctaaggcatttgtttcgttggtataaaaatgccatatctttgtgggatagaactttatgctttatgcataaatagttagtatttcctccgtttcacaatgtaagtcattttaacatttcctacattcatattgatgttaatgaatctagatagatatatatgtctagattcattaacatcaatatgaatatgaaaaatgctagaatgacttacattgtgaaacggagggagtagttaccttcgagctatttttttttttttaaaaaaaagcggaaactagagtgtcactaaaggatgaattacttgtgagacctaccctggtgttgggagagagtggtgcccctaggctctagctgtctgcagatctccttaaaactatgtgtaaaggaattatggaataactaatacttcttctgttcttttgataagaaatgttgttgctacatatgctggattaaactagcaatggaacagtataaattcaaagatattttcgtcactaacacacaagaataatcgatgatgctaaattgtactgacataactaagacttctgcaatgactactttcctatttttcaggtttgacatgaaagcgtttgcgtgtttcattgcttccttttgtgtaatgtaatcattgttaatatttgactctgcaggtaccatgccaatagaatgctgagcttttatgcaccaggtgaagtctctttaagattacaaactactttgtgctttctttcctttgattagaacattcttttctgctggttgctggttggttgtactatagtttggcgctcccagatatttctgtatgacactttagttccaaagtggatgtgtttttgttagttcacagccttcacaaatctcacactaagcaatgtcatgtaaatcgaccagttcctgcagacctgctacaaacgaaccttgaaagatggctggttacagtttgatggtatggtacttggtaacagctgtatgttttatctgataaaacattataaggtgtattttgttggatagagctattatgattgtagccctgcataaagattcgttagatagctaaacagaagctaggaactaccacattaggtatttaggtggtacataaattggaacatccactgcagaatgcactggagatgcaaagaaatgtgacgaaactattcttttttcaggttggtgtggagaagttcgcaatgttatttattctgacaatggaactgtaaccgtggtttatcgagtgattctgagaggaacagacggagaggtatttcatctttttacactgcagtattctacatactatgacatagttgatcataacacaacatacatgaaaagaacaacctactcgtactatcttgtttttgtagctgcccttatgtcaggtcagcataacccctgtatgtgtgtgagtgtaggcatacagagaggctactggcacggcaccagtgcacgagggccgtaacgacgatgctgttgcggctgcggaggaagcagcgttctgcaaagcctgcgcacggtttggtttcggcctctacctataccaccaggacgagatcccatagagatgaggatggctttgaggctcatttctgcagaggatctggtggtcacaaagtttgtaggaaaaccgcgatgaattttcgcaccttgctggtagcacaaggcgagcttttgctgatgcatatttacacaagaaaagctttaatttgttgctgcctcagttgttaaatgtattgagtccatgtcgtccagcatagtttgtcagataggaaaagaaacattaaaatcgtgccgttgcatagttgctgtgtttatacccgttttttgtatttgagtccacggatggatatttttgttgtcatgataatgaagttgcttcgacaattgactacgactcgctgtttcttgtatctcttcgcacaaacttgatcctcgaattttggtgacacaaaagctttattaattgtttttccgtatggctgattaaacgattatcaagctctgtgactaaatcatttgctatttgggttagaatcttatcaaaatttggtagagatttgagagtggaaagctccagaagttgtgttggtaatggtgttttaccctatcaaactttaattgtgctactaaaatttagtaaaattaaaaattgaccataaacacgcccagaatagcagtaaagaggctttgttcgaatcaatacatggctcaattgattattaactatatttaacacgaaaataaactaatttaaattatataattttatttcaaaacacgtcatcaagtagtttgagaaaatgctcgcgagggaatagactagcctgataagagcaaggtcaataatatagccagcagctagcttcacttacctttatattttatagctaatactaaagccaactagtacaatagattagctcttatatatagactgcacctcagtgatcaaataattaattatgtgtgccaagataaatgtgtatgatcaaaactaaactatatctgtgtagccatctgtatgatgtgaacttgtgatatcaacaagaattcgtaaaaaaatgattagtctttagataattactgctagtgaagtgttgatggaaagatccaaatcttatcacaattgcatcgctcctaaaaaaatcatctactttgtgtaaataaacaacaggtatatatcgagagaagatgtaaaaagaaacagaaaaaaagatccccaaatccactgacacaacagaactcagaaccacttcttctagctgcttgtttgctcaatcaacagaacagccacaaggcggcatgagatatggcatggcaacaacggcttcttcttcttcataaggacaacatcgatctagcgcgcagcaaccatcgatctgatggttcagcatgagaggaacatgatatatgaggtgcgtgggctttgatttggcaacagtggcggagcttcgcggcgtacgtggtttccaacggcggtggaaattgactccgaatctctgatgaacggcggtggggctcatgtggagtaggagtaggcgatttgtgcggacggaaaaagtgatctagagcaggagaggtgagagctgatgtagggaaaaaagtcacacgggatcgatggggttcggtgtggcccaattttttatcgcggaatcgtgtgtatcggcgggcgatagaagtcgcccgtttcagtgagctataggcttactataaagttaggtggaggagagaggtagtgaaaaattaggaattttggctctcatgcaagagttatttatcacaaattccaagacaaatacattaaatgtataagtgagagatagagtgaggagaaaaaaattgtagcaaaccttatagctaatctattactatatatatgttttggctttaagatgggctaatagtaggaagtgtgctatattattatccttgctctcattctctctctttgattctctctcatgaatttaatgatataaattttttttaagcctgctaagtagaactattgtacctgctcaagaactcacccttctagcttctgttcggcccatctggaacacactggacaacccgaaccgaaccatcaaccaaccgtccacgcaaaccaactcgccacgtagacttctataaaacccacgagcccgaatgcgcccgcgctcgaacccacccaaaaccggccatacataggcacgtagccgcatcgaaccggatccgatccgatccgacccaaccgcgaataccttctcgtcgaagaagcatcgaatcgatcgagagagaccgcgtgaccatccgcggagttcgtcgtcgtcttcgccttcgtcttctccatccaccaccgcgctcggcgaggcgatccaccggcggcgaggagaggcgcgcgggagcggccggagatggcggagaacccgcagctgttcgggaacgggatgctggtgcccttctacggcgagatgttcgtcctcgcccgcgacggcgtcgagttccacgtcgacaagatcccctcgtacgtcccctccctcctcctcctcctccgcgtgtcctttccggtttctgccgcggcgaggcgaattgaattgagatgctggggcttcgatggcgatcgggcgagggatcgtggtgtcttagatggggggaattaggggattaggttaggcacagcgggtgtgatattggcgcgccgaaattgagcattgggctgtatgatttttgtccgggtggaactcaacgctgaaattgagcttcgcatcgagtctaattggcggttactttgttgatctgtacgggttgataggttacaaaccgggacgcttaatcttgctttggttggaaaattacaaaatgttatctccttactgaagtacagcaactatggaaacagttagggatttagtgtcacaataatgagcattattcaccatctcattaccacgaggaatgcattttttttcattacattcaagtgttacgtttatgttccgtcttgaaaagttcatcttcgttgtaaattaatcactgctttggggcttgggctaattagtcttctcttgtggctgctatgcttgtcctcagagctcctggtggtcatgcgaaaacaaagggcacaatttacctgtcaaacataaggatggtctttgtcgccagcaagcctgttgggaacttctttgcttttgatatgcccctggtgagtaatggcagcctgaaactgataggagcaattggtcaaattttgtcggtatgatttgtttgatggtttcattttgcatgatagtaaattctaaatggtgttgcatggcaaactctttgcagttgtatgtgcatggtgagaaattcaatcagccaatatttcactgcaacaacatatcgggtttcgttgagccggtaagtacttgagcatcacgggaacacatggatatataatttgacatatttggtgcggcactgaccttggaggttataatgcaggttgtaccagagaaccagaacagggccctgtactcgacccacactttcaagatcttgttcaaggagggtggctgtggtacctttgttcctctcttcctaaacctggttgcatctgtgcgacgctacaatcagtttgaggcccagtctgccgcaagtatggcgccacgtgtggacccgctacaagctgttcagactcctgttgatgatatgatgcgtcatgcgtgagtgctcaacctatctagtttcctggtgtgccatctgtttagcttttgccctgctagaaaactcacatgatctactatctacaggtatgttgatccgaacgatcctacaaagattttccttcagcagcctgcgccagagtcacagctgaggaggagaaactaccacggacgggctgacaatgcgtactagtgttcttacctgattgcaaagaacccatatgttcgagcctatgaacatatggatttcggcctctagtcgcgtatcatgctattacgtgggtgtgaaatgaaagcttcatgttgcccagaaacctattgtatatcttttatgccatattcagttgcatatctcaataatggtgtacatattccgtagtcctctggacttggtgcaaaaaatggtttatttgatcccatggtgtatggaattatcattgctcgtgccagcttgtaaatcacagaaacaatacgattattgcttgtgttagggattcttttttctttggtcacaggggagactgaaaacagatgagtaatgttggtaagttaggttgggtgtttctgaattacttgcttttttttccttcctgactttcatgttccttgcaagactctgaagagcaatggcttctgtcaaggtgcaataaataaccaagctaaccttgttctgttagcttttgctttgggggatgtggcagcatggcatgtgaaaaattcttagggaagatctcactgtctgtataaaatgtgttttttaagcagagttacaggcattcaggaatccaaatcagcaggtcttcaggatctgaatatgtaataatctgggttcttatagttatatcgatttcgtcaacaggactgttgtgtactcctctaaattttgctttcaataaaagcaaggaaaatgtcgtctgtaaatatatacagacaaggttccatgacaactttgattgataaacaccacaaataatgtatacgtgattaattcaattcacattggtccacttgtggcattatgtgctaccaaaagtggattgccaccagctgccagagactcaacatggaaaatgtcaggcttgcagcttaaagctgcaaacgtggggctgacactggaatttctgaaaacaacaagagcaaatgataaacaccaggcctttgatggtaatctatcttcttgacaagttcctgaacacatggcgatactgaagtttcttttggcattctgattccttccatccatttgcttgcttgcacattgtcaggctgcacggatagcagcaatatgactggtacaaaggaaaacagacagccgcaagcagcagcatccagaccatcaagtccttgtcgagacgaatttagatgcctatttcttcttttcttttcaagggaaaaaaacactgaccgtttctaaggaatgttgtgaacttgacaagtgatctcggtgttagtgtgtcattgtctcattgactatcttactttcacattcagttcgctgaagcgggtagcatttgcatcattcagcttcagaagctcagaaccatcatataattacaagaagtttctttgtaccataaccaggtttttcacatgtgtagtggtagatgaatgaatgcatctactacttacaatggaaccatcttaccttcagttctgcctgctccatgacttcatgtaatgaggttcttatagatgatcatgaatgaatgaagctggtagttgagaggctgtatgaaggagacagctcttctgctcgcaacagcaccaatcatccatggagcaaatactgagtagcaggagaaaaacacagcaccacttcagttcagttgacaacctctcgagacaaaacaacagtatcagacaattttgtctgcaagaaaaaagaggcatcttcttttttcctttttctttttctttatcagacaattttgtctgcaagaaaagccgacttgagagtatctctatgtatgacggatacagctcatgattggctgaaagcttttctttttttttttggcagaatgaggaaaagaacagctctctatgaaaaggacattcagagtgcaagacgaaacctcagctgttttagtttttttaaaaaaaaacaacccgcatgaggtagtgcgaggtttcatattaacatagcggaaaaaattacaagattaccgtccgaaagctataacctgggaaaagaaagacacactaccacgtgatagcgactccttacatatcccaggagaagcactagcaccaagtcggccgccgctatacgagatcgatcgcgctagtcctacacaggatatttttagcaattttgatattgtcaataagtcagttccatctctgtgtttgctgtcacaactagtttcagttttggttttgctagcttgagcggtttgctgccatatgaacagaggaaagtttttttcagatgcatcacgagtgatcgatcgatgatgcagcaaaggatggacccggttttctataacgcgtcgcaatgcaacttgctcttgtgggcagttcagcagctggttgtttggagtcccactcaacaagatagattgatagatgcatatagatcaagaaggagaattgtataggcacccctactttccaatctactccctccgtttcaaaatgtttgacaccgttgactttttagcacatatttgaccgttcgtcttattcaaacaaaaatgtgaaatatgtaaaactatatgtgtacatgaaagtatatttaacaatgaatcaaatgatatgaaaagaataaataattacttaaattttttttgaataagacgaatggtcaaacacgtactaaaaagtcaacggtgtcaaacatttcgaaacggagggagtattaatttctttttcgattaaacgtggcgaatgcatcccttaactatcgaccacccatgcattgcactccatatgtaacttggaatcggcaaatgcatccctcaacagtttgaaacagactcaaatagacgaaggtatgaataattctgtaaacttcgcaagaatctataaaatttggttaaaaaaacactatcctaatcaccaactaattcttatcaattttcaaggaataaaaaaacaaaagggcactagaatctaaagtttttaagtttcaccctttctccgtggagatttcaaacaaaaaccacacaagattctacgacttcatttaaaaaaccatgccaatcaccaactgattcttatctattttatcaagtcaaggcacaaaaagaataaaaaggacactagaatccttaagttttcaaatgccatattttccctgtaaagaattcgcatataaaccacacaagatcctactataattttgttagaaaaaaatatgcgccaatcaccaactaagtattactctattcgttatactatagtattatactataggccgttttaacttttcttctaatcaatttttaaaatttgatcaagtttatataaaatatagtaatattttcaacacaaaacaagcatactattaaaatatattcaatgttacttctaataaaacttatttagtgttgtagatgttactaaggtttctataaatccaaagaaatttaactcgagaaaaagtcaaagcgacttataatatgaaacggaattagtatctattttctcaagaataaaagaaactaaataaaaagcactcttagaatccttaacgtttcaaatttcatccttccccgtaaagaattcgtattcagaatcagggacttaatttgcaattagtaatttaaaacagggttggatcgtataataaaaaagtactccacccccacccccgtatttgatcctagtcagccacccctgcttccttcttcttcccaagttctcatcgagggttttcctctctctctctcgcatcgcatccatcccctcgtgtcgccgccggcggaggctgcggcgagccttcaccccccacccgcccaccgccggcgagccacggcgtgggcgacctcctctcctctcccgatcccctctcgcccttaggtaggggcttctccccagtccccaccacacgcgcgtgcgtggccgacgagcaccccaggttcggatcggatggaaggtatgatgatgatttgttctcgtctcggtgatctccctcctcgtcgtccttctccggcgcgtcgctttcgtgagtagatcggagatccgttcgggggttgggggtttgatttggggtttagtgaacaccctccccaatcccacgtagccgcatcgttaggtccgcctcccagtgattatctagattgagatttcgatcttgcagtttatggtgtacagtatttagagtgacaggtcgaggtgaaaggaaattgaatctcccttgctgctgtcgtgagatttaacttgcgtgtggacaggtctaggtgaagggaattcaacttcacctgctgatattataagatctagctttgggtattgctgctttataagaattattagctttttattttttttcatatcaatcaattcgaagtccttcactggtaaagattcttaactcttgagtagtgcttgtgatctggcttatgcgagtagtttgcatcaagcaatgaataaattattctatagcctctgataagctcctctttgtctgcccaattacctttttcagaccagaagaaaaatgcaaaaccagaggggtcttctggctcgcaaaggggagctcccccggcacctgatgcaggccttcccaatccttttgatttttctcagtttagcaacttgctcaatgtaagttcttttttttttcgcgcagctaaaagcatgatatgtgctctctttttgtgcatcacttatgtttaactgtactattcttacgtacacaactgtaatgtgatgtgcaggatccatctataaaggagatggcagagcagattgcaagcgaccctgtgttcacccagatggcagagcagctgcagaagagtgctcatgtgaccggggaacagggtggccctgcattggatcctcagcagtacatggaaacaatgacacaagtcatgcaaaaccctcaattcatgtcaatggcagaacgtcttgggaatactcttatgcaggtatcatgttatgtttccagagtcatcaccagaaaaaattttcagaatgtttcttcgcttcaagttttctgctacgcatgacaggatcctggaatgtccagtatgctcgagagtttgactagtccttctcataaggagctgcttgaagagcggatgtcccgtattaaagaagatccctctttgaaggggattcttgatgagatagagagtggtggtccatctgctatggtgaagtaggtgttgtatgctagtatttagatataactgtggcttttaaatttgctgagatggtttgcctcacttatttcaggtactggaatgaccctgaagttcttcaaaagattggtcaggctatgtcaattaattttccaggagatgctgctacttccactacattgtctggacctgaagaaactgaagaggatggtggagatgatgatgagtccattgtccatcatactgccagtgttggcgatgcggaggtaatgaagttcgataataactataggacgtgacttctgtttttactttgctctgagttgatctgaaacttgtgctggtatctatccgtattagtcttcacgactatgtgtagctatgctgcccatcaatgtagcaggttgtttacccgacctatcactatacaacaaagcttgcttctccaactaagcatatgactaaaccatgcttttcctagatagttctataacataacctggcttcttgttcttaaagctttgtggaccacctgcttattgtgtttattatccatacaccgtttgcctttatttggtgccaattctacacaaatgctacgtagaaaaatgacttctgtttgttgaatctgatatacgcggggtttaaatcagggcaggtttctcatttggctgccctttttcgttcttaatgttcctgatctttgcactagatatggtcgctcttgatgtcaatctcttatttatgtttgagcctgaggaaatatattaaatcattgtactactcatttgctgcaagtacttctttatacaacataatgactcaacagggtctgaagaaagctttagaggatggagcagacatggatgaagaagacgctgagggaagaagggccttacattttgcgtgtggttacggtgaggtatgtggaactgctgaatggtttagaatagaaatgaatcacgtaacacagattaaatacggatgtttgtagcaataaccaattgggtgaacttgtctgttttcagttgaaatgcgcagagatccttctggaggcaggtgctgctgtaaacgcactggataagaacaagaacaccccactgcattacgctgctggatatggtcggaaagaatgtgtggatcttctgctgaagcatggcgctgctgtgtaagtttaaaccagctatttcatctaaaaccgagtcgatttgatgccctgctagtttgtgcctaacttgatgaaaattgatgaccccagcacgccccagaatctggacgggaagacccccatcgaggtggccaagctgaacaaccaggatgaggtcctcaaggtgctcgagatggacgctttcctataaagaaaccaatgccaaatctcacgctcatcatcaccggctcgtcgctttacagttcagatttttactgcatacccaaatcatcatcgactcttttagctttggttttggtgtggtggtggtacattcgttgaatcgttgctatgtttggtgctccgatttgtaatctgtttcacttccccgttacactgcatcactccgtttcatcctttgtattcctatgttgctgagtctggtgttgcagacgttgctcctgtttttctcagcgttttcgtgtcagattggtagtttatatagataagagatgcactgccccggtgtacatgtgtctcaccgtcgctggtgccgtgtttgaacggtgagaggccgatcaatgcacgcgatcaagtgggcaatgcgacctcgggtaggtgacaaaacatggtgatctggagagtgcgggaagcgagcgcttcggtggtgtttgtttttaccctagacgaagctacacgaaaaatggaaaaaaaactaatattgcatgattaattgaatattactaactgttacaaatttagaaaatagatttatctgatattttaaagtaattctatataggaagaatttacacgaaatgtgtaatttagagtttgaaaacatgctaattaaaaactgagataaaatggagtatatcttaattacaaacgatcatgggccttcgtcgtcggattggagttcttctatccacttctattttcttccatgttgccattttgggcggatgcaactgttgctcaaaacgagcttatccatatgttgaattgttgactgagattggccggggagagccgtacaagttttagggagcaggagaacgacaagtaaaagaaacactttcatgcgtacgtggacgccgcagctgccgagctaggccttgaatgcttcgaacgcttcatctcactcactggcaggtgggtcccacctcagggattaaaccacacgtcagcatcttcccctcttaaagacgaatataccccacggattccctaccatacctactagttcgcgcacggtctcagtgtcactgacactgggcccccatccctgtggcccacatgtcatcgacacaaagaatgttttactagccacgtgccgaagccgtcgatggccgcggggggcaaaacggcgaggcgacagccgccgtccgatgagaatccgacggccagggtgccgccgtcagctgcctccacccgccgcgagcgatttgaccgtgcggtgacggtggtgaggccgccagccacgtcggcggcggcggcgaccggcggctcacttcgagaagcgtctcgcctcctcctcctcctcctcaccattaatacccccccacccacgccgcgcgcgcgcctcgccctcgtgctccatgcgcgccacgctgcgagggcgaggccaccgtcgccatggccgtgctgggagtgggcgccgccgtcaggctgcggctccgcgtgctcggccgccacctccgcctccgcgggcgcaggcgcacgcggcggcggcggggaggtggtggggtggaggatgaggaggaaggagggagggaggcggtggtgctggtgtccgggatgggcgggtcggtgctgcacgcgcggcggcggtcgaaccccaggttcgacctccgcgtctgggtgcgcatcctccgcgccgacgccgacttcaggaagtacctctggtcgctctacaaccccgacaccggtgggtcgcgcgcgcgcgctcgtagtgttcgacgaaacgtttgtgtgtgagttggggtgcgcggtttgtttgaacgagagtgattcggtttgctgttgtgcgcagggtacgtggagccgttggacgacgatgtggagatcgtggtgccggaggacgaccacggcctgttcgccatcgacattctcgatccttcctgggtgagctagcttctgggtgttagttcagtgaagaacactagaaagagggtttgtcttttcttgctttgtaagaatggtatatttgcgagggtattagttcttccgcctttacttgagcgacggtcattcgttttttttttaaattgttaaccacgccacatttggtgtgtaatactgataattggtgtcactggtgccgtatcaaaagtacatataggttaagtgaagccgtagtaagtactaacagctagaccgtgcgaaaatatttagtaagtggtagcatgcccccgtatcatgcctatgggtatattcatgagcactagcaattggtgatttgatgctgctgcttcgtgatttctttttgtactcatttcttatgttgacattgaagtggaggagcgtgtgcttttaagaaaaagccattgatatttgcttctcagatttcatgggatagatagaatctaaaaagcagatatttgtctgtgtagtgcaacaatactgatgtgttaaatcaccttccttcttcaactagtcacactcaaagaccataatgtttctgatttgatttttcctctatcttctgtaaactcagtttgtggagattctccatctgtctatggtgtatcactttcatgatatgattgatatgcttgttgactgtggatacaagaaaggaaccacactttttggatatggttatgattttcgccaaagtaacaggtacgatctatgtgggcttatttgcatagtctcgagtcttgactcaatagcatcaaaaaataaattagtttgaacattttactgctgagcaaacacaaggtgctgtaattatgggtttatctggcaggatagacaaagtgatggttggtttgcgagcaaaacttgagacagcttataaggcttctggtgggaaaaaggttaatataatatcgcattctatgggtggactgctagtgagctgcttcatgtctatgaaccgtgatgtgagttttcatgattagaacagtctgttgcttactaacaatcgtattctgtattcaatatgttttctcttttctccatttttctagatatttgcgaaatatgtgaacaaatggatttgtattgcatgtccatttcaaggtaatatatattttgacattctgcacttatagttgctctattcttgcgttgatgacctttgataaaatctgtgttctatgttttttggttttacatcttggcaggtgccccaggatgcatcaatgattctctgctaactgggctacaatttgtttatgggtttgaaagcttcttttttgtttctagatgggtgatgcatcaactggtaaattcttgactatttcatattctgctagctgagtttgtgtatgcttactactgtaaatcttgttattacattctatataaaaacaaccaccgtgtgcttttcatctcctacctacagtaggggggtccctattggaaatatattttaacaaaaaaaatgcatgtatattcacatatattcaaaggatgaggaatggagctctagaataactaaactgctaatgaagggctacacaatgatggtcctctgcaagcctgcaaggattttttttattgtgttggttaagttatttgtttggtagcataatgctattactcctgctcttggttgctaatgtttagtcattattttacactgaccaaaatcaaaatcaactatcattttgaagttttcattcactcaagcatgtccatatagcttcttacagttctcgaaatgaattatgtttacccttctaagttggtctgtcacgtgtgcagcttgttgaatgcccatccatctacgaaatgctgccaaatccacatttcaagtggaagaaagcaccagttgttcaggtttggagaaagaaacctgaaaaggatggaatagcggagttagttctgtatgaagctaccgattgtttatctctgtttcaagaagctttaaggaacaatgaggtagtcactctctgcttctaatttgtaaatacttttaaagcataagaaattagcaccgcactaagcgttactatcaaaagttgaaaaatcttttacatacagatgagaactactttgcgcactaactggaactaaatcatcacaccatcctttagttgagagggaaatacccagatagtatgcagaaggcaaaagcacgttggcagttggtattactcatgaaaaacatagtaatgctgtctactccattgatttgacaatgttaaaatggtttatagattggtggctcacttcgaacaattggagataatgtttactgcatgtgaacctttttttatgcggaactgcctatgtattaacattctgtgtgtacccacatctgggagaacttttgtcctgcccataaaaccattagtcgata

SEQ ID NO: 9274 - DNA, 4305 bp, Oryza sativa
gaagccattcttctgggcctaaaaatggcgaaagcattgggggttcggcgcttgctaatccgaaccgactccaagctggtggcaagtcatgtcaacaaatcctttgaggtagaagaagaaggaatgaagaggtatttggaggttgttcgatctatggaaaagtgcttcgccggcataacggtcaaacatttacctagaggccagaacgaggaagcagacgccttggcgaaatctgctgcttgtgggggcccacactctccgggcatcttttttgaagtcctatacgcaccaagtgtgcccgtggagagcctggatgtcatggcaatcgaccaggcagaactgggcgaagatccaggcgactggcgaaccccgttcgtgaaataccttgaaactggctggcttctggaagatgaagcagaagcaaagcgcttgcaactcagagccgcaaagtacaagatggtctcgggccagctatactgctccggggtgcttcaacccttgtttcgctgcatctcctttgccgaaggcgaggaaatggcaaagaaaatacaccaggggctctgtggcgcacaccaggccgcaagaacagttgcctccaaagtgtttcaacaaggtgtatactagcccaccgtgttgaaagtctgtgttgagcaagtcaagaagtgcgaaagctaccagtgccatggccgaagccaaactgcgtcccaatatgagctgcagcccattgcaccaatctggcccttcgctagatgggggttggacatcattgggctgttcccagtggcacgaaatcgctacaagttcgcaattgtggccatcgaatacttctcccgatggattgaggccgaacccctcggagcattcacttcggcagcagtacagaagtttgtatggaaaaacattatttgccgtttcggagtgccaaaagagttcatcactgacaacggcaagcagttcgactctaacaagttcagagaaatgtgcgaagggcttaatctggaaatcaggttcgcgtcggtcgcgcacccacagtcaaatggggcagccgagcgcacaaatggtaagatcctagaagcactaaagaaaaggcttgagggggcagcgaagggcaaatggccggatgaaatgctgtctgttctctgggcccttcggacgacccccacaaggccaaccaagttcagcccattcatgctcctctatggcgatgaggcaatgaccacgacagagctaggggctaattcatcaaaggtgatattctctgggagcgaagaggggcgcgaggtatcgctcgaactcttggagggggtaagagtcaaagcactcgaacacatgcgcaagtatgccacaggcacttcggcaacttacaacaaaaaagttcgaccgatggagctgttgcctggccatcttgtcctaaggaagaaggcgaacccggtagccgttggcaagcctgaatcgaagtgggaaggaccgtacctcatcaaacacatgtctaggacgggatcctttcgactggcgacactcgaaggcgaagagttcgaccattcctagaacactgcatctctcaagcgtttctttgtctagaacgggtggcacccaaatcgccaacttgtaaaaatgtacataccattatgtaagcctttcggcactatgtaagcctttcggcacaaaaatacaaaaaaaaagaggaaaatgaaaaaagaaaaaaaaactggatgtagggctattatccatcccggaggcctgaaccagtataaaatctttgtgtctttcgcctttttatttgtgtaattgattatttgtggaaaaaccctaagacaaacgcctgatcagcgaaaataccggggggggggggggggcgaaacgaatcggccgaagcatcgctcgccgaatgttgaaaccgtaacagcttgtttcgggaaacaactaaccgaacaccattgcactcgatcaaaatgaaagcacgaagtgcttcctccaacgtagaataaaatggatcgaaaatggaagccgaaagctgaaaagtcaaaaacatatttcgctaatatacgcaaaggggtcgacacgttccggcccaacgaaagcacgcgaagtgacaatgcaaaaatagcgaaaaggaaataaaacacatctttattgacttcgaataaaaatatatcggagaatacaaacccaacaacatggtacaagtaaaagaaaaagcaatagctttacagcccagcttatagataaattacatcttcgcccccacaatcactctccctttctaaggaagggtcgggcgaactgggttcgtcgtcactactaatatcatacacgactctaagaggagaagggggcgaaacacagactagactgtaacgacgctgggagatcgcctcctgccgatcaatcttcatttgccctagagatgtccatcgacccccgactttgtctatctccatccgtgtacttttgtttataaccagactgagccacaaactaagccttacccactagacatgtggaagtacggtagtgctttgcaacagaggcccgaagaccggtccttatatggccgaggtgctaccatcaaaaccatgcaccccgtgcccagcctaaaaccattttgagggttttgaatagagggggaggtgtgaatccaattccacaataatccaaccattccatagtgtccaggtgatatgaatattcccaaagtctaaagttgtaaaaccacctaatgttgcctaattaaccagcgaagcatctacctaaattcatactagtggtaccatgagtggagtgcccactagttggggttttgtttattctagggtgaacaaggtaataataataacaatagaaataataataaggtcataacaaaggtaaataggcatggctgaataaaacagtgataacgcgggaatttaaataaagcgataatgcaataatttaaatcaaaataattttataaaatgggattcaatatgttcaaggatgatgtgacttgccttgctcgctttcccaaaggtcggcttcaacctccacgaagagcggatcttccgaagctgcagcgtctacacgaccaacggaaagaaaaaaaaggcttttactctaataaactccatataacaagcaggaacaaagcacaaaaatgggttcttgacttcttaaggaaaaattagagacttgaatggtccaattctgagttcaaatggccaagttatggccatttgaaggttatatgctctttaaatgaatatttgcgaattgattcatttaaatttaaatttaaaaagggtttattgcgtcagccgagggggaggggcgcgcggaccgggtctacgggcgccggccgccgtgggccttcgctgccgcctcctagcccctttaaaaggacccccggtgtcttctctacccgtcgccaccttcgccttcgcctctcgtcgtccgtagcgccctagcgccgtgtagcttcgcgccgccgtcgccgccgtcgctccagccgtgcgccgccgccgttccggtcatcgccgtcgctcgggaagaccgccgtcgtggtcgccaagtcaccgccgtcctcgtccgccccttcgccgtcgccgaagaccgcccgagcaccgtcgccatcgtcaagccgaagagctccgccgtttcaacctcgtcactgtcgccgtccgttggtcttccgccgctcctttcgtcgtcagtgagttcgccgcgtcgcgctctacccgttggtgtcctccgttcgtgccgaagcaccgccgttcgccggtgagcttgcgccgtccgagctgtcgagccgccgagccgccgccgccggtggtgacgtcatcgctgacgtcatcgtccccgtctcccgtgagccggtcgtggaccgatcgatctcggccgtccgttttggatggatcgatctcggccgtccgttcgcgtgaaccgtcgccgtgcgcccggtccaccgtgaaaccctagccgctgacgcaataaatccctttttccttttcaaaaataattcattattgcgtcataattcaattaaaatcaatataagtgttttaatccgattaaatcttcaaaaattcataactaattcatcttagctcggatttagttggttcaagtctctaaatttttataaaattgagatctacatgttaaaaatatccacatgtactgttcatgcttgtttatgtgctgttttggtgattttgctcttttctgtttagattctgtcgtttccgaagagtccgttttcgcagcagaagagtttgaagagttccaaggccagcaaggcaagtcacacagatcccaaacaaccct

SEQ ID NO: 9275 - DNA, 21504 bp, Oryza sativa
tcattacaggatacaatgatacatgctgcctcgttaaaaactttgtcatgtaaaaactcataggggaaaatgagaaaaccatgacaaagaaaagagtacagctcaaaggtcagaactacttctaacaaaattctactggggttggtgatccaggtagagttgctcgaactgggcggccaattcttggttgtccgcagtgtattgggcatgttgtcgagcaagctcccagtctttaacgcttagtagcatttcgacgtggtcgctgcgcagagtcgtcctccggtcttcgatgattcggccacatagactgaaggccgattcggaggacaccgtcaacacgggcaccgtcaacacattccgtgctagttttgaaagcacaggatatgttatcttgtggtcattccaccacccgaggacgttgaaatcttgtgcttcgtggtggatggcgtcgctgtccaaataaccggacaactcttcggccacaacatgcgaagaggcgtctccacttgtagccgacgaactgtcaccaccttggattgaagacgatccaccccaaatcctacccactgtatcttcttcttacctgtagtggggataggagggggtctctgttggcgaacttcctgaaactttacttcatatcttccaaaaacctcatataatttacgtctaacctcagtataaaaagaactataatctacacctatagtatctccaacaagtgataaaatagcagacaatccccttaatttacacctaggatctaaaacaaaagcaaaagcatacaacataggtatatttttccaatatttcaaatatttttgtttcatgtgaaagacaggttcagttagaacgtcatcattttcgtattctttaaataaattagcaatttcaagaaggttgtgcaaaattatattagcagttggataataaacttgtgacaaagttagagtacaatcataaaaagtttctagaaattggtgaaatttttggacaattgcccaaacatgctcgttcagtactgaagacccgtcactgtttcttgggccaccacgtgactgaacaaaatcagaaagtaaactactataaggtaaaacaacttttaacattaaatacgttgcattccaccgatgctctgcatcggtggcaaacttacgagctttcacaccggccgcattgcaaaacctcttccatgcagcaatccgcgggttagaagcagttaaccacgcgattgcttgacgaacagcatcgatgtggtcacctaccctcttcatgccagtcttaacaatcaaattaattatatgacatgcacaacgctcatggagtagaaaagattgagcatacacacaaaataaaggttgcaatatttcaatagccctagaattagcagatgcattatctagggtgacagcaaatattttatcagcaagattaaattcattaattacttccctaattctttcagctatgttttctcctgtatgtgagacatctattaacctaagccctaaaactctcttttgtaattgccaatcatcatcaacaaaatgaacaactacgctaagataatcctctctagctctactactccatatatctgaagtaacactaacagagaaagtacatgtactaaacagttccttaagtgcagttgcttccttgtgataaacattctctaaatctctagttgatgtttgcctactcacagctttaaacctagggttatgagattgctgaatgtaatgttcaaaagcaggggactccccaaagttcaggggtaaatcttgcctggcgattaaccggacaagagattcccgagcaaccatgggatcgtactcccaactgcgtaccgtaccgtctgggtttaccataagttgctgctgccggagttgtattccttgcttcttggcacacgactccgcatggcgcttgaggtgacctgtaccaccagaagaacgagcagataaaatttgcctacatattctacaacgggctttcgatacctcccttccatcggggcatgtttcctttatctcgtcgaagttttgccacacaccggaggttctcgatctcttcgagccggtgtgtgtcgaaacacttccgctcgcggttccggaaaatccttccgaagctgtcgccgcctgaaccggtacctcctcaacgacagccgtatgaaccggtacctcctccacagatggtggagttggagccgatccggaggtatcgtcaaaccccgacatgtagttggggtcgaaatcacccaaggtgaatgacggcgactggtatggaaagttcggatccattctgaaaatttaaaccgacataaacaaattttcgaatatttattgaattcacaaacacaatacaaataatacacaaatttgaatattacttacatctttccaaccgcgagctcttcaaacctctgcgatcaaactgttgaactacgaaactaattttgatttttgacaaaatttgagcaaattttgtcaaaatcaaaaaaaatgcacacttgagaacaaagagagcacttaaaacacttgagagcacaagatgaggagtgtgggatgaggagaaatggctggggttcatgccctatttatagggcgaaatttgagattttttggaattttttcgaaatttttatgaattttttagcctcccaacggttattttcaaatttgaacggtcaaatagccgttagtgccacgtggcgccttcccattcgaccgccgcccgccctgtcagtgcgccgctggcccgctttcggcctgacgggccgccggcgaaacgggccgtgccgtgccgtgccgtgccgctacagtagccgtgccgtgccgtgccggcccgcgggctcggccagcggcccaagcacggcacggctactcgtgccgtgccggcacggcccgttactgtagcaggccgtgccgggccgtgcctgctacaggttcggccgtgccccgggccgcccgtttggcccggcccgtttggccacctctagcggcgggcggcgcatcgcaggaggataggttttcttttttttttctttttcggcggcggtggattcttttctttttattttcacttactttcactaaccgctgtttaccgacgtgggaatctagggttgaattttaatataaacagttgcatgaatagatctaagagtcacgagagggaggtgtttgatgaactagtgctttttatattagtatggatgaagtcgaatgaaaaaatgatatataatgtagaattgagagttgggaatatatgaaatggaaaattgagaaaaaaaaatgttaccaaaaatcttggataacaccactaatcgatcatggtaattaacaagtataattaataaaataatgtacttctacttagtaggtagctagagagcatgcatggaaggctataaatatagcttgatttattaaagctttatgtgattgatgagggagctggcagtgtagagacaatttccaagggtttcctgagcggggagatcatcattataagtgtacaggtaacctgtctcgcaatcggacccagccgcgttccctccgacgtagtgtttgtccacccctttgatccacttctgcacattctccagatcctccttgctgcgcttgccatctccggcggcggcaagacggccgaggctgtccagcgcctccttggtgatgttcacgttggtggcatcggtaaagccatcgacgcaggccatcaggttctggtcccccttgccggccccgtcctggaccttgcgcaactcgtcgaggtaggccgagaggttgttgctcaggatggtggcggccacctcggtgaccttcacctggttgcctccgaaggagtcagcgtatgggagcagctcgtcgtagcaaaagctggaggcgtcgcgctcggccggcagggcggtttcgcagcaggagcggacgaacgctgccgcctccgcgaagggcgcctcccctggcgccgccgctggtggcagcaccaccactggcttctcctccttcgctgcggccgcacatggtggggataaaccgccggtgctgacgaccatcaacaccacgaggacggtggccatgctcgagctcgacctgctcatttctgtatattctctctctatctctctgcttgtttcgctactgcaggatgaattacttcataacaacgaggtacaatttatactagtaggctcgattggtcgttaacaaattaaccacaacctttctttctaatttattcaatggctgttctagaatcacggcatgtctttttggtgttgtgatgtagtgccatgcttgcaattataaactactatattaatgcaactaattgtccatatatagacagcctgctcgctttttgtttcatgtccattcacttagccgcctagcattggcgtctatatttttgtcaaatccttgcattttttccttggttaatcattaggtctagaaatataatgatatatagtttaaaatttatttaatataatataagaatatctacaacaatttatttatcttaaccaatcacaactactactcgtttaattttctcacataactactcatctcattcaataataactctttagtcacaaactcattgttaatatccaaaaaaaaaaagctccaaatatatagttagacggagagaattattattttggaagcaactgcaccacaggccagaagccaaattcagctatataactactctctccgtcccataatataaatgattttgccctttaaatttgtcccaaatgtaagacatattttgtgatctcgcgacaatattttatacccaacctattaacttagtgctactttttttcccatctactaattttaccaatttattttccatctatcaattttgtttattccctccgttctatattgtaaaactttctagccctgccaatataatatcaacccaattgatgagagagaaccacataaaataatagttttgtgcttatgtttctctcttcttttggtcttcttctgacgctcctctcagttctcacgcgcccctgctgcgcgtaaggtcataggccacgcacgtgtgccccgctgccccatcctcactgctacaccgctctgccgcgagggctccacggccaacaccccgcaatcacgctactactcctcgcgcgtgtacccccgctgcgtgtgaggtaaaaggccgccactacaccgcggagtcctcatcgtttccgcggcgaccatgttgtcgaccccaccatccacgattccccgccagaaggcctccgcaactgtcatcttgtcgctctggaggagtaggtccctcctgttcatggtgtcgttgaacttctgtcggattagcttggcgaagacgtcgatgatgttgaggccggtgtcaacctcgcttatgtacaagaacaagcggtcgttgtcgaccagtttcgaccatcaatattatccaatatatgaagactacctatgcttgcaatgcataattcccaaataaaataattacttccactatatgctatgctaataacatgtatggaggagaagcactcataaatgaagagaaggaggtggaaatatatcgatcaatcaatcgaaagtctgtcggtgatctgcaattgcatgagaaggcccaaaagtccaatttaacaatcacaaatgggcctagaatgtatgtcacggatttgggggcccacttgaaagtctcctgaagaaagctgggggccagaagagcccataggtggttggccaaccccttgttgagtccaatccagccgcattttggctaagagataagggaggccgaggaggaagcagcaagccagaaaccaggcctgttgggccagtctagggttcggccgaaccctgatctcagccgttggctctcccctttggcttggacgttccggatgaactcctgacggcggttgcggggcatttccgacaattcccatctctacaaccgtcattttgagctataaaaggacctcacctccttcactttcaacacacactcaagcaaggattgaagctccatttctccaaagttagaattagtatagtactagtggaatagaattagagtagttccgagttgcggaagcttcaggaagttcggtaaagttcttagcttttcctttctttttttgtaagacttcctttttattaatataatatttcttctttatacaagttcggtactttattccaatcatagaatatgagtaccattcttagtttatttataatcagtataatcttagtagttaaaccttttgtgatttgcactgatgctggtataatgtctgattaccgggtcataagtctgctctggataggccgagagctatggcccggggactcagatgctctgcatcgattgcaaggctgtagagtaataagtagtaacttaagcatgggtttaggttatcacttatcattatttgggggtatattcgccgggagagtagcaggccgctaatggtgatagctcagtacgagcgtcttccctgcagtttatatttctacatacaatttcctggggttggatacacctctgtatcctacttcagttggagagttattgtcatgcccggaatttctatccaaaattccaaacgcttacatgtgtgtgaaccctcgtccaggaatcagccgaggcacacaataacaaattgataatagagtacaattattactctaattaataagcgaataaaatgtcattacagaggtagatagttcctctcaatcaataaagatctaagcagcggaaaataaaataaacggcgcagacggctccactccacaggcagcttgaccaaggctacacctaatcgtccacaccatcagcctcacggtagaactcttcctctgatgaatgattgcaaggtgagtatatgacatactcagcaagccacgcagcaaatatgcaagtgcacaggataacaaaggatggcatagtagggtttcatttgcaaaagcagcatttagcaaacatttcagaatttaataaaacagttaagtaataattaaacaatattaatccaacgctatacaacataccctgttgtataggcccaaccattctgaacaaccaccccggctgcacagttttaactccaaaccaggaatataccattccaaaccaggagctaatcaaattattaccaattatagcatcttctattatggtgagaagggtgagactaatcacgaaagacattgttagacccgtccataaccgcgggcacggctattcgaatagttttactctgatcagaggtgtaccactgtacccacaagacacaaccccacatcatgttaccatgtgcctcaataccaccacggtacctaggaaaggagttgtgacaataccccttgtataacacaatccattacagcgcacctttcctggatcataatcacccccttataaacaaggcatggactccccagcgacccccgtgggcttatctccgccacttctcagtctggtgctccgcaatgaaccatgctatataaaagataaagccgttgcccacgctggcttgtggctggcacggttaatgtttcacaaccgaaactcgtgaaccagtccttaattgtcatgagcacgaccatcaaaaccatgtgctcacaacccaccattatcaggttttagttggcacattaattaactaatcacgattgaccatcgtgaactatcattaagccatcattaaataatagtgagtcataagttatcccaatagtgtgctaatgtttctaagcagggctaggtaatcacatctaatatctagctgaaccaatatatatagcccaactagtcaagttataataacccaaggtatcaaagaagaaagtaatcaagaacaagagggctataataaagaataggttaattccacccaatgacattcgaaaataaatgcaatagttgaatagaaacaatagctttaaataggatcaacatgctcaaagggttgtttgggatctgtgtgacttgccttgctggccttggaactcttcaaactcttctgctgcgaaaacggactctccggaaacgtcagaatctaaacagaaaagagcaaaatcaccaaaacagcacataaacaagcatgaacagtacatgtggatatttttaacatgtagatctcaattttataaaaatttagagacttgaaccaactaaatccgagctaagatgaattagttatgaatttttgaagatttaatcggattaaaacacttatattgattttaattgaattatgacgcaataatgaattatttttgaaaaggaaaaagggatttattgcgtcagcggctagggtttcacggtggaccgggcgcacggcgacggttcacgcgaacggacggccgagatcgatccatccaaaacggacggtcgagatcgatcggtccacgaccggctcacgggagagggcgacgatgacgtcggcgatgacgtcaccaccggcggcggcggctcggcggctcggacggcgcacgctcgccggcgaacggcggcgctttggcacgaacggagggcaccaacgggtagcggacggcacggtgaactcaccggcgaccaaagcgacggtggaagaggaacggacggcgacggcgactaagaagaagcggcggcgctcttcggcttgacgacgccgacggtgctccggcggtctacagcgatggcaaaggggcggacgaggacggcgacgacttggcgaccacgacgacggtcttcccgagcgacggcgacgtctggaacggcggtggcgcacggctggagcgacggcggcgacggcggcgctagggcacacggcgctagggcgctacggacgacgagaggcgaaggcgaaggtggcggcgggtagagaagagctcgggggtccttttaaaggggctaggaggcaacggcgaaggcccacggcggctggcgacgagatggaaagctcgagctcggagagagaaaagccgatccgattcgaactcgaatccatcgatttccaaacctatttagccgatgtttccaaaggagaaaaggtagaggagatctcgaggatcatttcccctcttttgattcggccggagaaggaaaggagcggccgaatttggaagggaacagcggcggcggcgcgctagggtttcgggcggcggcggcgcgacgaagacgacgaccctgacaggtggggcccacctgtcagcgggagagagagaggagagcggcggctcggactgggccggctgggccgaggagagagagagagcggttttgggccgaatttcggcccaaagccaaaagagactttttaaaacctttttcaatttaaattatttcttaaatgcaattccatttattaaaaatacttccttagctcaaataaatcccagaaaaatctaggaattatagaattaagcaaagtatttaatgaaaatttatctggccccattttatattggaatttattaattaaaattagatcttctcttctaggcttttaaaataaattctaaaaattccatttaaacaacaatttatatattttgaattttcagggtgtgacagttatgacaaggttgtcgtaagaaactcggcaacccggggtaactttgcgatgcatcgggagggcatagctgagttctggcttagctatgctgcattgttaaaggggttattgttaacgaccaaatttggtaatctagggatcggatatgaagaagaaatcgagaaggaatcgagaaattgtccctgatggcggtatagcatggggcccttcgactggacctgccgaaaccatgcaaccgatggagggttcaagcccgagatgtcgagtgtgtcggggcgaagcccccatggcgaagactatgaaacaaagatggcgaagggcggagaatcgtgctggtatcccataaggttgaaggcattttgggcgaagactatatggtggagaaggtatggcgaaggcggatgacttcgccatagcaagtccagcctcaaggaggcccaagaggccgtctcagccgatcaagcccgggggccactaggccagcgttcgccagtcggcccattagaggcccatgtatctcaattacactgtatacccatgtaaatgtcccgttcataagggcaaccatgtaaatttccctgtataacctaaaccctagtagtaagaacccgtaatgaggctataaatagtctcatggggccatgtaacagggggatgggaagaaaaattctcattttaatacattttactttctttccaaccactgttgagtaaccacgtctttcaacgtatgcagttgtcgttccgacaatagttggcgtcgaccgtggggacctccgagcgaaaccactaagagcgaatgccaccgaagagggtcgtgaaggagaaggttacaaggcgaaaggaaagcgaagtcggggggggggatggtcgccgaacagggagcagagccttcggcgcttatcgccgaagatagaggagcgccgcctgcctccgcacttgcgccatcacaaccgccttcggctcctgtagcttctgggcaggtgccgaacgcggctgacatggcgaaggagccgcgacggcaagggcacttcagaccagggcggaaatcctctcgacaagccaactgctggtgccccaagccgctccgacgcagccggcagcggctccgactgcgctcgccgccgctcaagtcaatcctgacctcgaaactcaagccgaagccgacatggaggccatgcgaaagaacatgacacggctccaggacatgcttcgacagatgcaagagcagcagcagccgtatgaggcagcaaggcgggccaaggcctcttcgaccccaatcctccagtattcgacaggttacgtcccaccccaagtacatccacaagcgccaatccaactccttccgccacaagtcacgcaagcgccagcatacttcgccgggcagccttcgaccacggctattcatccagccccttacgtgcagctgcaagctcagcacgctgcccaagcacattctcaaccgcttggccaagtatcacaagcaatggcggaaggggcttcggctctgcaggcgcagcttcaagctttccttcagcaattcagccaaccccacaatatttcaagtatagccccttcggcccagccggaggggaatacaagtcaaggtgcgcctagttggttaccgtcgaaccagctgggtccgggggcttcgccttggagtcaaggaccgcagttcgacttcatcaatgctgctctggcaccaaccgcttggccacaagcaccaacaccgggcttgggggcaaaccaagcaccaaaccaggccgccatggcgtggccccaacctacgttcgacctgcccatggcggctcaccaagcatcaacaatcggagtcgggcagccgaatgccatggcccaacctcatgcgcaagccgtgacttcgcccttcgccacgctgtacccatagcaaggtaccgtgaacagggcaaggggcgaaaaggggctaccgctgagcgggggaatcaagatccgtccaatcccaccccagttcaagttcccacccgtcccacgctactcaggcgaaactgatccaaaggaattcctctccatttacgagtccgcgatcgaagcggctcatggcgacaaaaataccaaggcaaaagtaataaatctcgctctagacggcatcgcccgctcttggtactttaatttaccagccaatagtatttactcatgggagcaattgcgcgatgtctttgtccttaactttcgaggcacctacgaagagccgaagacatagcagcatttgctcggcattcgccagaggcccgggagaatcaataagggagtacatgcgtcgcttctcgcaggctcggtgctaagtgcaagacataaccgaggcgtctgtcatcaacgccgcttcagccgggctactcgagggcgaactcacaagaaaaatcgccaacaaagagcagcaaacgcttgaacacctgcttcgcatcattgacgggtacgcaaggggcgaagaggattccaagcaacggcaagcaattcaagctgagtatgataaggcctctgtcgccgctgcccatgcccaagcacaagcttaggtcgccgaaccacctcctctcgctgttcgccagcctcaaccagcgatccaaggacaaccgccaaggcaaggccaagcccccatgacctggaggaagttcagaaccgaccgtgcgggcaagcttgtgatggctgtcgaagaagttcaagccctccgcaaggagttcgacgcccagcaagctggcaaccatcagcagcctgtccgcaagaaggtccgaaaagacctctaccgcgccttccacggacgctcttcgtataccacggagcaatgccaaaacattcggcaacgtggcaacgcgcaagatgcaaggccgcagcagggagcagctatcgaagcacctcgcgaagccgttcaagaacaggcacccccggccgaacaacgccaagatgtgcagcgcagagtaatccaagtgattacacgggccgactcgccgggccagttgtcaaagcggcaaaagaagatgcagctccgaacggtccacaacatcacttcggcgggcgaaggggccccgtagtatctgaaccagctaatctcttttgggccggaagatgctgaaggagtaatgttcccgcatcaaaatcctctggtgatctcagctgagatagctggcttcgaggtccgacgaatcctggtcgatggagagagttcggctgatgtcatcttcgccgaagcatatgccaagatgggattacccaccctagcccttaccccagcaccgacctcgctccgtggtttcggcggagaagcagttcaagttctaggccaaacacaattgctggtagctttcggcgcaggcgaaaacagacaagaagagtaagtattgttcgacgttgtcgatatcccatacaactacaatgccatctttggcagtgcgaccttgaacaagtttgaagccatctcccactataattatctcaagctcaagatgcctggctcgacatgagtgatcgtggtcaaggggctacagcctttggctacttctaagggagatctggccataatcaacagagcagtgcataatgttgaggctgaaccacatgaccgggcgaagcacgcgccaaaacccgcccctcattgcaagataatcaagatacagattgatgacgccgaccccacaaagctcgtatcgctggggggcgacatgggtgaagaagaggttgagaacatcctaaaggtactcaagaaaaacattgatatcttcgcctggggacctgatgaggtgggaggtgtttcgacagatctcatcatgcatcacctggcagtcaaaccggatgccaagccaaggaaacagaagctacgcaagatgtccactgatcgccaagaagcagcaaaagccgaagtccaaaaattgctcaaggctggggtcattcaagagatcgaccatcctgagtggctggcgaatccagtgctggtgcggaaatcaaacggcaaatgacgcatgtgtgtcgatttcacagacctgaacaaggcatgtccgaaggacgatttccccttgccacggatcgaccaactcgtggattcgacagccggctgcgaactcatgagcttcctggatgcatactccggctatcaccagatccacatgaacccggctgacatccccaagacagccttcatcacaccatttggtaccttttgtcacctcaggatgcctttcggcatgaggaatgccggggcaaccttcgccaggctagtgtacaaggtcctttacaagcagttggggcgaaatgtggaagcttatgtcgacgatatcatcgtaaaaagccgcaaggctttcaaccacgcgtccgacctacaggagactttcgacaacttacacacggcgggtatgaaactgaatcctgagaagtgtgtttttggtgttcgcgcgggcaagttgttgggtttccttgtttctgaaagaggcattgaggcgaaccccgagaaaatcgatgccattcagcaaatgaagcttccgtcgagcgtatgtgaagtacaaaagctcgcaggccgaattgcggcactcagtcgattcttctcaaaggtagccgaaagaggtttgcccttcttcaagaccctccagggcacgggaaagtttagctggacacccgaatgccaagcagcgttcgatgagctaaagcaatatttgcaaagcccgcccgctctgatcagcccagcactaggaagcgaactgctactatacctggcagcttcgctagtggcagtcagtgctgccctcgtccaagaaatagagtcaggccagaaaccggtctatttcgtctccaaagcattgcaaggagcgaagacaagatacattgaaatggaaaagcttgcttaactttcaggcccacaaagtcactgtgccatcacagtaccctttggcgaagtactctgaggcaaggaagttactggccggcttagcaagtgggtggcggagctatcccctttcaacttgcattttgttgcccgcactgctgtcaagtctcaagtgctagctgacttcgtggccgaatggacaccggcatttgcccctgagcccgagcccgtcgaacaaccctgggtgatgtatgtcacgcccagaaatttaacccaaatttccagactattttgcgtattaaatccctgtccaggaccagccagggtacacaaaacgacaagtaatatacagttccaaacgtaaataaagcgtaaaatacttacagaagaggcacttagtcctcacaccgaaacaaaagcagcagcagcggaaaaaggcgatcctagcggggcttcagctccactccacaggcaaaactcaactggggtctgagccttggtcctctaactccatcttcagctcagaagcactacacttctgaaaagggggaataatagcaagactgagtacaaccaccgtactcagcaagccactccaacgatgcagacgtgcaaggggatacaaggatggtttgtggctatttgcataacgccggttgtaaaacattttattgagcaaaacagtaaaactgttgagtatttagagtaacattaaatctccactgatcaacgctacactacgttgaacaggcccagccaacccaccagaactacagtgcattgagtcgatttattaaggtgggactaatcacggtgaatctggtcgaccgcccataaccgcgggcacggctattcgaatagttttactctgatcagaggtgtacaactgtacccacaagacacagccccacgacacgtttccgtgcgccgacatgccaccacgacataccggaaagaggccgtgacaggacccttcgcataaccccctctaaccaagcacaccacacctcaggtttcacccccactcctcgcaaggcagcgggcagtcccctctcgtgcctaggtgaatccggaagcgacagaggccgtcgcagggcccgtcccgctccatcacgcccacccttgcctggatgcgtcggctagaggaaagctacactacaagcccagccgttgcccacgctggcttgtggtaagtacgataagttcttccagggcatcccgcgaaccggtccttaactgccatgggtgcgaccagcaaaaccatgcacccacagcccaccattcagtcgcattgtagttggataattacgaccatgaagcatggccagatgtctcgagcacgcagctcactctgatactaaaaaggtctaatattgtaattatcccatcaactgagctagtggtaaataagcatggctaagcatatagttctggctaagtcacataagtaacatgagctagtcgatttattacccaaggttgacaaaggatagatatcaagtaaacatggcacaagcgagcagataggtaaaaccctgatcccgtgtaattagcaaaacatgcatatttatttgcaaacagtaaaacatttgtaaattaggatcaaaatgctaaaggggaatgtgtgacttgccttgcttcttcactttgatcttccgaactcttttccttgcgaccgcggacttccgaaacgacggaaactacacgctggcacgcaaaatgaggaaaaactctaataaaaaccaaggaaacagtacataaaaactcaacaaacatgtagagctcaattttagatgaattttgcaagttgaatggctcaattcgtagttcgaatgaattagatatgaattttagaagttttgggtcatttaaatgaatttctagaattaaacacgatttattgcgcaattattaaatattttctcaaaggaaatggcattcgctgacgtcagcaaggggcgccgacgccgacaggtgggcccaacacgtcagcgggtcaaggaggtgcgggcttggaccgggtccaccaaatgagcgggccccacgcgtcagcgggcaaaaggatctagcccaccgtggaccgagtccacggtagaggtgtaaggcggaggggtgggttggctcgccgaccaacccgaccagacggcggcgcgcggccggacgtccaccggcggcgacaccggcggcggcgcggcgcggcgcgacggcgacacgcatgcggcggccggcgggcaaagagagaaaaagaaagggaggggaggaggagggagatgctcaccgacgcgggaaggacgacgacgacaacggtgatggcggcgtcggcccgacgagcgagggggcggccggggagcggcgaaaacgagcggaggaggcgaaaagggaggcggcggagctcaccgaggggcatggcggcgaaggaggcggctgatggggctcgagcagagggaggcggtagcactccacggggcgaagacgacggcggtgattcggcggtctccaacgaaggtggaagagcggccggggtaccacgcgatgcagcgaagccgacggtggtagggcgcggcttggcagtggctggagcggcgaggagcggcggccggagctcgtcggtgagtggtggagagagggagcgcggtggggaggtggttccggcgatgaaatgggaaaacggagtggggccgaggtgcggcaaggcacggcgaagccggtggtgcaagcggcgcggcgcggggacgtcgacagtggcggcagcggccggctgaagggtcgccggcgatcggcggcgcttgggctcgtgtggggagagcgggagagagcgcggggagtgcgggaaagttggggaaaagggagaggatggccgggggattgtttttataggggaggggaggcgggatcgagcccgggagaggcggagtcggggcggcaaccgccggtggcgtgggcggcatcgtggggtgtgggtggcggttttggaggggagaggtggggggaaacggcgcggacgtgggcggcgaggtcccacggacgagcgcgcgcgcggggtggagaaggtggtcggaaacggccgcatcgtggggcggctcgggcggccatggcagcaacggcagctgccggcctgaggttggggatgacaggtggggtccacgggtcccatctgtcggagagagagggagggagaggccggctggggaggcaaaacagacttgagggagagagagagagccgagcgggccgagggagaaggccggcccgagagggagagagggggggggggggggaattgggccgaaaggggcccaaagagaggagggaggattttattttttttctttttattttaattggttaaatgatcttcgtgactttaaaactatttctcgagctccgaaaattcacggaaaattccggagagtacattagggcacaaagaatattacaaaatatttccggccaatgatttttaagggaaaattttaattctcccattattttacttgattaaattgatttaacttttatttaatttctagaaaatgtattattaattgatttttattcccgaacgaaaatcggggcgtcacaaatctaccccccttacaggaatctcgtcccgagattctgggatggctagaaagaaagctggcattggcgggcggtctgactgatctacacattgcacttccacattctgcttcgaactgactgattaattgagtgatcaaacctgcacgactgaactgattggattcgacttttctgttcctttgctttgccaagactggattgactggttttttcttaaactgacccagaccaggactgtggatgctcatggaacttacttatcttggactgaagtgttgatgctgacaattcaccatgctggctggaagaggatgaagttgttcctgaaacttgcatctgacatttgtaaatcattgactctacatccgcttgaactggtcttgactcgaatgacaagtaaattccaggaaacctgcttgacctgtctttcgtctgaactgcaactgtcctcgctgttgcttctctaagctgaactgttgacatgcttcacaggtgtaccttagaattgaacctgtcgacctgagattggggtgactctgctaatggttcgcaactgactcctttaattactaaccaatttgctgcactgggttgaacctacaactgaaacgacaacgaggttagccaaaactcatctctgagacctaccccccttacagtgggtagtcatactttcgcctaactggaaacacttgaactgctatccttgaaaaacaaccattacttctcggatttacaaaagaccctgactttggaaactggcacttcatcgatcaatcaaaatggagcaatgacgatgcactttcatccaggtcaagacttggaacttaacccttagttgctgataggaaattccacataaagaaattctcatttagctcgtgatcttactaactcttgactacttccccgaccagttctaactgctggtacaactgtcttggttctgacttgatttttgttgtcatatacctaaacagattgcatagttgaccttccttgaaacaagcactgatcacttaacagatcgaactcaagaggtccttcccatggcatgacatttcacttcttcgaccatcctttgctgactcttcctgggttgacggaccatagatcctgcaaccgttttccggaggctattgcaatctgaacaactatcggaaactggcttcgatgctgccaagagtttctgctctttgatcataacaacttcgctttcatatttttggtggagatgatccgttaaaaggggatactctgccatataccctgcttgactacacatttctggacttgactctatatacttctgatccatgtatggaacaattttttttttcaacttccgagaaacattgaaatgattcctggaacttatactggttgccttgaactaaggaaacacatactgaattcatgctcgcaccattagggtgtaactatcgattacaaccccctaacagcttccaaggttagaaagttctcaagattctttatatgatgtcgtttttcaaatattccattactcttttcatttgagtaccactgacactgcctttagagagatcccatcatgttgagtgttgagtgtccaaccattttcactccgttggttaaccactcctctattggctcgcaaataggttttggagctcaacgaaattgcgatgagttagaagagaaactcttggtttcttgagacactgacagatacaaatttggatttgctttttcatgctcgagatggatcagataagtggaaaactaattgactcatactttattcaatattcccttttcattacataactgccatagacatctatatacagagagaagtgctacaaagttaaacatttgtagactgctgctgattagagctgcccttttcacgactgaacttgaaaagaagaagtcttgtctagaactgctattgcttccattattcaaacctgactgacttgtttcttcagttcctactaatagaagtctcaccgggaacgttgctctacttgttgatcttcgatggtggagtggcaactgtcttgacagctgtaacaggtaggttcttcttgcccgtgggattaccaagcggtgatttgctgatgagcctctggattggagcaatacgaggtgcattgctagaactgacaacagttgggcggcctagtgctgacaacacttgctgcgggtgctgacgaaggaccgtactgcctttttgtagctgtagcgagctgttgttctcctggcattgcctaccctactggtgctggtgctgtaggcttgaaacgatggccggtggaacaatgtgacctttgacggtgcccttgacgataatccgttgaggcggaggttgcacattcaggtgtcgattggtgtcatgggcagtgctggtaacttgggaatcacgacgaactgcctttgctgctcttggaagaggacaatcactgaaacgatgtcctggcttacgacagttgcgacagaatcgacttgctgggtctcggggtgcaggcttctgattatgcactttggcagctgaaactggaacacatagtgattcatgaacatccctggcgacgttgcttcttccaaggttggcttccactggagctgtggttggtgaaagagtagaagggttgagactgttgttgtcgaccaccattggttgacgaatgggttgcacggttgccccttgttctttcttggtcatagctaggaccgcgttcaactgacagtccttaggcacatgatctgttccttcacacaagaaacatgtgaccttcctcaaagggcatgcatctgagtaatgggtgtattcaccacagcgacatgtggggaggcataaactagcagtatgttcgactatcccacatctagcacatgctttgcacttcaactctctttccctgaaactgtcaagggtcgcatcatcattgtcatcattatcatcatcgtggtcgtcattgtcatcagcagaaaaccgttctcctgattcatcatcttcgggtctgggtggaccgtactttatgagatgacgggttagctgacgcgctcctcggaaggtatttcttcctctccgacgcttgggtatccttgctgcgtcttcaggagtaaattctgaaccggtgatgatcatggtcctaccattatccatcttccatatcactgtcctattcgctccagagttgcgctgcaaagtaccatccttcttgtcggtagactgacttggagcttggttactccctgggcactgcttctcgtctttttcaggtgacctggcaaacaccttccatggacagttccttacataatgaccttgctcaccacagtcataacaggtagcacttattttcctttggtccgacggtgagttggctgaagttatcttcggggatctggacatcattttgacaggggtcttaggtgccgatattgggaactcctgactctgattcaggttccgggctggcacctggacttgcatttgtggctggtg

SEQ ID NO: 9276 - DNA, 6510 bp, Oryza sativa
aactttgtttatttcttcttaattattatttgtgctctgaaaattccactaaaatttatttacacattttaggcttttaggaaatatacaaaaatcctctaagccttgtttgacttttactttgcacattttaatttttggaggctttcacacggattttaattgttctaggcataatttaaaggatatattttagggttgttttggcacgtcacaaacctaccccccttaaacggaatctcgaccccgagattcggaagaactggcgaggagatcgggatgggctgccttcagctcgtcttcacgttcccaagtggcttcttcctcggcgtggttgctccattggaccttgcaaaaacggatgacccggttcctggtcctgcgctccatggtgtccaggattttcactggcctctccacgtaggtcaagtcttcgcgaacttcaatttactctgaatcggcctgctcggatggcacacgaagacatttcttgagttgcaacacatggaacacatcatgcacgttgcccaatgaggcgggcagctccaactggtaagctacttctccgcgtcgagcaatgatgcggaaaggacccacgaaccgaggtgcgagcttccctttcgtctgaaacctgtgtacgccccgcaatggcgtgacccgaaggtacacaaaatcgtccactgcgaattctaggttacggcgtcggttgtctgcataacttttctgccgagactgtgccaccttagattatcccaaatggttctgactttagcttcagcttctctcaggatattagtcccgaacatttggctttccccaacttggtcccacaatagcggtgtccggcatttgcgaccatacaacgcttcatagggtgccatttgtaggctggcttggtagctgttattgtaggagaactcggcataggggagactcttatcccaggtcttcctgaaatctagaacacaggcacggagcatatcttctaggatctgatttagacgctcggtctgttcatctgtctgcgggtgatacgcggtgctgaaatttaatcgggtacccaactcttcttggagcttcttccagaagtgagaggtgaattggcttcccctatcagatacaattttcttaggaacgccatggagactcacgatcctagcgaagtagagttcggctagtttgttccctccataggtggtcttcacaggaataaaccgagctaccttggttagtcgatccacgactacccatatagaatcatacccgccttgggtttttggaagtccggtgatgaaatccatcccaatttcatcccatttccattctggtacttgtagaggttggagaagtccggccggtcgttggtgctctgccttgacacgctgacacacatcacaaagggccacgaactctgcaatttcccgcttcatactaacccaccattatttctctttcaagtctaagtacatcttcgtactgccagggtggatggaataaggactttcgtgagcttcctgaagtatcagctatttaagttccttgtcgtccggaacgcatacacgatttccgttccatagggttccatgttcatcttttgtgaaaccagcagctttaccctgtttcatattcttgacgatcccatgcatatctggatcattcttctgagcatcgcggatttgatcgagcaaggtaggcttggcttctagagtagccaagaatccatggctaacgatgcttaggttcagggcttccatctgttgattaagttccggtggaatgccacggacgccaagagtgttgcaacggctttttcgactcaacgcgtctctgaccacgttggccttaatagggtgatagtggattcccacatcataatccttgatgagctctaaccatcttctctgccgaagattcagatccgactgagtgaggatgtatttcaaactcttatgatcagtatatatttcacagcgattcccaatgagatagtgccgccagatctttagagcatgaaccacagcggctaactccaaatcatgggtagggtagttgccttcatggggccgtagctggcgtgaggcataggctaccacatgaccttcctgcatgagcacgcaccccaatccttggcgcgaagcgtcacagtacactaggaagtccttgcgagtatccggtaagattaacactggcgaggaaaccagcttttctttgagagtttggaatgccttctcgcattgcgggctccacacaaatttttcctccttcttcagcaactgtgtcatgggtcgagctattttggagaagttctcgatgaatcttcggtagtatcctgccaaacccaaaaaactgcggacttgagtgactgccttcaccggtagcagcacttctcctggtcgtcaccatctgaaaaccccacaaagaaccagcaaacagagagagatgacaattaaaactagccacccatgactaccacaattcttgaatttattactgctattaaattggttcattaaagttcaagttgcttaggcaaataaaataaagacaggctccgacacagttataccacacaccggcataaccatgccccacacgactccaacaagaagacaaacgagaaagaacacacgcgcaagcctactaactgctcgtctaccgctgcgacgggccaggacggaaggtgagcagcagcgcatcctccgtgctaccaacgccggaggctttcccctcctgaggaaccacgggcgcgggctcggcacgaggggtctccacgaagcaggtccatgccaaggattggcgaacaagctcgggcctggaggtactcttgcaggcggtgatcttctggctgcggcagacgcggcgacgcttggggcgacagacctctccctgggcgatcttgagctgatgcagctgcgcctccactgcgtctaggtccttcttcagctgcagattctcctgacgcagctccaggatcttcatgttgttctcgaccatcccacggcgcaccatctgatggaagtcgatacgagccgcgtcgtacgcctccaccatgcgcgccaggtgcatgatggtagcggtagggcgagtgctgcaactcgtccgggtagagctggtgaagagtgccgatggcgaggagtgcggcgttctggcaagcggcggagaaggaatctccacccgcggtgaccgccaacgaagacctctcgggtgagccagtgaggatcactgcagtaacctcccgagcagcgtggggctctgcatcgtcaccctcctgctccgggagctgcttgccctggtagtccactccatgcggataccccaggacaatgcacatgccccgcagctccaaaacgaagccagtcaggtccagaccacgacggttgatgctgccggccatctacaaacaaaaacaaaaagaaatgcaacattttaaaggtcagattttggcgataaatgaagcagcaggacagagagagactagaggattttcacaaataacaaaggatttttttttatttcgaaaatattgctaaggcttgggatctaaggcttgtcctagggtcaagggggctctgataccaacttgtcacgaccggaattaacccaacgggcgttccttacgtgcgtgtattattccttgtcccaggaggcaaggtacaccaagagttgatacatttcagagtttatcaagcggaagcgtaaatagttaatttattacatgggcagcgaaggcccagcacacacaaagacaaacgggaaacagcggaagactagggcgacgaccacaggcgcttgacggcaggcacgagctagacaccaaagccttcatcttccagaggctcctcttctgggtttgggaaaaaattgagcaagactgagtacaaccaccgtactcaacaagacacacccacaagtgcagaataaaatgcaagggagtacaagggagttacaatataaagggttagggtttgcagtaaacagcattaaaagacacttagttgctcaaagctattttgcaaatacggtcctagagctatacaatattattaatcaaggccgtgaacccacacgaacctgccttaacccaaggcctacgatgatttagaccgaactggcaacccgaccctgggtcccagctcgtcccaagccaacccaggccaaccattccacattttagttgttaagcaggttttaagaattaaaacactaacttgggtacattgctcggcttgcccataaccaagggcgcggctattcgaataggttatactctgatcagaggtgtacatctttacccacaagacacatcttcctcacgtgtaaccacgtgccacataccaccacggtatacagacggaagacgtgacatagtttccaacccatcctagccatagacaagagtaccgacccaatcccacctacggccggaacccccgggacaggtaggcaggactgagcccctagcagcaggacaccggccctgtgccatgacatctcgactaccgggccgcagctcgtgtagccttcatttgtcctggagatgtccatcgacccccgacttcgtccatctccatccgtgtacttttgtttataaccagactgagccacaaactaagccttacccactagacatgtggaagtacggtagtgctttgcaacagaggcccgaagaccggtccttatatggccgaggtgctactatcaaaaccatgcaccccgagcccagcctaaaaccattttggggattttgaatagagggggaggtgtgaatccaattccacaataatccaacaattccatagtgtccaggtgatgagaatatcccaaagtctagagttgtaaaatcacctaatgttacctaattaaacagcgaagcatctacctaaaatcatactagtggtaccatgagtagagtgtccactagttggggttttgtttaatctagggtgaacaaggtaataataatagtaacaataataataattattatttgtgctctgaaaattccactaaaatttatttacgcattttaggcttttaggaaatatacaaaaatcctccaagccttatttgacttttaactttgcacattttaattgttggaggctttcacatggattttaattattctaggcatcatttaaaggatatattttagagtcgttttgggacgcgacactttccttgaagcctgcattaaacacttatttcccatggcttgctgagtactcccacactcacccttgctctatataaataacccccccagttgctgaagaagatgaagcggaacctgctgatgaggagttcttccaggagcaagccggctacgatgagttatagggtttcggcctagttcccacgtcgcgcctgtgttgattggtccaagtcctgacttccgtttcccttttgtaatgcagttgtgagctcggggtctgtccgcagcccaacatgactgtacctctactctataataaagagacttctgttgctgtgatattctgtcttcctgtgataccagcactatttcctgggactggtattgattaacaggttaatttggagcgtcacgggctagttccggtcggtactagttcggggcgtgacataactggactttgaaatttccaaatactttggttaaacccttggctagatctatctctgaccataccacctgtgttgtgcaatattggtactgatattccgaaagcaaatattttcagatttgaaaatttttgggttaaccatgagggtttctttgagcttgtagattgaatctggaccaatcatggaaatgaccctaatgcagctagaaatatttctgctaaattgaaagctttaatttgagaaagggtttgagaatttggagtaaaaacctttctaagttgcagaaactaattcaaaactgtaatgctatgattcaattcctggactctattgagaagtatagagatctcactttgttggaatggagatttagagtcttaattaggactaagcttttagcttatttgaaatacaagcagtcttattgacagaaaagatgtacaatagatgggctaaatttggaggtgaaaatacaaagttttttcatgccatggctactgaatctttttaggagaaactttatttcttctttactagattcccagacttcatatgagttgagatagaaacattcattaatggtgtacctaaatcacaaggatgaaatgcatggacatcaagctatatgtatcactttttctctccgagcacatattgatatattcatatataatattttcatgtgattgacatatatgtatgtgaggctaatgttttgtttgagtcttatcgcttgtttagtctatttacgttgaggatgtggagatgatgaaggtatgcatttattttaatatctataaaaattgccaccacccgcccgtgccatgccaccggcgccgccggagaccttccctccgggcacaccgacactggatctgggagggagagggagagggagaggga

SEQ ID NO: 9277 - DNA, 7937 bp, Oryza sativa
  unsure (1)..(7937): unsure at all n locations
catatgcttgtggctaatgtcaggtgttacaaggactggcgtgagtttcttatagagctatacagatgctgctgcggtctgatttgaggtacgaatcaagctctttgcaatagttgaacttaagttttcattatacctgcatgcgagccaaaacatcggaggtgtgtcttgttctgaacctattcttctggaactctatccgtgcagcctcaaccgcctcccgctcttcacttgttccaaaatttgggtcaaattcccatgtttctcttccaacatgactgtttccactctttagccatggtcctccctcggcaatcttgagcttccacatattgtagaaactattctgctacttgtaagtcttacctgttggaacaaaaaaagagtttttaggacaaaccgatatatattatcgttgtagaagtttccaaaaaggatattttatatctagatattgagattatatcatttactgttgtacgttggagtttttccagctgcaagaaagctagtcggtttcacatatatgtgtacgtgcttgtggcagatctgactgaggtgacaatgatttggcacagctagctactttcttacacagcaaatttaggttggtgtatgccctttctgatcatacaaatattaaaactttttacttgacaggttgattcttattcctccttgaaagatctgaaatattgtgtcatgaaactttcgttagtatgagcatttcctttctgaaaccattgttacattttatgcgattcttgtctacaagcaagtagcaaatcttttcgatgtgcaccttaaccttaaaagcagcaatgcatcatcatcatggtcataaacagatgctaaaatgtaggaaaacaaagaggggcattgtacttacacttaagctttaattgccttagtttcaggtgtataaaagcaaccatttatcagaagatgaaagttggccagaccaaattgggtggatcgattgatgagggtgatcgaatggagatgccacggntagattatttatgcccttaggattctgggagntgaggaggaggatgatcacatggaagtgatgaggtggtttcacttgagctgtgcacgcacgggaggagtgaaccgcaagccgtgntgggtgaagcttggcagctgaaagcatgagagaaatggcttntgcgtgcatgatgagcatgagccttgttctggcttcctctgcctcctggtcatgcgagtctgatgcaactgggtgcatgtgtgtgcaagcaaatgcctccttgttcaattggagctctgggagagccagaaccaaccactgaaatctatctcaggaggaggggatcagccaagtgttcatggaatacttggataagtttgttgtggttttcattgacgacatcctggtatactcacaatcagagaaagaccatcagcagcatctccgtctggtgttgggaaagttgcgggaacatcaattgtatgccaagcttagcaagtgtgagttctggttgtccgaagtcaaattcttagggcacgtgatatccgctaaaggagttgctgtggaccctgaaatagtgaccgccgtcactgactggaagcaacccaagacagtcactcaagtccgcagatttttgggtttggcaggatactaccgaagattcatcgagaacttctccaaaatcgctcaacccatgacacagttgctgaagaaggaggaaaaatttgtgtggacaccgcaatgcgagaagacattccaaactctcaaagaaaagctggtttcctcgccagtgttaatcttaccggatactcgcaaggacttcctagtgtactgtgacgcttcgcgccaaggattggggtgcgtgctcacgcaggaaggccacgtggtagcctatgcctcccgccagcttcggcctcatgaaggcaactaccctacccatgatttggagttagccgctgtggttcatgctctaaagatctggcggcactatctcattgagaatcgctgtgaaatatatactgatcataagagtttgaaatacatcttcactcagtcggatctgaatcttcggcagaggagatggttagagctcatcaaggattatgatgtgggaattcactatcaccctggtaaggccaacgtggtcgcagacgctctaagtcgaaagagccattgcaacactcttaacgtccgtggcattccacccgaacttaaccaacagatggaagccctgaatctgagcatagtgggtcgtggattcttggctacgctggaagccaagcccaccttgctcgatcaaatccgcgaggctcagaagaacgacccggacatgcgtggactcctcaaaaatatgaaacagggtaaagccgcgggtttcacagaggatgaacacggagccctatggaacggaaatcgggtatgcgttccggatgtcagagaactcaaacagctgatacttcaggaagctcacgaaagtccttattccatccaccctggcagtacgaagatgtacttagacttgaaggagaaatactggtgggttagtatgaagcgggaaattgcagagttcgtggtcctttgtgatgtgtgccagcgtgtcaaggcagagcaccaacgaccggccggacttctccaacctctccaagtaccagaatggaaatgggatgaaattgggatggacttcatcaccggacttccaaaaacccaaggtggatatgattctatatgggtagttgtggaccggttaaccaaggtagctcgatttattcctgtgaagaccacctatggagggaacaaactagccgagctctacttcgctaggatcgtgagtctccatggcgttcccaagaaaatcgtatctgataggggaagccaattcacctctcacttttggaagaagctccaagaagagctgggtacccgattaaatttcagcaccgcgtatcacccgcagacagatggacagaccgagcgtctaaatcagatcctagaagatatgcttcgcgcatgtgtcctagatttcgggaagacctgggataagagtctcccctatgccgagttctcctacaataacagctaccaagccagcatacaaatggcaccttatgaagcgttgtatgggcgcaaatgccggacaccgctcttgtgggaccaagttggggaaagtcaagtgttcgggactgatatcctgagagaagctgaagcgaaggtcagaaccattcgggataatttaaaggtggcacagccacggcagaaaagttatgcagataaccgtcgccgtaacctggaattcgcggtggacgattttgtgtaccttcgaatcacgccattgcggggtgtacacaggtttcggacaaaagggaagctcgcacctcggttcgtgggtcctttccgtatcattgctcggcgcggagaagtcgcttaccagttggagctgcccgcctccttgggcaacgtgcatgatgtgttccatgtgtcgcaactcaagaaatgtctccgagtgccatccgagcaggccgactcagagcaaattgaagttcgcgaagacttgacctacgtggagaggccagtgaaaatcctggacaccatggagcgcaggaccaggaaccgggtaatccgtttttgcaaggtccagtggagcaaccacgccgaagaagaagctacctgggagcgtgaagacgagctgaaggcagcccatcccgatctcttcgccagttcttccgaatctcggggtcgagattccgtttaaggggggtaggtttgtcgcgtcccaaaacgactctaaaatacatcctcgaaattatgcatataataagtaaaatccatgtgaaagcctccaacaattaaaatgtgctaagttaaaagtcaaataaggcttggaggatttttgtatatttcctaaaagcctaaaatgcgtaaataaattttagtggaattttcagagcacaaatattaattaagaagaaaaaaacaaagttaaaatggttttgtaaaaagaaaaaccctaaaagtcttttccccccctctccccctcttgggccggctcggcctcctccccgcgcgcgtgccgctgacggacgggcccgcccgccaccctcgctgacgggtggggcccacccgtcatccccttcctcccgccgctcctgccgcctcgcccgtgccctagcgccgccgccgccgcgaatcccgccgctcccgtccgccccgcgcgcaatcaagaggggggaaacactccccgtgattccctccctctttccccccacttttctctctctctccctcggatttgttcggaaacgtttccccctaaacctcgccggcgcatcaatggcggccggatcttccgcggccgattccccctcatccggccgctctctccccctcccaaccctatataaacactccccgtgcctccctccaccgtttccgccactcgccgctctctctctccgccggaatcgagctcgcgccgtcgctctctctctccgccgtcaccgccgagctccagtccgccgccgtcgtcgccccggaccttctcccgcttcggcgtcgccttctccgggttcgccgcaacctcgccgacctcgtccacccctctgtttcacccgccgaccgccggaacgccgccgtccccgtcgacccgagccgcgccgccgccttcgtccgctccggtcgccgttcccgtcgtcgctgtcgacccggggtgagccgtggaccgccgtttcgcttcccccttccctcatctctctcgggcgccgctccgccgcgctggtggtcgccggcggcgaccatcggggcgcgggtgcgccacctcccgtcggctgtgccggcgtggccgccttcgggcgcgccccgcggctgccatgtggggcccggtcgtcagccgcccgcgccctcgggtgcggctgacgcgtgggacccacggcgccggccggtgtgagccgggtgcacccggtccaccgtggaccgtgaggctgccgcgtgggccccactcccgtggacccggtccgcgcgctcctcccctcggctaacgcaataaatccgattttaaattaaaatttaaatgaagaaattcgcaaatatccatttaaagagcatataaacttcaaatggccataacttgaccatttgaactcggaattggaccgttcaagtctctaatttctccttaagaagtcaagaacccatttttgtgctttgtttctgcttgttatatggagtttattagagtataagccttttcttttccgttggtcgtgtagatgctgcagcttcggaagatccgctcttcgtggaggttgaagccgacgtttgggaaagcgagcaaggcaagtcacatcatccttgaacatattgaatcccagtttataaaattatgttgatttaaattattgcattatcgctttatttaaattcccgcgttatcactgttttatctagccatgcctatttacctttgttatgaccttattattgtattgttattattaccttgttcaccctagaataaacaaaaccccaactagtggacactctactcatggtatcacttgtatgattttagttagatgcttcgctttttaattaggtaacattaggtggtttttcaactctagactttgggaatattcatatcacctggatactatggaatggtttggttattgtggaattggcttcacaccgctccttctattcaaaatccccaaaatggttttaggctgggctcggggtgcatggttttgatagtagcacctcggccatataaggaccggtcttcgggcctccgttgcatagcactaccgtacttccacatgtctagtgggtaaggcttagtttgtggctcagtctggttataaacaaaagtacacggatggagatggaagaagtcgggggtcgatggacatctccagggcaaatgaaggctacacgagctgcggcccagtagtcgagatgtcatggcacagggccggtgtcctgctgctaggggctcagtcctgcctgcctgtcccgggggttccggccgtaggtgggattgggtcggtactcttgtctatggctaggatgggttggaaactatgtcacgtcttctgtctgtataccgtggtggtatgtggcacgtggttacacgtgaggaagatgtgtcttgtgggtaaagatgtacacctctgatcagagtataatttattcgaatagccgcgccctcggttatgggcaagccgagcaatgtacccaagttagtgttttaattcttaaaacctgcttaacaactaaaatgtggaatggttagcctgggttggcttgggacgagctgggacccagggtcgggttgccagttcggtctgaatcatcgtaggccttgggttaaggcaggttcgtgtgggttcacggccttgataaataatattgtttagttctagaatcgtgtttaccaaatagctttgagcaactaaagatctttaaatgctgtttactgcaaccctaaccctttatagtgtaactcctttgtactcccttgcatttattctgcacttgtgggtgtgtcttgttgagtacggtggttgtactcagtcttgctcaatttttcccaaacccagaagaggagcccctagaagatgaaggctttggtgtctagctcgtgcctgccgtcaagcgcctgtggtcgtcgccctagtcttccgctgtttctcgattgtctttgtgtgtgctgggccttcgctgcccatgtaataaattaactatttacgctaccgcttgttaaactctgaattgtatcaacttctggtgtaccttgcctcctgggacaaggaataatacacgcacgtaaggaacgcccgttgggttatttccggtcgtgacagcatctaaatcagatcctagaagatatgctccgtgcctgtgttctagatttcgggaagacctgggataagagtctcccctatgccgagttctcctacaataacagctaccaagccagcctacaaatggcaccctatgaagcgttgtatggccgcaaatgccggacaccgctattgtgggaccaagttggggaaagccaagtgttcgggactgatatcctgagagaagctgaagctaaagtcaaaaccattcgggataatctaaaggtggcacagtctcggcagaaaagttatgcagacaaccgacgccgtaacctagaatttgcagtggatgattttgtgtaccttcgggtcacgccattgcggggcgtacacaggtttcagacgaaagggaagctcgcacctcggtttgtgggtcctttccgtatcgttgctcgacgcggagaagtcgcttaccagttggagctgcccgcatccttgggcaacgtgcatgatgtgttccatgtgtcgcaactcaagaaatgtcttcgagtgccatccgagcaggccgattcagagcaaattgacgttcgcgaagacttgacctatgtagagagaccagtaaaaatcctggacaccatggagcgcaggaccaagaaccgggtaatccgtttttgcaaggtctaatggagcaaccacgctgaggaagaaggtacttgggaacgtgaagacgagctgaaggcagcccatcccgatctcttcgccagttcttccgaatcctggggtcaagattccgtttaaggggggtaggtttgtcacgtcccaaaatgaccctaaaatatatcctttaaattatgcctagaataattaaaatccatgtgaaagcctccaaaaattaaaatgtgcaaagtaaaagtcaaacaaggcttagaggatttttgtatatttcctaaaagcctaaaatgtgtaaataaattttagtggaattttcagagcacaaataataattaagaagaaataaacaaagttaaaatgattttataaaaagaaaaaccttaaaatttcccccctccccctcttgggccggctcggcccatctccccccctct

SEQ ID NO: 9278 - DNA, 3736 bp, Oryza sativa
agttgagggacggaatcgcaaaaaatacatctcgtgtgtgggacccggagaaagcggttggtggagaagtccagccgagctcccccaaaacgaggagagagagagagaggagaagagaaaacgaggagagagaagagaagagaagagaagagagaagcgcacgcacgcgcgcgcggagaggagaggaggagaagcgcgcgcccgccgccgccgccgccgccgccgacgggaatctcgccggggccgtcgttccgccccgatctcggtccgtctctccatctttaccttccgtcctcgtgtgatgtatgtgcttcggtttcgccggcgctttgcattgctcgaacgagggagaatccgtaatttatttatttatttattttttttgggttgggggagcggcggcgcctctcattgaatctcgcgccttttgttcttgggagcacgcggaatttgtgctattatgaatatatgcctttttttaaagaaaaaatgattttgattctctttgatagatagtataggtttggtggttggttcgcgggcggatgggacggcgtttgatgtctcaattgtttgcggggattccgatggggggagggatttgaaacatgtctcccaaaatttgtgcttgttttgtttgtttggattgccagttcactcttttagaatctgtttcgttgttaagttggttgctcatagttgactggtgtgcaaaaaaaaaaaaagttgagctttggcgtgagcaatcggaaccgatttcttctctcgttttgttaattttttttactagtaactagtacttgtctaaactatgctatggcatgaagaacgaaagataaattcgtttgtcaaggctagtgttgccacctttggaatggtggatcatggttccgtttgtcgtcagatttcctttatttggcttaaaataatacatgttccagtggctatcctgtttgatttgtgatgcctggtgatatagaaggaacatttcgcatcgtgctttgtattgtatattgaagttgttgttatgagatgacctgatggggaaaggtagaacacggttcatgcaatcagcgtgcattgtttggctagcattggctgtcgttatgtggcttcctgcaaacgcaacatgagtctgttgtgtattcctaacatatttttcttctcgcgctgtagcttgatgaaatatctggtggttaggatttgtccagcttgacttggtagctaaccacattagtaaatgttagctatttcttgtgcttatgcgtctaatatctgtcaaacctttcgcaataaattatttttaaaaaaggcactttccttctatccaatcactttcttttgtttataaaataataaagaaattaggatgaatcttcattggttggacaacgacacgatttccatctctgtgtataccactatcctttcgtgtcacaattctgtcaactgtgggatctcattttggttgtttattctctgttttttcagatatagtaccaagataatacacctgcttgtcaaatgatgatgggtttgctagcgtttgagagcaaccaagggctctggaatagtggatattattcccagctgtttgggattggaggagttatggtcactgttgccattctttggttatcgacaggctactttggaggaattggtgctccttttgccccatatttttggccatatctagcacaacttccaaagaagaaggaacggaaaaggcctgtgagagtgtacatggatggatgctttgacctcatgcattatggccatgcaaatgcattacggcaggccaagttgttgggagatcaacttgtagtgggagttgttagtgatgaggagattgtggcgaacaagggtccacctgtgctttcaatggaagagaggtactgcagaaaatagttcttgttttgtgcaatacgctatcaatttctccttaaaattatgctgttgacgttagcaataggattgcaaaattgactgggaaagcttgtagaatcaccatcttatcatttgatatccaaaacatttaaaagctagagttctagacctcttggaattggcaatcatggaattacacaatcttcaattgtacattaactctaaaatgtaggtttccttggctctttgctagtattgtgaggcatgctataaaatattctgaattcattttgctgaagtactctactatgttattgatgatcttgcatgcccttaaaccttcagcttctattttttaagggatcaacttaagatattgtcctctcaagagattataaactgcctagtcctaggttattttaatattttaatattaacacaatattctggttccccattgacttgctatttctgtataggttgacacttgttagtggattgaagtgggtggatgaggtcattcccaacgcgccctatgagatcacggaagaatttatgaataccctcttcaataaatataacattgattacattatacatggagatgatccttgtcttctacctgatggaacggatgcttatgcgttggcaaagaaggttggacgctacaagcaaatcaaacgcactgaaggtgtctcaagcactgatatagtcggtaagatgaccacatggttcagtatcggcactattcttttggggattgtattctcttggtggccatcaatgtcatatattcccagtctattgtaatcttaatgtgggaactgtgttctttttccacccagggaggatactactgacattcaagcagaaagaagctggcagtatggaagctaccacagatgcaaatgttgctgtcaatcagaacactggagctgatacatatgataaagtgaaaagtcagctatccaattttcttccaacatctcgccggataatgcagttttcaaatggacaggtatgaaattttaaggaactctgttttactcacttgtgttggggctaaggttactcaacattcttatggttccatgtgagtgttctttatttagcacggttatggataaaaaactaactcagctattctgactgatcacgcacattaatgataatacacccatttgtattgtttcaatcttggtcatgaatgataatgttgacagtataaagttgatatttttttttttacatatttctatgacatgtcactctattgcttttattgaacaatagctcatatgcactcaggctcctttgccaggtgctcgcgttgtgtatatagatggtgcttttgacctttttcatgccggccatgttgaggtaatttttatggttcattttatcatataccaataattttaccataattctcccagtggttcacacatgttccagagtcaagtatatattgtttttgtttaatgcagatcctcagaagtgctaggcaacttggtgacttccttcttgttggtgtccatgatgaccaggcaatcaggtacttatttggtatcagaaactagttaatcataagcgaacgtaaaatacatttgagaccaattcatgttatgtgatttctcttttgaaagttcatataagatgcttatgcaaattaaatgtccagggatagaagagggtatcgtcctatcatgcacctccacgagcgtactcttagtgtacttgcatgtcgctatgttgatgaagttataataggcgccccatgggaggtttcaagggatatggtatgttcacacatgtttagctatgtttgcatgaataggtttaaaga
